United States Patent Application Publication US 2009/0018031 A1 - sequence listing, part 15

SEQ ID NO: 7689 - DNA, 6000 bp, Homo sapiens
atggtggtgggcacctgtaatcccagctactcgggaggctgaggcaggaggattgcttgaacccaggaggcgtaaattgcagtgtgccaagagatcatgccactgcactccagcctggacaacagagcgagagtctgtctcaataaaacagacaaacaaaaaactcccaaaacattaaatgactgaaggtaggctattttggccataataagttaattcttttgaactgtgtcaagtaatagttcttttatccttttaataaagatgcacgtgtccacaagaaagctatctctcgagattctcaggagtaacactgcgtagaattcaaggaagatctagtattgtggatattgttttgtctgttcagtagccaagtttacgaactttctctctagggttgagttgcccagctggtatgcacaatacctaaggtgccctgtgtgtctgggttacataggtgccaagactgatttccctcaaccttcagggggctgcctgggacccacacagcttaagcctcaagctggtgaaggtggcctctttttttctttttttcttgctctgtcgctcaggatggagtgcggtggtgtgatctcggctcactgcaacctccgtctcccgggttcaagcaattctcctgcctcagcctccctagtagctgggactacaggtgtgcgccaccatgcccagctaattttttatatttctggtagagatggggtttcaccatattggccaggctggtcttgaactcctgatctcgtgatccacccgccttggtctcccaaagtgctgggattacaggcatgaaccattgcgcccggcccagcctcttctatttaccctggtgaatgcttaagtatcatcccttaccatggaaggcactgggcaccatgttctgtgactggactctatcaatctttcatctttgcttctccttgtctgccctcccaccttccacccccatagttttctgaacaaattctcatttctgttgggctggcttctttttccagtcggcctaggatttgctggccttgagtccagtcagtggctattgtttggcagctcaggttccctgtaaggcaaaaccagcaatctactgaataaacctagcattaagctgagaaaaagaatgaataaagctaacaccatccattaattttctcgttttgacttaccaactgatgacaagcaaggactagatagtagtcgggccttcactttatgtaccagtttttcccctgtcagtgtaccatgtagtacactttatatagtttcttggcacagatgtttaaggcaaaattggtaaagaaagtttggaagatggattacatatatttatttctaaaaaatgaaaaaaatacatgaagaaaacacttaccctgataggcaaaataatgtgtgtgaagataagagctggtgtggtttgtagtaagggcactgaagtaggctgataacatctgggctttcttcccagctctgctacctttatactgtgtgacctcaggcccggtattttacctcccgagctttggcttcctcatctcagaaggacataataatacttgccataccaaccccaaagggatgttgtgaaaatgatatcaaagtggttggaatgcttgaaaatgctaggacatttgcatgatgtgaaagaatgatcttggatctaagatcaaagagttcaggcactttgagattagtaagaaatttgggtcaaatgctgaagtagggctgctaccactacagtggttttcttttaaaattttaactacaatacagaattatcatacagttctatattatttcatatatatagaattattaaaatttggctttaaagtgatcatatttgttctgaaatgtaagacatttaaaatttcttttatataatctaaataagatacagggaccaatatcttttttctcaccagagatctgatcatattcacaatacaaatttttgagaagtatctgtaccacaacattttggaattacatatgtgtgtgtgtatatatatatatgtatatatatatacactcaattatatgtatataaatattccattttatgaatcatgccaatgtcttttatatgatctacaattatataaatacaaattcaattgtctaagcataattcatcaacccaataattttctttagctgagtctcagatgctgagactatgcatttaaacagatataattactatttttaatcagtgattgtaacatgaagatctgaatctttagctaccataaaagagattctatacactattttctttcatttcttccccccaattcactgaaaaaaattagatatttttattttaccatgctcacaagcaaattcaaaacacagtgtatattgttcatcctcactcagtcagcacagactaagtaaaatatcatccatctcattaacaagtacatttttcttttttcagttgcaatctgtgtatacttcttattaatacaactagaaaaccattaattatgatttaatttattcagtttgatacccaaatatttaagagcacggtgtccctagtggacagaaaataataaaaggaatacttggtggtaataaacttagaacaaagccattaaataaaatttatttctgtcttactgttgtaagttatgtctcactattacaggattaagatctttttaatggcattaaaaaatagacttttagatttctgcaaggtcattcctctgttatggggcttacttggctcctgaggaaatatcagttgatattgtgggtttggaaaggctcagttagcatttcctgtgcactgagtatttaatctatctctgttttaaacatgagctgagaccctgaggcatccctcagactatgagagacagacttaatgggtgacccactaggaaatttggtgtttaagcagaaagagacaaccatcatttgttactgtggacagagagtgactgcaaggagagatttctaaaaatatattttacaaatactcgaatggtgcttaccatgtaccagcctctcccatgctctttacaggcattaattcatttaatttaatcctcacaacaatggctgcaccgactaggcttgttttctggtacaacagataaaagtctactcctggggagagctaatcagtcttaacaagtaccgtgggggacacttgccgaacaagagaaatcaagagatagggttaaaattaggggagaaaccgatggcagtcatctatgccagctaggttcatctgtacagtcttcagatttcttatagatgaatcatcaaattctataatgttactacttctctctcagtttatagtaaactttcctttgaaaaagccaaccttgcctgagaagaatggtctaccactaggtcagcaaaggtatggaactctcttttgactagtggtatggtggtattagctttgtaaacaaccagtctaactgatgcaaataaagataaatgaacagtgggattggagaggggaaaatcacaatttttgcttcctcagcattcatgacttctttggcttgcatagattttgtttttctttattttacaaatgagtttccttttaatgttgttccactttgcatttcaaatttcccttaagcatctaaaaatgttacaaaatagtgtcattacctttcaaattaaacatcaaattagccagagaagttgagttgtgagtactccaacaagcaaaatattaaaaaatgaatttcaacttggtgatcccacctagtgaactaatgggatataaggaacctcttacgtcccagacaccatgcttagcattatgcacagttatccatttaatctcacagccttgcaagggggtattatatccactgtttgagggcggagaaaacaggctcacacaaagtagtagcttccaggggtctcacagttaatattaatgaaaggcttgggcttatacataggtgtttcaggttccacattgcaaagcattatctcagggacgatctatggcatgcgcatcccgataaaaacgtaccaaatttattggctatcaactacagttccatctggaaatactcagcaaataatggcagtaaggcatcccgccacttcctgcatgattagttgaaaaagaaacacctgcgcacacacatttgaacaatgtgatacagctaaggacctggacagtcagctagcaggaagaaacatttgaacgaagggtagaccacggcctaggaggtggatgaagacacccgtccgtttgcctactgaagcaagatggggctgaggcgctcaagggcctattggctgcccagaagcctttgcagcgccgcctgaatacagcgaggatgacccagggttcaccttcagcgttgaaggcaagtcctggtataagggacgcacataggtccgcgccacatcctgacactgtttccacaggaagtgcgggataggaggggggattcattaatccaggtcggaaatacaccttgttcctcgaggattttggaaggaaattccacccgcgaagtccccttttggagatgcccttttcctttcaggtacagcatccttcattatgtacccccagggtacaatgtatccggggctcgcaacgcgtccctcaacccccagcagcgcggtcaccgcggggtccccgggcgggcgggggcggcggtgacgcaggaggcggtggggccccggtgcggcgggcgcggggagggggctgctgggcgcgggcctatcaggacgcgcggtgtttcgggcgcggggagggcggggacctccaggtttcctcggggcccggcgcagcgccgcctgccgagttccgagcgagcgcgcgaagcgcgcaggggtctcgagacgttcccgccggtcccggttttcctccgcggctcccccgccccttcacgtccgcctctttctccaaccagacgcggctccgacggcgctcggcctctgctcttccggctccccggctctgcccgcagcgcgcgtcgcccggttgctcttcgcctggtgtccgcgggcccggcgggggcgcctcaccccgggcgcgcggcggtaatgccgctgccgcccttgcggccaggcaggcagctggcggcggccggagtcggagcgcgttcgtcgctggccgggacgccgccctggcctgtgctcagctcccgcggcggccgcggggcgccggggcccggcgcggcatgaggaggcggctcggtgcaggcgagcgcccagctcctcggccccgagggcccccgcgggcccccgcgcgtggcgcgcgctggttgcggccccggcgcccacgctagccccgcgcaggcaggagacgccgcggcccggagtaggaggcggcgcagggcctgccgagcggacgcgggcggcccggaccttaagcacggggcttcgcggcgggaccccgccgggcgcgggcagcggagccgggcgtgctgcagttagctgcccctctccgcaggggcgccgcggcgcgcagcctgcgcctcctcccacctgcagcccctcctcccgccgctgcttggcggagaaaacgctcctcctcgcccttccccggctttcttccgtcctgccgtccccgggcccctagcccccagtcccctctcccccctccacctcttgtccctcggcctccgcgcctcccctcccccgactctctggcctcccattcattccgtccgctccctcccatttcctcttttccgctcgggccctctccccagagcctccccgcgcggaccccgctgcagtctcggggttctcagcacatttatggaagtttagggcctggacagtggccccgagtccggcctgagagcgcagcctgggctgctggcagggaagaggaagatgtctgtgctcaggcggatgatgcgggtttccaatcgctctctcctcgccttcatcttcttcttctccctctcttcgtcctgtctgtacttcatctatgtggccccaggcatcggtaagcaccgagacacaccctcg

SEQ ID NO: 7690 - DNA, 6000 bp, Homo sapiens
atgttattaaggtgcaaactagggtcaatagagatgcaatgtcttgcctaaaaaagcaatagctggccgggtacagtagctaatcctgtaatcccagcactttgggaggctaaagagggaagactgcttgaggttaggagtacgagacaagcctgggctacagagcaaggcaggagaatggtgtgaacccgggaggcggagctcgcagtgagccgagatcttgccactgcactccagcctgggtgacaaagcgagactccatctcaaaaaaaaaaaaaaaaaaaaaaaaaaaaaacccctaaaaaactagaaaggcgtggtgccacacacttgtggtcccagctattgcagagaactctgatggagccgctgcattccagcttgggcaacaagtgagagatcctgtctcttaaaaaaataaacattctagtctccaactagttggcaaaaaaaaaataaataaataaataaataagtaaataaaagaaaaaagaataaaaagaaaaaccaatagcttgtttatggcagaaacagaccaagaaaccaagtctctaaaacacagcctcagtctaggccctgcttacaagttcttttaataaaggttacaggcaactggggaggtgggacaggatcctgccaaagtctagggctgcactaccctcatcctaagcactgctgtataatccaagcttcaactgctacgaagtaaaaatacagttcagatatttcactgggaataccatttttcttgtttctccaattgcataacatcatataaggtaatgctaaattaagagaagtgatgagaaaaaaatggctaaccttattttatcagaaaacaattgagatcaactttaaaatctggttaatacttacagccatcctgtttacaaatccactgtatgcaattgactcgggcggtgtgaccattcaagttggtaacaacaacccttttctttagagaagaaaatacagttagtaaactggaatttatcctacagaaaaattaataaataagtaaaaacagatttcagtgttttcgatgctagtaaaaagatcaggtttacatcaaacagatttgccttcttcaatctataaacttttaaccatggcttaagtcatccattcctctaaatcagtcctgcctttcttgagactccacattcccagcatcctgtcctcccattacactgagctctcgcgtctgcatccacccacctgcttctgctcactctcctacagtgcccacatccttttcacctaggcagcctgtcctgacacaccaaactagacaagcagctgcttccttgtggaagtaggcctactatgcttgcaccaatctgagggtttctctgaccaaaagaaaaaaaaaaaagccctccaatagaagaatctgtgattaatgggtacaagcacagttcactttgcatgccaatggccaatgagacggtgggtttttcagacccagtggcacaatgtcacaaggccacaactactaaggtcctcacacatcagattcctgcagggcctattgccaggttctccacagatcctcaacagactgctttcaccaacttcaccccacacttggaggtctcatacttcacacaccattaaagattttaactgtgactactgcaccttcctctttacagcccctttctctatctgttgtcaacggcaatggctttgtatctgcttatacgccaactagaattctcatggctaagaaaaaggaagaggcaaatgtgcataaactaatatatttcacatataggttatttgaggctggaaaacaatttactgtacttcactgtctctcccactagactgagaattccttggtggccacgcgcgttatcactcattaccttgtgtcatcatcactcagcccagggctagcccacagatggtcgtcgaagatttgctgaatgagcatcattcccaaaactttattttagcatttgaaatgcttttattcccatatttacttaaaagcccaatcgaggccaggtgtggtggctcatgcctttaatcccagcacttcaggaggccaggagttggagaccagcctggccaatgtggtaaaacctgtctctactaaaaacacaaaaattggccaggtgtgggggtgcacacctgtaatccctgctactagggaggctgaggcacgagaatcacttgatttcgggaggtggaggttgcaggttgcactgagcagttactgtcactacactccaaaaaaaaaaaaaaaaaaaaaaagcccgaccagcaaatatttaacaggacaaagtactttttaggctcaacacttctttgtcaatatgctaaaattcactagctcagccaccaggttatcatttaaaatctgatggaatacatggaaacaaatccattcaactgctgcaaaaagatgggattctacagctgaatcagaatttcatttcagtgtgttaagtacatcaaagcatgagtataatcatcttaaaagcagatcttgtcctgtgatatagcggcaagtttgtccttgcagactttaccaagatgcttcctctgccgtaaacatctcaggaccgtgggttgactggcaaagagtgtgccttgctaattttacgacggagttgattttaaaagggtgtcaccctggctctcccgggctcctgcttccctgacaactccacccctatggccgcccctcttagggtcctcccagtgcccagccatggcggaacggtgccgcaatgccgcaaggctccgcgctcacggcgctggatgaggagacgctgtgggagatgatggagagcctgctgtggtctctcccattctacagtcggtccttgcctcatggtccctttaaagtttacccttgttttttgcactttctcttgccattcaagaatgcaaataacaagaaacaaaaaccaggaagaggcaagcaagctcaagatggggtaatgtggttacaaatatttcatatatatatttgaatctccaaagggtgtgagaataatgtttttttgagatagggtctggctctgttgcccaggctggagtccagtggtgcgacccccgtccactgcagcctcaaacttctgagctcaagcgatcctcccacctctacctcccgagtagctgggactacaggcgcacgccaccacaaccagctatttttttttttaaactttttgtagagactggggtctcgctctgttgcctaaactggtctccaactcctggactcaagcgatgctcccacctctgcctcccaaagtgccgggattacagacatgagacacgctcctggccaataatgaaatttttaaccaaattaataaagccgtatgaacagaaatacatatagccatctcctgcgttgtatttgaattttcaacattttactttttacactgagcctccttttgagatgcaagactaactgtatagaccaacttagccattgggaatggagttataatgaattccggggagcatgcaaaaactattcacttgagaaatatggtgaggaaagcaccaagaaaataaccaactgactgggtgaagtcgagggaagtcccgccttataatcagtgcttaggatccccatcccctatgacctttcccccaaactgacactttctctaaaatgtccattcccgtagctaaaacacaggtaacatttccttgaaattcaatacaacaaaagttcattaaccaaaactgaaggaaatactgaaatgagattgcacctgtgggatgatggttttaatctacatataaatttcaattgttttaaaacccaaattgattaacggtactacagttcccaaggaaggcttcaggtaagatgcttatcattcgggtttctgcgtgggactaacaggttactagcagctcatgggcagcaatgaccctaggatgacgccacgcgtgagacggcaaagggtgaggggtgaggagcgagtccggcaggtccactggagactccgagcccaaaccccgctcccctgagccgacccgactcgcctcctaggtctggggcggcaactaacagcgcgcccggagcacgtccacaggttcaacccgaaaagcacaagggtcggccgtccagcgacctctcttaccagggggtcatagagcaccacggagcaggacgtgccaaaggccagaagtcctctgggcccagagctccagttcaggactccccgcacccggtttgggcagcaaaacacgtgagaagtctccagcacgggtgccaccatgtcgccaactggtcagccgcacaaacaagagacgcgcacttccgccctcggagcggaactactagggtggtttctcctgaggcatcacccagtccacgtttcgcagccagccgagggccagacggaggcagccccgcccccctgagactctccgttcccaccgcaggctggaacccctgtgcaaggccgccgctttgctagctctgctcttggaccgtggccccgctccgcgaacgagccaggcctttgtctcaagagcgaaatccgacccgagtggctcgggaccctcccgaaggacccggggctcatgtgcctggggcagcgtcagaaacatctcgctgccccttacgacccggctcccagcagcagccagggctggccccgggggcgctggctagcgagtagggcctcgaggaaatgacccccaactgcttacaatgcgctagggccgcgccacgcccccgcggcgtcggcgaacacacggaaaagcggatccgtctgcggagccgggttccggggtcgcactgcgcatgccctgcagtcctgggcgaagggggcggtggttccccgcggcgctgcgcgcggcggtaattagtgattgtcttccagcttcgcgaaggctaggggcgcggctgccgggtggctgcgcggcgctgcccccggaccgaggggcagccaacccaatgaaaccaccgcgtgttcgcgcctggtagagatttctcgaagacaccagtgggcccgttccgagccctctggaccgcccgtgtggaaccaaacctgcgcgcgtggccgggccgtgggacaacgaggccgcggagacgtgagtctttcaggtccgggagcagggcggctgggaggggagctcctcaggccagacaggcgtggcggggtaggggtggttctgcggagaaccggatcctgcggaccgggcaggggggctacagaaagaggatgctggggggagcccgccgcaggcgcccactcaccctagagagccggacttcttaaggtgctcagatgggcttcggggtgcaacggaggattttttgaggaaaagatccgtacttttcatcccatattcgaagaagggactgacgtgtttagaaataaaaagcttttagaagagagctttgtgccctcttttccgttttctgtactcgcctttttctctaaggcccttcccttctgctttcctttttcctccagcacacaccaacttgcaggaaaggagatccttcaacgggtccacgaccgcgctcagcatcctccctggagaaaggctcggagctgtcccctgtgctagtcccctcccaccccgctcctcgcctctctcctgggaatgatttctaaatgtttatcttttacctagtaaaagaattcccgaaacttcaagccccaaagattcctctttcaggagcctcgttctacgccgtacctccatttcccactgttccctgtatgatacctcgcacttgtgcaacacatgagtttaacgagtacttgtaatatacattccttcatgtgttttcctccttcgccttgcaaaataggttttaccggtattttagataaggtaatgaatgcgagagccctgtccaaagaacagctgaccgtggtagagctggatagccccatgctcttgcttagttgtaaacttgacgtctgcgtcttttgctggagatgtgagtttgaccaccatcacctccaccgttggtgctggacatcctgctggatctgaatt

SEQ ID NO: 7691 - DNA, 6000 bp, Homo sapiens
caatttgaattttacagtttgaatttttacagaatgacagtaagactttgtcatcccagataaaaggcccaagcctggaattaaaatagtctgtaagtggttggaagaagtaataatgtctacaattaacagttatgttgctgtatatttctcatcaatatttttcacaattttgctttacgcatttgatggtaagctatttggagcataagccttaaaaacggttgcctttttattgtcagtatatactttcacatagtaaaactgtatatcttatttcttttgatgttttattgttgactgttttttttccctgagacagggtctcactctgtcaccaaggctgaagtgcaggaaagcgatcgtggctcactgcgaccttggccacttgggctcagatgttcctcccatcttcacctcccaaatagctgggaccacaggcgcatgccaccatacccaaatattttttgtaatttttgaagagatggagttttgccacgttgcccaggccaatctagaactcctgggctcaagcgatctgcctatctcggactctcgaaatgctgggatcacaggcatgccagcatgcccagccctccaaaagtactgggatcacaggcgtgccacaaagcctagcaagttttattcttgactttttaacttaatcctttacatttctctatgtttaataaatcattgtgcattctgttatttaagtatttttactatgagcagcatatggttaaactttattttttaactcagtgtaagatcttttaccttggaatttgtcaatcttccatgcttacttagatgattagattttgctcaatttatctgcttgtttttcttttgtatcatttttatgattcattttaaccttactcttgcttcctgtttttttaatatctgtctattttatgtaagagtatatataatccagtaatttttgagctttaatccatgccagttttaccagtgtttatctttatattttcaaaataaatattgtctaataataaaacattttttacatctccattacctgaaatgaataatttagtatacttctgctctgcccaatcccagttttttagtgataatggaaggctaagagaggtctcacttaggaatagattggaaaaggaggtagaggagctagcaagaaatacattcaagatgaactgaaagagaaaaatcttctaggatggctctagatcaaattattgttgagatatcaagacttaggaatttgagaagtgtattcaaaggccgcagtgtgaaggcaggcctaaaaagtaaaaataaaatggagatagaagtcctaaaaataaattagtgcagagaagataaaaaattaagaatcttgtggaatatttggggttagcattagtgaaggcctttggtttatctttttgggattgttggtatgtagatcaaggatatgtcaagctggcttaaaagacttcactagagatagtgttgtaagaatttaaatcagaagaaatccatgagtgctgataagtcagaaacttcatagtacaaatgaaacttcaactgattcttaaaggataaagaatttatagagagatacagggaaagaaaaaatgcaatctgtgtaagaatcataatggatccatagtgagggggaaaaggtcaataagaagagactgaataagataggtgtgatggctgtagaatagtgctgaccggagtttgtagaaagaacaaggcaaaataaatatgtatgtaacgatgatctcataagtttctttgtctagttctagagaaaaaagctgtcaacttcttgtatagtctgtaagctccatgaagaaaaagatcattttttctcattttgacaaatataaatcactcacttagtaaaaatctagtgatacatgtttaatatgtgttgaaagaaaataaagaaaagaagaatataagctttacttatttatttggtggtttggtttcactgtcatatatgaactattaaatgcacatagtaaatgctgaatatgttgaagaaaaacaaatgtagtaaagggatttctgtgataccaaatgaagagggatttgtcttgcaagatttttacttgggtgtgtttgtaatataaatctattccattagcattattgtcagcattcataatataataatatggaacattgaaacaattatccatttcccatcatcagatacttcagtctactccacccacataccagtaggtaaaatgatattttagtaaagtgatattttattactaatgtaggtattactaaagattactgaagatcatggcaacattttcaaaactttttgaaattatatttttcttagcatgaggttctaaatactttcaccaataatatttttcaaagaaaagagaaaatatagactgaactatacaattaataaataacataaacaataatttaaaaatcaaaatatatactaaatttaattacgttataaaatagaataaaaacatataattagtcatcaatagctttcagattaaactgaatttcttaaaactaaattcaagtgttctattaattgtttctcaaattatgtatagacatttgcaattggaaaagaaagtaatgtgaaagttgaaccattttaacagtgaaaaaatcattctgaagtaaatactgccgcctgcacagaatggtctgtgtttgccaaagcaagaacttgtttgaggctgtgtgttttgggtggtgaaaaagtggttacctagcaacaactcctcctcccaagtctcccctgctagagcggtattttgcacgtcagtaaattggttacttgtttgatggatctaaaaagaataattcagtaatgtggtagggtgtgaatctcaatcataaaaacgtacaggtttttctctgtgtggggtctgtctactgcccactcctcatctggtgttgctagaagcttgtctaaagagattgaataatacctaaaatgttattcatcaaatgaaaatgagggaaacttcaggcattttaattaataacagttcttttcagtttgcttataaagcaagcaatgaaatagttacttagtccacaatagcattagctctgggcaagaggtaatcttatcacgatgtttcctcagatgtcagacagcaaaggatggggtgggttccgtagaaatagagtttaaacaatctgtacagtttacagataacaacattataccatctgaaggtaaaattaatgagatactaatttatagaacaaacacataaggtatttatgtttacaacaaatgagcttaaacatatgttagcaataacttagctagaaaatatatactttagtaaacatcacaccatgtatttggtccacctatgatatgcatcacaaataaatgccacttattctttaacctaatggatatttgtttctagggacaaccctacagggtgcatgcatgcataattaaggaaataggtaatctgaataaagtgaaatgataaagacacaaccacagactctgccagcagaaaaattaaatacagcaaattagtttgtgtgttttcaaagcatgaagatataaagtttaaaaaaatctgttagaggaacactccaatgccaagtatgtgggagcaaatagaatagcaaagaaaaaagactggtttataaaattttccatgatgcaaagaactgaagccaatttctccccagacagagccctgatgctctgggctgctgctagccaatgtgcagggacctgtcacttgcacagtagctttctgagactcaccctgtatcccttctcccacatcccagcacacactgaatgccatttccttattaactccagagcaaagaaattctttgcagagcaataattgacagttggagttacagcttgacttctttcctttgaaaaattgctaagcatttgttttagaaaggcacactcttcagattccaatgaatcagaatccgacaccatatttttcacagtttttcacctccgagaatatcatcagtttagaaaaaggaatgctttcctttgaaataaccaatgttaccaatgttactttagatgttggcctgattttggaaactattttgtacaaacgtactagaagtcaggccttttaaccataaatgtcatttcagaagcgccttattatttgcaaaagtcataactgagagtgactctgaatatccaaggaattatccccatctgttcctaagtgctttaactggtcaaatgtcagatattaaagggaagagagctgagagaccaggaaagatcaactgttccagcaaaatatttagactaataatttattagaacataaaggattatactgggaaaactatcttatatcaaatgcatcaatttgtagtgaatcttttctaaatgtaataagtatcataggtataacatgtcaaagaaaaaaattaaaaagcaagaaaacatgtttttgcatgttaaaaagagtaatttgaagcagaaacttctcctctgtaagttacgttattctgaaaactcagaaacatatttttattcatctaggtgatcaggagattttatattaggaactgacagggatcagtttcggggcttatctcggtgagcctctgagcccccacaaaacagcaaagctaatctctagtggtccaacagttaaaataattgatgagcatgtgttgaatcctcaagagaggagggaggaagcaagaaggaaagcttgaagggaggaggggaggggggcaggtgctgatttcagccctgtagcgtcaggattgcgtcaattcgggttccagccacgtctggagtctcggagacgagcttctcagaagagccaaaacaggaaccgaggtggcaaatcactgtgcgagggcgagtggacctccctctttgcctcctccctgttccaggagctggtgccctgggctctgcgctgttgttttcagcgctccgaaagccggcgcttgagatccaggcaagtgaatccagccaggcagttttcccttcagcacctcggacagaacacgcagtaaaaaatggctccgatcaccaccagccgggaagaatttggtaagcaagttactgaacttatgactgcggttattccttgaatactctggggtggactgtttattcatttattttttgcccggttgttgaatacagatttcctaggtagttaatttaaaaggaaaatgagaatggcagtcaggcaattgtggcttatttctgcagcttctctcccttccttggtatctctctccctgaaactgtcttctgttagggagaatttaccttcaggaagttcttaaattttcaggtacttctgtaaattgcagcatgtactgagtaaagaaaaaggggtctgtttttcccatgttggtttcatctattttgtaggtgattcttatttgtaggtaaatctatattttattaggagaagataaatatatctctggttacattggggtttgatcttggttaaaaaaagcaacttgtctattggggtttggcaatgtatattttattacagggcgtaccatatgggtgtttttctctgctatgtttttcttgtatccttgaaatatgttgctagtgaaagacagaatcatatggtagcagggttaaagagagtttcaaaatgaactggctcagcccatttcatttcactgctgagctaaccaaagcccagagagatgagggaagtattataggttgcacaattagctaaaagctgctggaaacttgaattagggctccaattttcccgttcagttttccttttctcacaccaagtttttggtttcagtacataaaattagacgtacttcatagagtaaaaaagtactatttttagatctcagtatattccaaaggaaaaaggtcagaattttacttacacgtattttttaaatcatgaaatttcatagaaggttgtgaagaggagtgatatctacagatgtgtgataattgttattaagctgagtaaaataact

SEQ ID NO: 7692 - DNA, 6000 bp, Homo sapiens
gcagagtgacatgatcttggctcactgcgacctccaacccccgtccccaggctcaagcaattctcctgtctcatcctctctagtagctgggattacaggcttgtgctagcatgcagggataatttttttatttttagtagaacggggggtttcaccacgttgatcaggctggtctcaaactcctgacctcaagtgatctgcctgcctcggcctctcaaagagctaggattacaggtgtgagccaacacacccagcctaaaatgattttcttttcaaaggaaacttactagcaagccaagcttatttattatttattttattttatttttagagacagggtcttgctctttcgtccaagctggagtatagtggtgatcacagttcactgcaaccttgaactcctgggctcaagcaatcctcccgcttcagcctccttagtagctgggactataggcgtgcaccaccacacccagctaactttttgtattttttgtagaaagagggtctcactatgttgcccaggctgtttttgaactcctggccccaagtgatgctcccacttgggcctctcaaagtgctgggattacaagcatgaggcaccacacccagcctgtcttgcttattctttttgcttcaaacatatctctgctctggctggatgcggtgcctcacacctatattctcagcactttgggaggccgaggcaggtggatcacctgaggtccggagttcaagaccagcctgaccaacatggcaaaaccccatctctactaaaaatacaaaaattagccaggcatggtggcacgtgcctgtaatcccagccacttgggaggctgaggcaagagaatcacttgaaccctggaggcagagtttgcagtgagctgagattgagacactgcactccagcctgggcgacagagtgagaatccaccacaaaaaacaaaaaaaaacaaaaactaaatatatctctgctctgtaaccaaatttcagataaactggtgcagcccttcagtatggggcaaaaaaagttatctttatgtcttttgtccacttttatcactacaaattttacaaaatatccctgcaatttttttttttttttgagagggagtcttgtgctgttgcctaggctggagtgcagttgagcaatctcggcttactgcaagctccgcctcccgggttcacgccattctcctgcctcagcctcccgagtagctgggactacaggtgcccgccaccacacccggctaattttttgtacttttagtagagacagggtttcaccatgttagccaggatggtctcgatctcctgacctcgtgatccgcccacctcagcctcccaacgtgctgggattacaggcatgagccaccatgcccggcctttttttttttttcagacagaatctcactgtgttgcccaagctggagtgcagtggtcactgcaacctccatctcccaggtttaagtgattctcgtgcctcagcctcctaaatagctgggattacaggcatgtgccaccatgcccagctaaagatggggcagggggtgcagggatctcgatatgttggccagactcatcttgaactcctgacttcaagtgatcaacctgcttcagcctcccaaagtgctgggattacaggtgtgagccaccatgccggctaattttgttgttattgttgttgttgttttgagatagtctcactcctgtcgcgcatactgaagtgcagaggcgcaatcttggctcactgcaacctccacctggctcactgcaaccttcacctcctggattcaagcgattctccttcctcagcctcctgagtagctggggttacaggtgtgcaccaccacccccagctaatttttgattttttagtagagacggggttttgccatgttggccaggctggtcttgaactcctgacctcaggcgatctgcctgccttggcctcccaatgtgctaggattacatgcgtgagccaccatgcccggccttgttgtttttagaaacgatattttttcctgttagcttgtgaaagttgattgggtcattcttgtcatccccaactaaaacagtgtcaagaggtaaagggaaaaaaaagcactcagggcacataacattgctccaaaaatgtaattatctgtaagcctggctgctgaaactgcccgctataacctaaaccagtttttttgtttgtttgttttgagatggagtctcactctgtcgcccaggctggaatgcaatggcatgattttggctcactgcaacctctgcctccaggttcatgtgattctcctgcctcagcctcccaagtagctgggattacaggcacccgccaacatacccagccaatttttgtatttttagcagagacggggtttcatcatgttggtcaggctggtcttgaactcctgacctcaggtgatccacccgcctcggcctcccaaagcgctgggattacaggcgtgagccaccgtgcccggctgacctaaaccagttttatctaattagctgctaaaaacaacctgcagtgactctaaggatcgttttacctagttgccattacttgccaatcaaaacttgccagctccccaaaaccttactagtgacaatgaactttcttaaagaacaatatacaacagttctctttttttgttgtttgttttgatatagggtcttgctttgttgcccaggctggagtgttccggtgtgatcacagctcactgcactcccaaactcctgggctcaagtgaacctctcatcttggcttcccaacgtgttgggattacaggcatgagccactgttcctggctatatttctcttttacaaaaataaaacctctaaccatctgtttgttcttctgacgtaccaaagaccaccctgtttgtgtgtatgccctgaatggcaattattgcttcccaaatgttttaaatttatagatttgtctctgtattttattttacttggacagcctttttctttttcttttctttttttctttctttttttttttttttttttttagatggagtttcacttttattgcccaggctggaggacagtggtgcaatctggggctcactgcaacttctgcctcccgggttaaagcaattctcctgcctcagcctccccagtagctgggattacaggtgcccgcccccatgccgggctaatttttgtatttttagtagagatggggttttgccatgttggccaagctggtctcgaactcctgacctcaggtgatccacccgcctcagcctcccaaagtgctgggattacaggcgtgagccactgcgcctggcttggacagcctttttgtacccctgattcccaggagaactgctgctctattttcccatggcttaccttgaaaagagtaggatactagagaaaaggatggctaatcacgtgtttacaagccatgtttcaggagatgacccttgtagcccggatatttatttgcctcaccaaaattcaggttctaggtgtaagccaggatttgggggatggaactgaaaatgcttctccaaacggtgaaaagcgggcccagcgcagaggctgaggaggaaggatcacttgaagccaggagttcgagaccagcctgggcaacatagagagacctccccccacgccctgcccaccaccgccgtctttacaaaaaaattagccaggcatggtggtgggaccacaggggcacaggctgaggtcagaggattgctccagcccaggagttccaggctgcaatgaatggtgataaacccactgcactctttcctgggcaacagagtgagaccctgtcttaaataaaataaaataaataaataaaaaaaaaagaaaagtgaaggcaacgttaataagtgtccactatgacataataataaccagcatcacacacacacacaaatcttgcatatatcacaaaaatctcagtatggtaattctgtggagaaaaaaaaaaagcccatccaggtaagcatagaaagtgttttttcatcatctccctttgactccaaatgaagaagcagagttcccaatagcatgaactagatgttggcagaggaaaaagcgagtcctcgtcctatcctggtgtaaacttctgattctggacaattctcagtaggattggcaatgactcttctaggcctccttgtgattgttgatatattttttttaatttaaagttccggaatacatgtccaggacgtgcaggtttgttacacaggtaaatgtgtgccatggtggtttgctgtaactatcatcccatcacctaggtattaagctccgcatgtattagctatttatcttgatgctcccctcccccggttatcaggatttttaaacagtttgctctaattcactgacaggattcttttagaatgaatctaaaaaagctgggaatctttaacctgagcgcagatcggatcacgtggaacggtgctggtgtttgttaaaaattcagattgccccgaattttcgactcagagggtctgaagtggggctaagatctgcagattaacgggctccgtgggaggctccctgctggtggccagtcccggggtttagctgttcactgttgctactcgtgctaaaccacggtctaacactaccgacactattaatcgccctggtcctcaagacagccgcgaccccagacgggtgaggccctcatcctctagcaccagatggggcctgggaactgctgcttagcagattcagctacccacgtggtcacccggggcaaccacaaggtcgactcaaaagaccaaaataaatgtataacgaatgccaggaccaaagccggaatatatctaatcattcattttgaggtttaaacttaaaaatgttacataaaaaaataagtaacctgccaaaaaatgcagagtggcggcgggggcggggggagaggtggtgaacgcgaggggcagtacttccgggtcaggtgggccggctgtcttgaccttctttgcggctcggccattttgtcccagtcagtccggaggctgcggctgcagaagtaccgcctgcggagtaactgcaaagatgctgtccgtgcgcgttgctgcggccgtggtccgcgcccttcctcggcgggccggactggtgagcaccgaaggccggcatgatgcaggcggccgggtggggctgcagggtggtggtgcgccggctcgggcgctctctgcaggagggcgaggggctgtggcgaatgccgccatcttgcacccgtggcttctccggctggacagagcaggcgacacaggtgcccttttgctcgtcacctgcgcagaggcagaatggtacagggcagacagttaactcgatggtgtccagagacagggcctcaagattcctgtcttcggctgacagcggccctagaagggggatcttgggtgaaggtcagggcttgggcgctagctctccgaggcctgttctgaatcggtgaggttcctctctttcgattcttagggtcgcgtcccgctgaaggtcagaaaactgctgtcagctcttgttgaagctagtcagtggagtctgacattgtgtgaaggtcagcaggcccagcatttcacctctgcctggagctcagtttagaggaaaggaataaatgaaggtggtttttggaatacttacgtaggctttctcttagtgctgaatacgaaacgaccgtgaaaacgtcctgcaggtgcaaagaaccatttcatgtggccagcactgtgacaacagtgaagctggtttctaaattgtctctccggcagagtgtgtgctttgtggcacttggacgtgtttaaagaatttgtccttgagttttccacctggttttgagtaatttttagtgatggagaattcaagtaaaagagaacaaggttggaaaatggctgtaaggattaatacccttcgttatttgtttcccttgaaattaacatgatttcagtgtaaacgcattgacactgacactttttttttgttctaaaagtaatctcaatttgaaaggtgaaataaac

SEQ ID NO: 7693 - DNA, 6000 bp, Homo sapiens
aaggcctggcttgttaacataaatgtaaagaggcacaaaaacagcatgtacttatcacatactcctcgaacacatgggtgaaatgtcacttacataatctgacaggttgcagttgtgctgtatgatataaaaactggctttttaaaactggtagaaacctctaagtttttgaaaaagtctttccattttatattggagacaatgctcacagcatgagtaatgctcatcagttatcagtaatttagcagatggtgccagtgttgacatttgttctggcttaattgtgcatgagtgtgtgttttaaacaatgatgcagctgtccccattcctggcaattagaatataaaaatggtgttcactgaatctggcatagtgatcatttatccatgtgtttactcttttgtttgcaaggccttctgagtgtttgctgcaattctacaatcagaatataaatttggcttaaaatggaatctagctccatactgataggaacaaaagggacttcagacctccatgttttgagatcttaggtctccagcttcactagagatgcctgtgaggtgtttgtgtgtgtgttaaagatacctctgatatgaagatagtcagaattaaaatgccattaggattagaagagcagtgtcagcagagaccactggactattgctgatcatgtgcagaggatcaagtgaccaaaatctattctacatagagtcttgctgcaaagttctagctattcctaatgccagcatcaatctcattcactgccaattcatgcaggagacctaactgttgagtacctcctcaagggagagtgggtgcctttggagctgttgttgtccctcaactatcttggctcttgattgggtgggctttttgctattaggttagccagttagttttattgtggggacgaattccttattaggtcgtggcaaatctggataaaatacctattaaaaataattttccctttggaaaaactttggcagtaattgctaaagctgaacatatgtatactctctgacctagcaattttacttctagaaatagatacccagcagatatgcatgcatgttttcacccaaaaaaccatgcactggaaggctgatggcagcaactacccagatgtccatcagctgtagaatggataagttgtgccacagtcgtttgatggcatactatatagcaataagattgaacaaactataactgcacacagaagtattagtttcatattgcagtgaaacatattaccacaaacttagtggcttaaagcaacacacacttacaagctcacagatgtgtaggtcttacatctgggcacggcatagctgggttctcggctgagggtcccaacagctgaaatcaatgtgtaggcggctggagctcagaatcctctttgaagtgtattcaggttgttagcagaagtcggagtctgcttcatgattggaggactgaggtcctcatttccttgctggctgtcagccaggagccagtctcagctcctacaggctgtctgcatcctttgccttgtggacctcttctgtcttcgaaggcaacagcaaagaatttccctcatatcagccactctcgtgattcaaatctttttcaccaggaagagcccagtcccttgtaagggctccatatggccatgcccactgaggacaatttcctgatattaaagccaactgatttaggccaattacatctgcaaattcccttcacagcagcgcctagatcaatacctatgggaatgtgcatacaagaaggggtgaggaatcttgggggtcttcttgtaattctgcccaccacatgcaacagcatggataaatctcatagcaacgttaagcaaaagaaggcagacacaaaataatatataatgtataattgcatttatataaaacacaaaacaggaagcactgatctttggggttaggattcagaacagtggttactcttgagtacatagtaaccagataggaacatgaggggactcctgggggccgataattgatctgtgtactggttacatgggtgtgttcagcttgtgaaaacacagcgacctgaacatttatgatttgtgtacttttctgtaaatgcattatattgcaattaaaaagttcttaggataattttgattcatttcttgaaaatagatttgtttttccaagaaaacagcactcaaagacaggtatcagagtgagcacctgatggggtggagaataagcaggaatacaaaagaaacaacagtgccttgcctggagtgaagatgatagtacccctcaaactctacacttgagcaccaagtagagaaaaattagtgaaaaattagtactgtcatcttggagcctgtgtgtaggacctacctcataatttggcccagtgcaaagagaaatgcaaacccccttgttcaaaagtttgaagacagcaagagtggagcaatcagtcaaaatcaatggtggtggtggggacaaatgaacaagtcccactcccaagaagccagcctgcctgtgtgtgtgggagaaagaacctcatctcagaatcccaagacttgttgctaggtgagttactttgggcatctgttgctttagtcctttcagctgtaaaatgggttagccaggggctaggaggtgaaaattcattaatatatgcaagtgaagcacgtttttatgtgccagacagcaaacaaatacaggaattattataataatgggccctctaaatgttggagtttttctttaattggttaaaaagcctacctgtggccgggcgcggtggctcacgcctgtaatcccagcactttgggaggccgaggcgggtggatcatgaggtcaggagatcgagaccatcctggctaacaaggtgaaaccccgtctctactaaaaatacaaaaaattagccgggcgcggtggcgggcgcctgtagtcccagctactcgggaggctgaggcaggagaatggcgtgaacccgggaagcggagcttgcagtgagccgagattgcgccactgcagtccgcagtccggcctgggcgacagagcgagactccgtctcaaaaaaaaaaaaaaaaaaaaaaaaaaaaaaaaaaaaaaagcctacctgtgaccttgcagagaaatacagaaactcttcatggatagcacaggggccacttctgccttatgaattaacacaaatcccgaattcttggtggaacccttatcatgagattttactgtgcattatttgatctttccagttcaaagaagaaactactaaatgccaaggtcgagagtattggagtctgggcacttcccccatcaaagttcttgtgctgaggtttgagtttcggtcaggttcgctgttgaatccctggcctgactctagaacatcccggagtgcctgctggaacctgggaaggggcaccctagaatcttccaaccggcctcagtggcgagcgccgcgggcacacgactcccagcgcttggagcctctgcggtgttaggatgacaggactgtcgcctggccgggttggggggtggggacggtatttcaggctaagaatttctgagaggcacgacattcgcattgcgtttctgtgattattctccctggcttgcgttctgaagcacgaatctttccggatgtagtaactggcttcctaaagctttggggggactgtggtccccgaaggctgccggctgcctgacctaagatttacgagtggttccaaggatgagacaaggtcccagtgtctcggtgacaacagggtctttgacgaacggctgccgagttgcagctggggagggggaagaggactgtggcgggggcggggagcccctgaatttcttccttgtaggagttgggcgccggggcacgggcaggcagccccgcaggccatcagcatgcaggagcggcgcgccgtccttgaagggctgcccggctgaccttgctccgctttctccggagaaatcgctaggagagcgcgaggacgcggccacgatggtgactcagtgccctgcgcgccgcacgcaaatgctcccttccatcaagtccagctccgcaactgttgtttcctcttcctgccctcttttttttctttttttttctttttgagacggagtctcgctctgtcgcccaggctggagtgcagtggcgcgatcccggctcactgcaacctccgcctcccaggttcaagcgattcttctgcctcagtctcccaagtagctgggactacaggcgcgtgccaccacgcctggctaattttgttttttgtatttttagtagatacgggttttcgccatattggccaggctggtcttgaactcctgaccttgtgatccgcccgcctcggcctcccaaagtgctgggattacaggagtgagccaccgcgcccagcccctgccctctttttaattccaagattcaaacccggcgttttgcgctccgcccctccccctccccacggcccgcctatcattagccagactgcgcgggtgttttgtacgccccctccccccgtccctatcggcagaaccggaggccaaccttcgcgatcccttgctgcgggcccggagatcaaacgtggcccgcccccggcagggcacagcgcgctgggcaaccgcgatccggcgccggactggaggggtcgatgcgcggcgcgctggggcgcacaggggacggagcccgggtcttgctccccattggccgccacctcggcgggaggggccgcctccggctcgtggcacctggcgtctcccctccgcggggaaatcggcggctacccggcaccggcgcctggaggtaaaggtacccgggggtggggaaggcccctggccgcggcagagctccctgccaccggccctgtcctgcttgccgccccagcgcctgcgacgcttggatgcccccagctccggccgcgccaaccagaaactttgcccctcgaagtcccccgcctgcctgaccgcaccgtgaggcgccaagtcggccgcgcgccccccggggccccggaaccccgcgagtcattgcctggccgccccgtaccccgcgcccgcggcgcccggtagccaggatgcgctacgcggacccctcggccaaccgggatttgttggggagccgaactttgctcttcatcttcatctgcgcctttgccttggtgaccttgctgcaacagatcctgtatggcaggaactacattaagaggtaagaaagtccattgagagggcgggatgcgcggagccggccggcgagcccccgggtggcagtggccgcggcagcttcggtcgcagcgccccggggtgagtggccgtggggtccgctcctagccccgagcatggccgcttaggcttgggccaccgcgtttccaagagcatccttgcttgcttctgcccagcgctggctggagggtccagacaactttgttccgctgtgaaaaatgaaggacagaatagaattccaagcaaccaggctgacgataaatccatttaatacccggagagaccgcatggatcggagcggtgtcctccagacccacagttctatggccatttgtttggactccggggtcggagggctcaaaatcgtatcgattgtttgtttgtttgtttgtttgtttataacctcgcgagtcctgaactttcgtaaggacccttgggagaaaaagcattttcccctccaggagcttcgggttcggtgggggtggtagtgtgggctgtggctatgcgacagggatagtgatagtgaagtcttacaatcccacagccactggatctgtgaaactcaacaacctgattccttctgaaacagatggctttttttttctcatccttagcgcaaaaggtcagagctgcagcataagttaacccctcgttgggctctccccctactccaccccaatccacggttaaactccaagagaaagagcagtaggaggtgtcactcagaaattcaattcgggcacagcctcagcctctctatttgcagaagatacactgaaatgccagccacttccttctgccggctctg

SEQ ID NO: 7694 - DNA, 6000 bp, Homo sapiens
tcatgtaagctgataacttatttttagaaataatattttataaatatttttccaaggcattaaatgtttttatacttgatttttaacatatgcagagaatgcatatgttatttgctgaaaagcccaaatagttgaaagcagaatcttggcttctaggccaatgctcttcctttcatcaactcctcctcatcattctctcaccaatttatattcactccagaccagagataatcttctactttatatcatttcataaaatccataccctgcacaaccactattttaatttaccaaaacctgtgggccaaacttgccagaaacaaacaactgtggttaccagccggtctttcctagttgacctaacagagtaataaatgaatgatgtcttttacaatttctcaaacctaatttcccacaatattagtgaccattccaaagctgttactggctagacctccttcaaaaggttagtcaccctgctgtaccaggagtagtatgtcttataagagattatgtcttttaattgctgaatagttgcagacctgctgtaaataaagctaatccatttcatatgcatgtaaaagtctttgagaaagcaaagatgggaattggcttaaagagacatgaaagtgatctacatttttctaaagactatattggacactgactggtcccatttctaacaatgtccatatccctccatattagaggttctaacacagtgtcctgtacatcacatgaaataaagcctggaaagtgctttgaaaactgtgggggtgctatgccaatattagggatagtaattggtgggtgcccaatagctgttagttgcttcgtacatgcatttcagagtctctctatccttcactagaagcatttgcttcttcctaattgaaacatgtacttgtgcaaatgttctctaggactaggtcactgagaaaaagtagctagtgttctgtgtgctcctcagtactggatccactgcactgggtttggctgaatttcttaaagatgaggagggtcaattacactatattatagaaatactccatgtgtgcacagacatgcatatacccagaggaagaccctcattagtgggatgaaaaactcattagggaaaactcattagatttattagaggaacagaaaaaaaaagatcctggaagaaacatttaaaagcagggaggagaggactggggaggatgggagaactgcaggaggcagtgggtggaggggatggcaggtaaagggtacagaatttctctttgggctaatgaaaaggttctaaaattgatcaaggcaatggaagtatatctctgtgaatatcttgaaagccatggaattgtacattttaaatggtgagttgtaaggtatatgaataaagatattttaaaatgcaaaatgtgggagaggggcagagaaaagaaggcttaaataaatgtaaataatttaagtaaaattgtggcttgatatataaaataaatagtctaactgaaaatataaatcattatatgcaatattttgaagctattcaagatggaaatgatgggggtaaaagaactggttatcacacacagcaccatgagggcctgctttttcagcccccagacagagcctgtttctgctttggagtgtagcaatgacactttattactacccagccttgctctatcagtgtgactacaggagtagacttactgaacagaagagtaatacaggcatttctgtgttcagaatcttcacatattcatttacagcagacatttctctttgcagtttttcttgtgggttttataataatttgcaatatatatacaagttgaagaaaccaccttaactattgtctatacttcttcagttttttggtacaaaaataagcttctttcaataagactctcaaattttttaaagtgcagctattttttacatttttacatccagatttggtaaggtattgaaagaatattgtatttcagatacaattggtgggaatgtaagttggtacaacccttttgcagagcaaattgacaaaatctatcaaagagaaaaatgcgcatacctgtcgacccagcaatatcactcagcaatttatactctagaggatcaattacactatattatagaaatactccatgtgtgcacatacatgcacatacacagaggcagaaaaatacagtttattttctactacccacaggtaggatagtgagtttcatagcaaccctaataaaagcaagttggaacatttgtcagaattatttccttcaaactcctttttagaatccctggagagtcatttaaacagtgaaccactgacctaattaacacagttaatcaggataaataagaaagcaaaagctctaattcttgagacagaggtctaattcttaatcctaaacaaatctgagcaatgttgatcatacttttgaaagaatagcctaaaagacaggcttactcagggttttcattacatttctgcaaaatggcaggtacttcaactccaatcaaaagaatttccactttttttttattagaatcacagtttgcaaaagagtcgatgtctataatggggattggctgagtcctttagaactctgtctggtaatgaggctgcatcaaaaatggcttttcatggtcgggcactgtggctcactcctgtaatcccagcaatttgggaggccaaggtgggaggatcacttgagcccaggagtttgagagcagcctgggcaacatagggagactcccatctctaataaaaaaaaaaaaatggctttcctactatgtggactgtgaagcagcttttacttgtggtgaccaggtcttaaaataataatgtgatttttattttgtggtaagagtgataaaaattcagaattcagtaagagtaaagcaggaaaagagagttttaaaaacactattccaaatgtagtgttaaatatttaagatgagcttctgttactgaaaacacagaatgcagtcttacaaatttcttaattaaaggtataaagttggccagatctacatctttctgcccaggccattcaaattaacctagaaaattatcttctgaattaaaaaaaactaagaatgagccattccccgcaaaaaggatccatttaaactgtaagagatggtgtgcccctgaaatggacacaattacatgctcattaatttctgtgtacaaagaaaggaggcccagaagtgaacatctaatctaggtgtctcatttgcatgtttcaataatctggctgtttttgttttctttcatttcctttgtgggctattgtgccacaaatatacctccattatcaaattcaaaattgaatcctatgataccatagcctgaggaaaaggaagcattgaatatcattcccagttttagacccagaagatatttaggaaatgttactgtatatacaccacatgcaacattagtgcttttaatttcctttttacgggtgcaatggagattaatttgcatgagctcgtttcaatttcagtaataagatccaaattttgcattaagctttcaatctcaaaaacaaacagttaaaaagcatacatcacttctttcaaatgtctttactatacttctgttttacagtccctgcatctaatattcccctaaaaggttgaatatatatacctgtaggttctaatttgtttcttgtttgtttcctgactatctcctggctctgccaggaaacttcctaactttcaaatgctgtacaacccaaaaaaatgctagaaatatcaaaagaagtgtctacagatccagaaaagacatttattgaatttaatacaatgtcagaattggtcaactatgctcagaaacataggaccaagtgttccctaatttgagagggtaaataagtaacaacagaaataagagaaaaaaccatagatatttcaaatgatcctgttttaataattgtcactgaaaattaaagtccgatccagataccaaatctgtttcaacaataatagctagagacaagagtaaaaatttctttaaagttttaaaacaggtggaagaagatccagaaatatttattccaagatttgtaagcggggataaaacatggctacactggatagtcctgaagaaagagcacaaaacaaaggctaccaaaaggtggcagcactccagtcaaagacagagaggaccagtcaagagaagaggtcatggcaacagttttggggaatgctcaaaagatatgactaaaagactttttgaagggccaaaccaagatcaaatatgcttactaacagagtttttgagaaaactagccaaagcatgagcagaaaaaccattaccagagagttctacctaatcatgaaaaagttcttgctgtagcatttcactgaacaaagggcagtttggcaagagtttcaaaaggagatcatgaggcgtccaccttgcagtcatgatgtggaacctgctgacttctatttatttcctcgtattaaaaattctgcaaacggcacccagttttcttcagttaataatggaaaaaagatttcttggaaatagttaaattcccagaaacatcagggcttgagggacaaggcggggtcaagacagtgctcgaactactgtctcgaaattgatggagcagatgttaagaaataaaatctaccggttttatttttgtcttttaatccctgttttgacaaatttgggaagtcccctcacacaacatcagtcctaggcaaagagttgttatcctgtattggttcttctttctatgattttgtcttgctgtgttattttctgttttactcccaagaagattcagtctgtgttttttggaattcacagatgtggaacctgcgaacatggaaggtcaacggtaaaactcagtggggtgtgtcgaggctgaaattaacctaatcaacctctggggcacagcagtccacctggcgtggaccgtcccgattgtctgcattgtgctgacggcatgagtacgtatgggggcggggcagcccaagagctaagagggtcagggctagagccgtgagtgtcagcctgggatgggctacataaggcccagctctggcaccagagcttcattctttgttgcacagcaaactgcagaggtcactccaggctgtggctccacatcccgaggaacaaaagcgggcctgctcagctgtctgcaaggacggccgttccagaccaagtggcctgctgctccgaggacccagctcgctccaggctgtgactccacatcccgaggtcgctgcctggcgaccgggcagcgaggaccggccaccccagacttcctgtcccgcagccccaaagacagagctgcgaccgccgggacagcgacgcctgcacagctctggtgagatggcggcagggtccactacgctgcacgcagtggagaagctgcaggtgcgtctggccactaagacggagccgaaaaagctagagaaatatttgcagaaactctccgccttgcccatgacggcagacatcctggcggagactggaatcagaaagacggtgaagcgcctgcggaagcaccagcacgtgggcgactttgccagagacttagcggcccggtggaagaagctggtgctcgtggaccgaaacacccggcctggcccacaggaccctgaggagagcgcttcccgacagcgcttcggggaggctcttcaggaccaggaaaaggcctggggcttcccagaaaacgcgacggcccccaggagcccatctcacagccctgagcacagacggacagcacgcagaacacctccggggcaacagagacctcacccgaggtctcacagtcgcgagcccagagctgagagaaagtgccccagaatagccccagctgattccggccgctatcgggcctctccaacgcgcacagctcccctccggatgcccgagggccctgagcccgctgcgcccgggaagcaacccggaagaggccacactcacgcggctcagggcgggcctctgctgtgtccaggctgccagggccaacccca

SEQ ID NO: 7695 - DNA, 6000 bp, Homo sapiens
tagagtgcatctaagctctcctgcatgcaggagggactggagaacgaactgtgtagcttcttaccttatcaggcaggcaatacccaggaatgctggagtcactgcttttggagcattcaaactctctgcagcactttctgagtcttgctgctaacagctggccttgcaaggaattcattaccatagcaccacaggaggccttagaggacgccggttcaggagcttgctcagtcatttgtgcagctcactggctgtgcatctctgtcggaatcctctcatgtccctagaactcaaatcactaacattccctacgctgttgtaactttattttactacctgttcagccagcctctgcttgaacacatgcagtgattgggatctcatttctcttccacatagaccatttcactactagtaagcttaatttcactgaaccacctatggtgaagtgattcctgagtcattaaataactttctactgcaccctttctcatagggttatttggagacttaaataagataacagtgccttgctcacagaaaacagcctgtaatgtgaattgacaattattgctgctgatattgttttcagaaagttcttatatggagctgaaatctgcattctgtaacttcgaaaacttggtcttaatttggctcattggcataacagaaaataagtctaatcatgcccccctgaggatggttctacttatcacaagtctcctcttagtctagttcttcatactcagttccttcagcccttccacatgggacgtaatttccagatctctcaccatcctgactgcccttccctggacaggttctgtttgaccttcatccctccttggaggagtggccaggtgctggcaactaagacatgcgagctgtccaccatctggattatgcagatgaactaacattgaaaatgacacgctacatgcattacttaatttcgttctcacagcaccttcatgaggagaaaactgaggctcagagatgttaagtagctttccccaaatcgtttagctcagaaattgtggaaccagaattcaacccagatctgtctgactccaaagtctgctcttctttcttggggaagtggaagcctgagtgctgttcttggaacagcctcaagacaataatctggggactgtcttggtcctgcttgcagagggtccttctgttacgtatgggtcctttctggccctttagcttctacaaagaaagtcagtccccctccagctctaaagacacatgaagtctgtttgcagtccagaccttgcaaacttgtagttatagaaacctcagaggcctaccagggcttgaaggatatttggctccactttacatctccattcttcttttcctcctgtttttaatgtaacctgtaatcctagcaatttgggaggctgaggcaggtggatcacctgaggtcaggagttcaagatcagcctggccaacatggtgaaactccgtctctactaaaaatataaaaattagctgggctaatttttaattagtgtggtggcccgcgcctttattcccagctactcaggaggctgaggcaggagaattgcttgaacctggaaggcggagattgcagtgagctgagattgtgccattgcactccagccttggcaacaagagtgaaactccgtctcaaaaaaaaaaagtattctgtccaccacgtggaataatgtaatatttagtaataagaacagctgcaaggtgtagagagttaccgtatatccatcacccagctttccttaacgttaacattttatataaccacagcatcattttgtcaaaactagataatcagcattggtacaatactgttaactaaactctaaacttcatttaggtttcatcaggctttccactattgcctttttcaattccaggatgcagtccaggatatcctattggatttagtggaaggatttcatacattttctattgctgttcctgcactaactagacactgaagttgtcaagtcagccaaagttatcataatactttttttttttttttttttttgagatgcagtctcactctgtcacccaggctggagtgcagtggggcgatcttagctcactgcaccctctgcctcccaggttcaagcaattctcctgcctcagcctcctgagtagctgggactgcaggcctgcaccaccacaactggctaattttttttttttttttttttggatttttagtagagacggggtttcaccatgttggccaggctgatcttgaactccggaactcaggtgatccgcccacctcggcctcccaaagtgctgggatttacaggcttgagctaccacgcccggccatcatacttctgcaggcagttttgaaagttggtgtccaaggataataatttgcacattacatgtacaaaaaaggtgcataaggactgctactctaactcaacacttcctacgtagtaaaaaatattcctaatcttatcttccgatttatgatatttgcctagcaacattataacatttgcctaggaacacaggcaagactgtttatttcaagtcatccaaaaatgaccaaagggagacgatgtaaaatttcactaataggatccccttgaaataaaatattttgcttcttaggtctataaagccagttttgaggagatgctcacaactgttgctgagtcagtctggggaaagtagactgtgtgccaggcaatattaaaaaatattttgagttaggttttcatgcctgagtctctttttttattttttatttttttgagacagagtctggctctgtcacccaggctggagtacaggggtatgatctcggctcgtggcaacctccaccgtctgggttcaagtgattctcctgcatcagcctcctgagtagttggggctacaggcgcatgcctggctaattttgtatttttcgtagagacggggtttcgccatgatgggcaggctggtctcaaactgctgacctcaggtgatctgcctgcttcggcctcccaaagtgttgggatcacaggcatgagtcaccacgcccagccctgagtctctttttgctgtaattttaaaataaaattgtacatgtacttcatattccttgcagaaaaattagaaaacatagggaaaaactaattttaaccacacaggatctcattacccaaagttgcaatattgttaatattatttgtcttttttccaacagcacatatacataggtattataaatattatagtaaacatatattacatatgttatattaatatatcatttaatatattaatataaatattatattaagtggcaaaaccacaattagttttgcaccaacctaatataattcacttatgaaaatttgatactatatatgtttccactcagtgtatcatgaaaatgttttcaaataaatatgcatccatagcattctttacaatgactgcatagtagtgtctatggctttttagttaggtagtttggggtttttttttttttttgagacagtgtctcgttctgttgcccagggtagagtgcaatggtgagattatggctccctgaagcctcaacctcccgggctcaagcgattttcccacatcagcctcccgagtagccgggaccgagggtgtgccaaccactcccagctaatttttgtattttttgttgagacagtgtatcgctatgttgctcaggctggtccttccgaactcctgggctcaagtgatcctcccaccttagcctcccaaagtattgggattacaggcataagccacagggcccagtctactttgggttttaatatgttttcctgtcataattctgcaagctcagtgaatttactggcagtctatgctagaaaagaatacctaatatttgtatagtactttacagagtacactggcacatattgactatataatgggaataacggtgctatctgttccatagggtcattttgcgaaataatagtgcatggcaaatagaaaataatccataatgtgaattgttattactacagtcatgtcaacatttcctgtaatggcagaatcatcatcatgcatatattttaggtgaggaaactggctgagagaggtgaagtaattgctcaaagacgtcagtgtggaaacctcagctcatttgacttcaaattccatagttttggcactatctcatattgctactctttcccgtgggacctgtcctttccgacaactttgcaggcagggctagccctgccagctgcctccatcaaaaattattttgctatttctcaattctccagaatcccacacaatattgcttgactttgggatggttattcagctgcaattaacagaggccttaataaggttaagccgccagaacgagcggtgtagcatgagcgaggactctagcacctggcaggtgaggttgactctagcacccggcaggtgaggtttttgcgcttctctctctctctctttttttttttttgagaagagtcgagctctgtcgcaaggctggagtgcagtggcccgatctcgactcactgcaatctccgcctctcgggttcaaacgattctcctgcctcagacagctactttttgactcactgcaatctccgcctctcgggttcaaacgattatcctgtctcaaacagctactttttgtatttttagtggagacggggtttcaccatgctggccaggatggtctcgatctcctgacctcgtgatccgtccacctcggcctcctaaagtgctgggattacaggcgtgagccaccgcgcacggctgtttttgcgcttctcgatttcgccacgtggctttgcggtagcccaggaggtactaggagggcggaggcacgaataacacccaaaggactacagtttccagaagcccgcgcgcgccgcgtgccacgtgaccacctggctggcgcgcgcgcctgggggtctggtccctagccgcgttctcggtcgcttccctcttctctcgccgcctcctggcctccgcaccgacgcggcccgggctggagccgagccggggccgagctgcaggccggaccggagccggatctgtacccgctgagacgtggaaacatggaggcctgagccggtgtgcgccacctgggctgcggcggcgacagcgacttctcctgacccctctgccaccctcccatccgtccgcgggtccgtggagctggagcagatcccccagccggctgagacaggtgggctgtagcgccgcccccctcagcgcggccgggcccgaaagcctggctgtccccggcctcctgtcagagggggtcaggggccaccctccgcaacccggccagcgccccggggcggcggcgaagggaccctcccttccctgcccgcgggcgcctgggccacccggaggggctgtgctgacagcggacggacctctgtccgagtccgctgttgggagttgggggataccgaaggccaagtcggtgcttccggagatggggcggtgttggtctgacaaatgggcgtgtgatgggcagggtgagcaatagctgttgggtttttctttcttctttttacattcatagtttatcgaggtataactaacatatcagaaaattaaccctttaaaagtacaactcagtggtttttagtatattcacagggttgagcagccatcaccacccttaactccagagcatttttaatcaccgccccccccgccccaaagaagctcgtacccattagcagtcactcctccttctctcccctacactattgatctactttcagtcgccgtggatttgcctgagcaattgtgttttgactgaaaagtgaaagggtgggtgtttgtgaactgggggcagtagtggggtttgagggtattggtgtggtaaagctgattggataaagctgttctctactgaacaggggtagagaagtgatgggatgattgtaatcggccagcaaagcgggtacccaggatagactgattagggggcacagatggagtgagttccttgaaagaggagagggg

SEQ ID NO: 7696 - DNA, 6000 bp, Homo sapiens
ctgggcccctgtctctcaccatacacaaaagtcaactcaagatggattaaagacttaaatgggaccacacctataatcctagcactttgggagcccaagcctggaggatcacttgacccaggaattcaagaccagtttggacaatgcagtgagatcccatcgctacaaaaaaaaaaaaaaaaaaataggcatggtggcatgcactggtagtcccagttacttgggatgctgaggtaggaagattccttgagcccaagagttcaatgctgcaatgagctatgattgtcctactacactctagcctgagtgacagagtgaaacccttctctcaaaaaaaaaaaaaaaaaaaaaaaactagtaaaactttatactagaagaaaacatagggaaaatgttttaggacattggtctaggcaaagattttatggctaagacctcaaaagcacaggcaacaacaacaacaaaaatagacaaataggactatattaaactaaaaagcttctactcagcaagggaagcaatcaacagtgtttcctgctgaataggagaaaatatttgcaaaccattcatctaactaaggactagtatccagaaatatacaaggaactcaaacaactcaaaaacaaataatccctgcagccataaaaaagaatgagatcgtggtctttccatggacatggatgaagctggaagccatctttctcagcaaactaacacaggaacagaaaactaaacaccacatgttctcactcataagcaggagctgaacaatgagaacacatgaacacagggaggggaacatcacacactggggcctgttgggggtgggggtggggggggcaaggaatgggagagtattaggacaaatacctaatgcatgcagggcttaaaacctagatgacaggttgatgggtgcagcaaaccaccatggcacatgtatacctatgtaacaaacctgcatgttctgcacatgtatcctagaacttaaagtaaaataaaataaagtaaaataaagacttagtagggaaatttagatttaacatggtgatgccaatttagtggaaaagatgacttttaaaaaatttggctccatttaataaaaaataattttaaaatagtataaaccatgaaagtatacgtactgccaggaaagtataaatataaccagggaattataagtataaccaatgaaagtataagtactgccagtgttaccaggggtccttgctcccagagctcccaagatggtggtgggccacttccaaaatggcggcaggccacttccaagatggtggcaagcctcgtgttctctgacctggggttcttggcctcacggattccaaggaatggaatcttgggccgtgcggtgagtgttatagctctattagaagtcgtgggtcacggaagagaaccgtggaacccagtgactagtgttcagcttgattaggacgaaaccaggcacttagccatgcaggaacaatggcaagcctttagcgcgatcaggagtggcaacgggtgcttccctggatcaggagcacagcgggcgccctgctggattggagggatggaagtcagcggcgggtctgcgacggcagcaaaacagcagtggtggacggcgagcgaaagctcagttctagcggtaaccagaagggtgcagctgcaagatttaatagagtgaaatagagtgaaaacagagctcccatacaaggaggggacccaaagggggttgcccttgctggctccaatgcctgggtttatatcccgatccttgtccctcatcaggcaatagatgagttcatcaggcaatagatgattggctatttctttacctcctgtttttgcctaattagcatttagtgagctctctgattggtcaggtgtgagctcagttgcaagcctcctgtttaaaggtggatgcagtcaccttcccagctagacttagggattcatagtcggcctaggaaatccagctagccctgtctctcaccaggaatgcttgtgcttgctactgaaaagctaaggccagaggtaaagactatggatttggggaatgaatattctgtgaagccataagataatggcctgaggtgctgaggaccagtagtgctaggaactttgcatccatgactatagggctctttagaactgtgccacagtacagcatcatgcagtagaatctaagttgttctttgtaataatgaatgccagcaatattttaaaataataataataccattaaaaagtgggcaaaggacatgaatagacatttttcaaaaggaaacatacaaatcgccaagaagtatatgaaaaattaacagttaatgttcattgaatacttattgcaggctaggtactgagttgagcattttgcatgcatcatctcacttaaaataatgtatgtcccagcctggccaacatggtgaaaccccatctctactaaaaatacaaaaattagccagacatggtggtacatgcctgtaatcccagctactcaggaggctgaggcaggagaattgcttgaatctgggaggcagaggttgcagtgagccgagattgcaccactgcactctagcctgggtgacagagcgatactctgtctcaaaagataataataataaaataatgtatgtcaattgttgaaattttggaaaatgaacaagtgtgtgtgtgaataactgggtgtattctatacatatggctttataacttacctattaacttaaggtcattaatgcaatgtcatcaaatactctttggatcatctagattgttgcacattatcctataatatgagatgccacaatttatttacacagtcgacaattgtaacccagcttgcttttggcttttactgttttacataatacttggtaaaaatcctcatataaatatttgaaaatttcctaagtgtccatttgtgaatgtaaaaattattttagagatctaagatttggtgcaaaacttgcaatcagctacatagttctacttgaggcaattttcactcaaaatatatcataaaccatagtacaaaaatagagcatagacctctccttgtgaagcagttgtttttgccttacattttttttttttttttttttttttgagatggagtctcgctctgtcgcccgggctggagtgcagtggcgcaatctcagctcactgcaagctccgcctcccgggttcacgccattctcctgcctcagcctcccgagcagctgggactacaggtgcccgctaccacgtctggctaattttttatatttttagtagaaacggggtttcactgtgttagccaggatggtctcgatctcctgacctcgtgatccgcccacctcggcctcccaaagtgctgggattacaggtgtgagccaccgtgcgtggctgccttaaatttttaataatcattgtgcaaattatttagcactccagtgttttgatttttctcctctgctgggtaggaataacaataatactgttattcaccatggtggtgtgggaagtttcaaagagcacatgtctataaagtgcttagtgcaaggcttggcatgcagttaacacaaaataaatgcgagctgctgtcattaacaatactgactacacggcactgtgatgcttatgtaaatgccaggctgtgtgtctgtaacctgaggtatttgtgtaaatattttcctaaaataaatctaactaaggttgttcttctcacttgtatggggtcatcttatgcggtagatgctcaaacacaaattccagatacagagtgggcagtggtagttaggaagatagaaaggctagggagtgttcctgggaagtcagtaaacttggaagatctaaggttatattaaaaatgttgtatcagaacaaaggctcaggacgttagtgttagcagaaaccagatatcttagagcagtggtttgtcaactttgccagcaatccacagtaagaaattcaactccggccgggcgcgggcctgtaatcccagcactttgggaagccgaggcgggtggatgacttgaggtcaggagttcgagaccatcctggctaacacagtgaaaccccgtctctactaaaaatacaaaaattagccgggcgtggtggtgtgtgcctgtaatcccagctacttgggaggttgaggcaggagaatcacttgaacacaggaggcggaggtgacagtgagccgagatcgtgccattgcactccagcctgggtgacagagggagactctatctcaaaaaaagaaaaaaaagaaattcaactccactaacacccacaatgcaaataaatgtgtgaatgtgtacaactattttatcaagcagtacttattatatgtgctgtaatctgatattttatagcctgtttcattttattttaatgttgattgttacccactaaatttatttcattgagaccccctaatttgaaatattgccttgaatatatatatacatatatatacacatatatacatatatatacacacatatatacacatatatacacacatatatacacatatatatacatatatacacatatatacatatatacacatatatacatatatacatatatatacacatatatacatatatacacatatatacatatatacacatatatacatatatacacatatatacatatatacatatatatacatatatacacatatatacatatacacatatatatacatatatacatatatatatacacatacatatatatatatacccttgtttaaaaataaaaggtttgcagctccatattttttaaaaaaatcttacccaagcatttaatcagtactgaatggttttgttcttgtcttcatgtcaagttgaatttgggggtactattccagaatatttacatgttagacaatgttctgtaaaaggggcattgtagcagcatgcaggcagtattcaaccaaaaactgggcaagagtcataattcactctggtttctctttccttttaagcaggtagttccaatttgccagcagaatgagtacagaaagagactcagaaacgacatttgacgaggattctcagcctaatgacgaagtggttccctacagtgatgatgaaacagaagatgaacttgatgaccaggggtctgctgttgaaccagaacaaaaccgagtcaacagggaagcagaggagaaccgggagccattcagaaaaggtaaccacatgaagtcccggtgactaggtcgcttataaatcctcatgtgggtcatggccacacgtgccaaagatgatcggtctattttgcgtggtctaggagagaatcttctctgatctcttcttaggatgcgactgacagaatggtggatgggcttggacaagtacccattgtccttagtaagaagggctgggagagcatatctgacaagttctgcagagaaaatacattaaggtctttgttagtgtgtgtatatatatatatatatatatatatatatatatatatatatatatatatatatatatatatatatattttgaggcagggtctcactgtgtctccccagctggagtccagtggtgtgaactcggctcactgcagccttgacctcctggactcaagtgatcctcctacctcagcctcctgagtagctggactacaggcatgcaccagtatgtccaactaatttttgtatttgtgtgtgtgtttgtgtgtgtagatggtatttcactatgttgcccaggctcgtctcaaactcctgagctcaagggatctgcccacctcaacctctcaaactcctggaattacaggcatgagctacgatgcgtagccagtgtatatattcttaaaatggagttatgcgggcaagaatctgcatgttactgcacccagaaatttttaaaggatacatatcaatcagtcttagatgttaactattagtattgttaaattggcggtatgagttatataaataaccatccttgtgtatgtgtgtgtgtgtgtgtgtgtatatatatatatatatatatatatata

SEQ ID NO: 7697 - DNA, 6000 bp, Homo sapiens
cttaccttatagaaagataactactttatgttatggaatgaaatatgtatatgccatacatttatatcttctgatcctatttttaaaaatcagagcgtatatatttgtaaatgcacagaatagaaattctctggaaggttgggtatcacactactaatcattggttgactccaagaagtgggattggagttggggagggggagagaattgtttttactttatacagttctccactattttaatttttatattagcatattttgcatttgtgattgtaatatattttaaattttattggtaaaaattataaacaggaccctaattaaactcattactgaaaagaatttaaactcttcactttgtaactctgccttgcagttatgcactatacttgaagagaaaataatgactccataaagtcatgagaagagatgagtggagtgactgttctacatagtggttcagtacacctctgtgttcgtcttccttagaaacctcatatattgtatccctgttggttgaaaactgattatttgatctatggcataaccttgaaccgaaaagtctttgttcttatcatataattatatccttctaacttggatcactactgcattttgtaatcctaatagataatctataaggcacgatcatgttcttgattaactgtgcaggacacactgttggttatatttggatctttcatttctgccttcctccttctgaactgatccccagttgagttcatacgttcactccccatcacacacacataacccttgtgactcaggggaagctaactccatccccagttcccagggtagatcaggatttgtctaactagtgattctcagagtgtggtccccagataagcagcattagtatcacctggagcttgttagcaatacaaattattagaccctattctcaacctactaaaactagaaatgtgggtctcagaaatttgtgttttaaccaactccagaagtgattctgaatgatattagagtttgagaaccactgttctcaatcaaggctggtaatcttgtactctttaccagcaactgattcagtgcttggtcttcccctggctacggttaatgttccaaagatggacatgtaacctagattgacctaatcagaatgaaaggcagaaattttatccaaggatgaaagagattttctgtctctcccattgaacctaaagaagatctgacatcttagaaccttgagagaagctaacctgaggacaaagtcaatgtgaggtagaaccagaacttctcaaagatagagagaacctagtcgtaactgcctgggcccagtcctaatctaatttacagttcagtgagataacagatttctttattgtttaagccactttgaattggggctttttttgcccttgcagcctaaagcattcaacttattaaaacacatataataattttctaactgttcaaagttaaatctgaattccccaagcaagttgtattcctactgccttgcctctagtatagcggttttaacacttaattgtctgatgttgtgaataagaacaaacacatgtgaatgaatgatcatgcactgaaggagcaggcagacaatatcgttttcattactcttatcaaatacaatttattcaaagtcattaggaggctccaaaaatagttaatccactaatgcaaacaatgaattggcatggtaaccttagttttaacactatttttgctgtaactaagtgaaattctttccagctagcttaagcaaaacggaggtctattttaagactactggagtggctcacagaccatggattttaccccaactccagccaacaattatgtgtgccattgatgaggggagtgtatctgggtcaaagaaaattgaaattgatcaccaattatgaaaaaacaacccattaatccacagggctccctgtgagtaggaagaccagaaagaaaagatatctcccaatctgctttttggcttcttattcactccagagcaaaacaccattctgtgctatgtgctagaagacatccatgggttttataaatgggacaggcctgtcaatcttctggcatttgggatactttttgctagcacagaagaggctggcaatgagtcatggatattgccagaagatagttataaggaatcaggcagcaaaccaagccctggtactgccactccatctctccagctctgtgcagggcccaatggtgtgttgagggaccctcataatttttattcccctcccaattcaaaaatctgagcttaatttttggaaattgcctcaggcactagagggtagtaggaaatccctcctcattgtgttgtacaaaatttgcaatacggtattgccctgaaggtaaaacatcacttaattgtaaggaatttcccctacatggattacttcaaaaacacagattttaaaattcactggcccagagttcctggggcctggagtaaaagcattctgatccttgaaacttcagtttgccaggcccagtttctcaatttcgctatttgtaaaatggtcttatctaactcaaaccgaaaagctctcagttctgaaggaaaaatgctataaaatttaaagtttaacaacttagacaaaacaacaagcaagattcccagacatgacacacaaaaaacccttacgggggaaaatagtaaattgagctatattaaaattataagtatctattcactaaaagacaacattaagagagtgaaaagtcatcccacgaagtgggtgcaaatattcgctatatgtatatatccaagcagagacaggtattcagaataaagagtttctacaagctaacaaaaaaagtcagacagctgaagccctcacatactgctgatggcagtgtaaattagcacaaccactctgaaaatttggcaggatctactatgacccagcaactctactcctagttacatacccagtagaaatttttttttattatactttaagttctagggtacatgtgcacaacgtgcaggtttgttacatatgtatacatgtgccatgttggtgtgctgcacccattaactctagaaatgtgtgttttttaaaaaaaaaatctggatgctggttgcatgggaggtattcattttgggaaaaattcattgagttacattcttaaggctggcataattttctctatataatatgcttcaataaaacagttttttttttaagaaacagcttcacagaacataaagatttacatttatggttcagcaaaattacaaatatttacttgtattatgcttgaaattcaggtccctcatgagttcaaatcatgcgtaatgaattgaaaatacttaatatacataatgtttaacataaaacggttcttaagattgaaggcttcaatgatagaatggctggaattgaaacctacctctgccacttactgtgtgacattgggcaaattatttaatctatgcttctgtttcctcatctgtaaatggaaatattaatggcatctaccttagagggctgctgtcagcattcaataagttaacatatgttgaaggcttagtgcagttacacacagaaagcactcagtaagtgtttgccatttttataacattaatgtttgtttaacaaatatttatggaatcttcactctgtgcaaggcatagagctggttgccagagcaatgagagaaccaaagaaaataaaatgattaaatcctatgggttgaaaaccatggagagtccagggcaatgacgcacatacaccatacagtggataaatgtttgttactgctgctgctgagatagcagtaagtatggtactttcatttaaattacatctcgagactagcaggcggaaagccttaaatccatattcaacttgaaggttttatttgagcactagaaagagatttaacagtaatggcccatgaatccgaagatgggattcaacttccaaaactgggaagttaatgaaaaataagtttaagtaatgcgggtattgagtccctagggctagtgtggcgttcatgtagcccacacgaacagagctaataaaaagccatgtgtaaaaacaatataaatcatactgctgtttcttggacttgaaaaactcatcatgacacatttttgaaaaaacaaaactttggattaccatgaatattttgacgatattttttcctaagcaagggaaagaggagtcccctttaaaatatagaacgtattcattgagtggaagaccgatcctatatcaaatgtccaggttctacagacgcctgggtccatagcacattatccctctcaccaaaaccaaaccaaaccaaagtcagtttcatttgaatgcactcttgccatggtttcaaaatttggaaagctcttggaattaaattttgagatgtaaaggctggctgacaaattcacagaaaccctctttccgacaccaacttataaatcctaaggcatcctacaaccccgtgggtgctggtttctagtttgcaacgctctaacatagcttggtagagctcagtgggctgggaccataagcattcgggattgtgccactgaaaaactgatgtcacatcaaaaggaacacctttcttctaatatactaaaaaggttttgtacaggctgggtccagaggtcttagggctagccaattcctgctcccaggtattctaagaagccggagaaagctccctgcaggtaaggacccatcggcgcttcccgcactctgccgcgcgggaagcgaaggttggagtcctttccccacccccggagggtgggcggggccgaaggaccgcaccgccccagacccgccccctgcgcgtggccccgcccacagctgctcctggccgtgcggccgcgcggaaagcggaggccgggggcggggctcaccccttgcccttgggggtcccccgggctctgccaatcagcgagcgccctgttggccatccgcagccatccgcgcccctccctctcccgccctcctccgcgttccagaatccaagatggcgggatccaggcaaaggggtctccgggccagagttcggccgctgttctgcgccttgctgctgtcactcggtcgcttcgtccggggcgacggcgtgggaggagaccccgcggtcgcgttgccacatcgccgtttcgagtacaaatacagcttcaaggggccgcacctggtgcagagcgacgggaccgtgcccttctgggcccacgcggggagtaagccggagcagagggctgggggccgggttcctctcccccttctgctgcctcttcgcctttcatccgcggctaccctggtgtgctgaggttcccgttccagcagctgcacaccatatgcgctgtggaggggaccctcctggcagcccctccgccgggtccctcctggttcgcacggttccctccgcttgtccccgagtctttccctcacccattctgttctctctcacccgcctgctgtcttcccttctttgatctcgtcggtactttccgttggatctagaggtgtttggttacctcctacacttcctagcactcaaacttgcttctaggtatcatgtttcacaacgccacgtctctaggagaaatgtgccctacccccagccatcccaacctgagacatgttctagaagcccccttacttcctttcccgcttccaccccccacccccgatccccgatttctttgctccggtgttagcaatggttaatgcttcgcttgaaccccatgcccactgacggctcctgagatggcatatagtagtattagagtaattttttaagtctttgtatgtcagaagacattcttatactgttggaactacacattttcctctcagtgacttggtgtggtctttgatcttttctctcgtagtaacacattatgtaactttttaggagaagggatatatttttagggattgattgtttctgaacctgagactaagaatagcattacatttttagccctttaaaaaaattggaagcattgaaataatcttgggtt

SEQ ID NO: 7698 - DNA, 6000 bp, Homo sapiens; identical to SEQ ID NO: 2006

SEQ ID NO: 7699 - DNA, 6000 bp, Homo sapiens
ttgttcaacaaaccttagctatttaagaacacaccctctttgtacttgtaggtggtaaggcagggggagtaggttgtaaatggaataaaatgaagtcttagcccttggggattttatcatcgagaaaagtagaacactgtgctagtaagatcaacaatttttgagcatctgctctgcaccaggcactgtgttaggcacttggcatgtgtgatttaagggcaattcaaggtccaaagtgtgatgagagctcagagagatttcagaagtttcctgaagaagtgacattggaactgacacttgaggaatagtatgattttaacaggttgaattggtgaaagcaatggaaggagccaggatttttttttttttctcgagatggagttctcctcttgttgcccaggctggagttcaatggcatgatctcaggtcattgcaacctccccctcccttgttcaagccattctcctgcctcagcctcccgaatagctgggattaccggcccccgccaccatgcccggctaatttttgtatttttagtagagacagggtttcaccatgttggccagactggtctcaaactcctgacctcaggcgatccacccaccttgggctcccaaagtgccgagattacaggtgtgagccacaccaggccagaagcaagaatctattcttcaaagcccaagaggcaaggaacgggggctgcactgcaggaactgggaatatcccttttggctctgcatcccttgttttctaaaatgaaacacttgcaggaacctcccatttgatcttactgcctcctctctctttctggtgtatcctaaaaggactgtcagatccaccttcatgaaaccaacatctgaccaaatcacaactctaccaagaaggaagacaggaagacagaaaagcaggaggtagtgacagaatgaagagggaagctttcaacattatcttacagaataatgtccaaactccttattccaagcctctaactggcagtgccagttggtgtatttttagcttcatctcctgccactccaaccccacagtgcctctgcttcctacattccagggatccctcagagcaggtactttattcttccgcgcctttatttctgcttttccttctgcctgaaatggcctgcactccgtcaaaatcagattaagattttaaacttcagtttaagtgaactttccctaagacatccctaaccactcattcaaaattaagccttctctctcctgtggtcccacaggacttcctgcctctatcctagcacttgtcaccctggagtcagaagacctgggtcaaactccagctctgccatataaaagctgaatgaattgggggggatttctactgatacctctgaggctgtttccctttttcttcttcttcttctttttttttttttttttttttttgagatggagtcttgctctgttgccaggctggagtgcagtggcacgatcttggctcactgcaacctctgcctcctgagttgaagtgattctcatgcctcagcctcccgagtagttgggattattggcatgtgccaccacacccagctagtttttgtatttttagtagagatggcatttcaccatattggccaggatggtctcaatctcctgacctcatgatctgccagtctcggccttccaaaatgctggaattacaggtgtgagccaccgcgcctggcctgtttcctcttttgtaaaaatgggatacttaagatttaccttgtcgtatacaataagataatgtatgcaaaactcttacacatgtaacatatttacattttaaatatgtaaacggttaaaagtttctactccactaaaatgtaaggtcccagggaataggaattttaaaatgaaaaattttccttttaaaataatacttacaggctgggtgtggtggttcccgcctgtaatcccagcacatcgggtggctgaggcaggcagatcacttgaggacaggagttcgagaccagcctggacaaaatggcaaaaccccatctctacaaaaacacaaaaaatttgccaagcatggtggcacacgcctgtcatcctagctactcgggaggctgaggcaggagaattgttatgggaggtggaggatgcagtgagccgagattgtgccactgctctccagcctgggtgacagagcgagactttgtctcaaaaaaaataaaaataaatacacaaataaaaattaaaaataaactcttacagaatagttgcaaaggtatacagagaattcccatatattcttcacccaatttcccctactgttaacatcttaaataaccatggtacatttatcaacaataagaaattaacattgataaaatactattagctaaactgcagactttattctcattcttacaacagtttttcaactcatggcccttttctgtttcaggatccaatccagaatcccatactgcatttagttgtcatcttcttagtctctacaatctgtgacagttcctcagtctttccttgtcttttatgatcttgacatttttgaggagcactggttattttgtagaagtagaaaaaccctccatatgaatttttctgatgttttctcatgattagattgaggttacaggtttgggaagcataccacagagctaatgtgcccttctccacatcaggggttccatcataacaacatggcttattactggtgataaaagaggggttttttgtttgtttgtttgtttttaccgattctcactctgttgcccaggctgaagtgcggtggtgtgatcttggctcactgcaatctctgcctcctgggttctagtgattctcctgcttcaccctcccaagtagctggagttacatgcaggcaccatcacgcctggctaatttttgtttgtttgttttgagacagagtttcgctctgtagcccaggctggagtgctgtggtgcgatctcagctcaccacaacctctgcctcctaggtcccggttcaagaaattctcctgcctcagcctcccgagtagctgggattacaggaacgcaccaccatgcccagctaatttttgtatttttagtagagacagggtttcaccatgttggccaggcgggtcttgaactgctgacctcaggtgatcgcccgccttggcctcccaaagtgctgggattacaggcgtgactcaccacacccggcctaatttttgtatttttagtagagatggagtttcaccatgttggccaggctggtctcgaactcctgacctcaagtgatccacccacctcggcctcccaaagtgctgggattacaggcgtgagtcaccacgcccggcccatctttgcttaaattataaactcagtttctcccacagttagttcagcctatgctcaggaatgtacaaggacagcttggaggttaaaagtaagatggagttggttaagttagatctctttcactgtctcagtcatcattttgcgaaggcaaattcacaagtgggaagaaaggacgggtagatgcagggcagagagagggctctgtgcttcgagcctggatgatacagatttggcaatactattctaaggagagaccagagaaagaagtttagggtagaaggtaattaattagagtatgttgaatttgtcttgcagaaaaaccctgtgaaggaaacctctgggaggctgttgtaaatgctgggctggggatggggtgggtctagagatccagatttgaagcaatttctagtctattgatagctgaagctcaagaagagagttagatgagcagaggtgaagagagaagaggacatcagactcttgagtaaattcagcttaagctcagggaggagtaagaaagggagacagtgaaggaagcagataaggaatattgggaagctggacaaacaagaactgggtagttgacaataccaatgaagagggaagaggagaggactttaattctttcggagatgccagatgagaaaaaattaagaaatgagtgagaaaaaaatgatggagtgattaaacatctatgttgctttcctttgagaatgttaactatgaaaagaagaaaagggtggtggtggctgcaaaccataggaaggctgagaaagggttttactttggttctgcctctaatccctgacgcattcaacctcctcaagccatttgcttgtaaacataactggcataaataatatctgatatgcccattttacaggacaagtgcttccctctcagaccacatactcgaggacagcggccgtccacgccttatttacattcatcttcccaacacaacagtcatttggaagatgccgagtggcgtgggaagaacaagcgggaacgagcgccgacccgcccgcggcctgactgctagcgcaccgctgtgcggccgcctcaccgcgcactccctcctgaattattcaccaccgagacgaggacggtgatcgcccccattccacagaggacacggagtgaaggcgcagtcacaggcccaaagcccccagtcggcgggtcttggaaatggacgactttttcactcaaaagctacgaggcaacaaagcatgtggatgaggagggaagggagccggggccaataattcatctcaaagtaaaagacgtccccgggggtggggaacaaacaaacaacaaaacccggctctgtgcttccgcgcttgcgctctcctaggtctgccaggctgccgcccgcgcctaggccagagtctcagtgcgcctgcgccgagcccgacttccgccagggctcgattggcttccaggctacttctcccggcccagggagggcctgcgctgtggctagagaagggagtctggtgactgggtgcgcgtgctgatgacgaaatcggaagtgcccggagcagaggcgggaccagaacctagagggcctcgggattgcggaagtttggtggggagggtcggagctctggtggagagagtgttgtctaaaacaagttccggaagggaggctgcccttcgcggtccgagaaccaccggcctccccagtttgagggctgttaccccgtgcgcgcttcgacgttgctgctgttggctctcctcgcccctcgttcccttgggaaccgcctgggaactccgccatgtcatccacttcgcccaacctccaggtatcattgctcatctcccgtccccctagggagctgggatcgaggggaggcgcgagaagcgggtggggggcggggagaagggaggaagcggccgcgcctgtggtcgaggcgcaggagggcgggtccggggacctgcagcaggtgggagaggggcccgttttccaacggaaaggtcgtttctggcccgctcttggggtctcccgagctactggctttgtgagactcttcacttttgttgacacttcccgcttccaaaccagccaagatctgggcaggtttctccaatcagggttaacggagaaagaaagaacgtaatttttgcaaagccctattctggaccagttgaagatagggtggtcatagttcggtcttagtttctcaagctgacagcagaccccttcattctgagctgtcaggtgagtagagatatgggaacagaccaagaatctgagattacagccagcctgcatgcaatctccgtgaagtcattgaatttatgtgcacactcctgtggctcccagatggtagtgtgtaagatcgaggagtattcttaaacctctgtgtggctccacttcccctcctctaccgcaatgagcacagtgttttgtacacaaatcatggaatcttaagattttaggcttaatcgttagtcctctgtggaatggaattcgttcagaaaagaaatttcttaatgtaatggtgtctcccatccccagaatggatctagggcttcagtggcgtttagaatgtaatgtggcttaatgtagaggactcccagtccagtaagtcaataaggcacaaaagagtagcctaaaatacttgtattgagtccccgtcgtggacttccggtagtttgttgaacaagcagttattg

SEQ ID NO: 7700 - DNA, 6000 bp, Homo sapiens
atagcagttattatttagtagtaataaaaatacaggagttgttatctgtcaagaacaatgcaaagtaactcccttacattattacaataaccctgtgatttctcgtctcaataaaaatttaattaaataaaaatttactttatgtaatacattgggctagggattataatgatagaaacacaagacgctggtcaaccatgtgtagtcaaataagtggttggtcagagtcttgtctttgtatcattatgacttgtagaacaatacattgcataaacataataggtgatgatagactatagatagatacatagatagattagagagatgatagatgacagataacttcacatcttttataatattacaattctaaatgatgccagagagaatgtttataatgctgatgtgcatgatctataaatttaagaagtaaccaaaattttataaaaacatggaaactcttccagaaattaaatgttcatattaatattgtcctggtgaaagaaaaagtaaaagttaatctaccgtttcaaagaggttggtgcctaggtgagatgtttctaataaattctggtaatataaacagaaaacaaggctgacatacctctacacgtttatgtctgaatttaagtattttgggttgtttgtttgcatattgacaattactaaattattcttgtaatgagccttttttgttatttatacatttattcattgttaattactataatggatttcttccgtcatggagattatgttgcggcttggcaaatatacatacatatatatatttcttaaatatactgctccagagaaaagtcttcttacaaaagaaaataaaaacaaaacaactttgggaggccgaggcgggcagatcacgaggtcaggagatcgagaccatcctggctaacacggtgaaaccccgcctctactaaaaatacaaaaaattagccgggcatggtggcaggtgcctgtactcccagctattagggaggctgaggcaggagaatggcttgaacccaagaggcggagcttgcagtgagccgagatcgccccactgcactccagccagggtgaccgagcaagactccgtctcaaaaaacaaacaaacaaataaataaatgaattaattaattaattaaatataaaaagaaaaagaaaaaagaatgaatacaaaaataagaaaataaggacatatatatgacaataaaattttttattatattagacaagtggctactgtaactagaatttaaaagataaatcttcaaaccatacaaattgttgccatattcaagacaatatttctttactctgagcaaaatttgtgtaattttgatacaaagtattttagcatggttagaagtatatagattagtgaatattttgtttattgtttgttctatcattgtgcatttttttatttccccatatttatcattgtgatatatattcaatgttaaaaacagaatggaaaacacagcaaattggactgttggaaaagaatgccatttaatggcaatccatggagaaaattattatttttattttcagcattttaaaagctattttacatgaatatctgaagtgaacactggacgtctagttggttatcaactagattcaaccactccactctaatttggggaaatgaatctgtttttctatcaactaactctttctctcaggttcaggaatgacaattactttaagcttttcttgttgccattctttgttcatgcatggacaagtgatcattttgatgaataagacgaaagtgacagtgtttttgagggccttgaggaaaagttggagaaccaaacagagcccaagaacctagataactgattgcagtaggaagccactggatcaactaacccttaaccctactttatttctctatgtatacattgaatttcttcattattctattcatttttggatttgattttgtttgattttgctatctgcttgctagtcaatagatttctcattgatatagtgatagcatacagtaaatatctgttttaaatgttcttgtattaacatattataagcttttcccaaaacaacttaaatatatttttaagaactaaaatgcttccagaccatgtgagaaggatgtggtccttagattatgctatcctgacaacacctgattggacaaggcctaaatttctaattgaaggcacatgtatagcctatgatataaagtaggtagacttaaactttctggttaaatgtctattttcaagggacagatcagagcttgcataatgtttgactttccatttctgcctgttcagttaaattcaaacttcattagccagtcttgtctgcggttagtcattagatatatatttcttaattatctggtttaaaaaattggtggctctgaattataatacttgaattcaaatttttatttagagtaactcaatacaatcctggcttctgcaacttcaagctctgttccttagcctgctggcaggtgataactgtgaaattcccccagactgcatgtgaaaatagaccagaatgtcactgtgcagctataaaacatcacttgtgtttcgggaattgtccatcctgccacatgtttactgctgtggggacctcagataactctgagtatgataactctgacttacatatggatagtagtgtatttaattttgagcttctgttcttacacagtcatgttccatttactatgtattacccccccatatatgaaaaattagtcagatatatttctcttgttataaagaaaatgacgtagaagtaatcattaagctgggccgggtacggtggctcaagcctgtaatcccagcactttgggaggccaaggcgggcggatcacgagtcaggagatcgagaccatcctggctaacatggtgaaaccccgtctctactaaaaatacaaaaaaattagcagggcgtggtggcgggcgcctgtagtcccagctactcgggaggctgaggcaggagaatggcgtgaacccgggaggtggagcttgcagtgagccgagattgcgccactgcactccagcctgggcgacagagagagattccatctcaaaaaaaaaaaaaaaaaaaaagaagtaatcactaagcttatctgatgaccagtcccctaagtacttccaagtcttcattcttggttgtggcatagcggatgaatcttgctggatccttggctatcggctgttcatcttatatcctcttccagaaagggcatgcatttcttaagcaatttacagcaactagttcctgtacgtgtttgataatagattatctatttaataaaatcagtttgctgttaatgatattctacataaaacatgtagtttcacactgtaccttctttagaaaatttaatcctgtctcactgtggtttctatagttgccattgctctttattggtactgtaataatcagggcagcaaattgtgacccacctttgctcccttaggctctaaaataagcctttgggacatcatgtttacaggtacactgaggctctaaactgtggtttcaatcctaagtgcaactggatattttataaacatcaagatataaattggcatctcataaaatgttagattcttacagaaatcctagactaggtcatagacagaacagtgaattatgtaaataaatattttaaacaggtatctccaccttttttgatactgtaaaaaatatgaagggggaaatgtataagaatacttcagaggttctttgtaaaatttattttttccctatttactaacatcttgaaacacttagaagtgtttttttctagctgaatgcttttttctacctgaaaaaataaaatatttccacattatactgttcctgctatccacagatctattctcccaggttcatctcttcaagatttgttcataaattattgattcctcctaatattcacaacctcataggatgtgcatttgtgcgtgtgtgtgcatatgtatgtgtgtgcacatgtatgtgtatgcatgtgtgcacatgtgcatgtgtgtatatgtgtgtgcttgagtgtcctactttactgcccatatagcttttgccatttctttcctcaaaagctaagaggatagtgaccaaaatatctatcagaattaacaggatgcttgaataatcctgccccacatagactttcttattatataggtataatttaagaaacttttaatattttaatgtttctctagtttggttcaaaaatggtttttaagtaaataacagcttgagtaaacagcatagaaaatacatatgtattttatgttaaataataatagcttatatcaaaatctaattataaccatgaataaaataaaagattttacataataataaaccaaggaaaagaaaaggacttattaaagtttagacatttctctctcattatgtctttacttgatttctgaggagaaatgaccgaattaagaaacagccatgaggcatagacacacagtggaaaatcatttctcttttcagtaagttttgggtctgctttaaattgatcatttgtttcatcagctaatccccaaacagagggcacgtccgctctacttgcaaaattcttgtatgtaagttgaattctccctttatcaactcaggccaataagtactttattttgtttttgcttgttgttaggggaaaaaaaaaaaaaacaaagataatcagctcatactacttgcgtagctgtctgcattttaattccagactatgaacgagcgtcagagtgcccttatgatattttgcacaaaaggctcagtgtttatgactctactcagagaacccaaaatagcattgagtaagcagtgacatactgacagtgttgtggtactaaaagcacaagcgtctgtaactctgggcaatggggcacatcgagagtttgctgagaagactgtgaagcaaaaagaagaaagtttttcctactcttccttatgtgtccaacacgaagtttgctgttcagttttcacagaacttctagaagttgaagttacaaaggtaagactgtgataatcaggcatattataaactacatgcatcatctttaatgagtcaataggtcaaaaagtacatgacaaaatgttgctaggaaaatattctaaaaatattaaggaaaatatttacataggaaataaggaaaatattctaaaaattttaaaaccatgatgtgtacttgtactgaactttctcaaaacacgtatttgtgagaacagttctccatctctgtaatacagattgttggtgttggggggaagttacacctatgttaggatatttaaaacttctcaagtttcttagaataaatgaatcaacctttctttgcatgtctttctttgcacttttttctttgttcagggttttattttttatttatcatgtatttaccatgtatatcaggtaatatgaacaatagagttgtcatcattaagtatatgagaaaaaatatatacagaataaatatgaaaaattttaagtatattataattccaaaaaaattaaaatattagcattgctatgaataaaaacacatatatgcctaaaattgtacaggcatattaatttacctatatgtattataacatttatacataacacaaaaggtaatttctcaaatatgaaagtataaattaagaaaagtataaattaggaaaatgcatactgtaaaagacattttatattgtttcaattctaatttggtacatgcaattttaattgaataactaattataataaaatatttcaaaataagtttaccaaagggatttaataaatctattaaatataaaaacataaaatatttagcaacaaaaaatacctaaatagagtggcaaaggttttctttagattatgtcaatttatattttagctctattaattcatttgttgaattaatatatctgtaagaaagacattatttagataaaatatttgaaaatttagtaatatatatttatgttttagatgtagttaca

SEQ ID NO: 7701 - DNA, 6000 bp, Homo sapiens
aaacttttttcccaagttaaaccaaggcttgcatttctggaccaaaaaaataataataatttggtcatgattattatctttttcagtgaactgctagatttggtttgatattttattgggaacttttccatttttgttcacaagtgaaatgggcctgtttgttttccattctcacatgactcctctggtttgggtaccaagtttatactagcctctgaagaaattggtgagtgttccctattttttgattgtctggacgtgtttgtaacaacagtgtggttaatgttatgtttcaacttgactgggctaagagatgcccacatagctagtaaaacattatttctaggcgtgtctatgaggatgtttttgggaaaagttagcatttgaatgagtatctgagtaatgtagatggcctccccaatttgttgggggtggggggaggtgggggcatcatccaattcattgaaagcctgaagagaacaaaaagatggagggcaggtaaattcactgtctgtgtttgagctgagacatccatcttttccttgcccttggatatcactactcctggttcttgggctttgggactcacaccatgacttacatcactaacttgtggttttcaggcctttggacccctcattatcaggttttcagagggactgaattaaacacttggagtggctttctggttctccagcttgcagatggaagattaagacttcttggtcttcatagctgcataagccaattcacataataaagcttcctttggttttctttctctggagaatcctgatacagattaatttttgttttcataaagattggtagcacatattttaaaatcaatagggtctcatttttaatggtataattttaagcttctgattcaattcctttatttgctaattattaagtcgttttagtttttgaacaagttttgctttgtttttcaaataacaatgactttaagttttcttatgtattttcataaagttgttctgtatctctttaagttttgctgcctatatttatgctcttcttctggttctagtatttttaacgtaattagtatactgaataaataaagattataatcaatatacaacagatttttcttccatcattctttaaagcatattttacacaaagtgatttaaaaagaaatggtattttctgaaattattttccctcaacaccactaaatgagacatgcaggacagaaacaacagcatcacctgggaactcttgagaaatgtaaattgatgggccccactgggtcagattctctagggactgatcagaatctgcattaaaccaagctctccaggcaactgatgcttaaaatttgagaagcactgttaaaactataatatctatccattaaaaaacataaatgtatgtagctttatttattcttatttttaagcttttattagggcccaaacacagaaaagtacagaaacccgaaaggtacagctcaacacattttcgcaatgtgaacgtatcattgtaagcagcacccagatcaagaaacctgatgtttacctgtatcccaacttttaacacgattaatttgcctgcttttgagcttacgtaaataaaatcatgtagtacctttctttagtttctggcttcttctgttcaacatttggtttaggatttgcacgtagttctccatacaaaagttcattcattctcgttgctatatagcactttactataggattacagcacaatttatcttctattctactctattatactattagacattcgagttgtttagcttttcacaattacaaactgtcctgctatagacaagacattcttgtatatgacttttggtgaggacatgtgtcttagcctgttggtgctctataacaaaaaaatacagacttggtaatttataaataataaaaatttatttcttaaagttctggaggctgcacataaaggagtcagcaggtgtggtatctgataagggtttgctctctgcttccaggatggtaccttcttgttgtgttttcacatggcttaaggttgaaggagaaaagggactaagatgatcccttcaatctcttttataaggtctctaatcacattcatgaggattccacctcatgactaaatcatgcccaaatggccccacctcttaatgttatcataccggcaattaagtttcaacatatgaaatttgggttacacatttagactacagcaatatgtatgcaaaatatacaaggtatatatatacacaaatgtagcttatctgaaagtcttttaaaaaatgttgtcaaaatagtagaatcttttaaatctcaaaaaaaattatcaccacttgaggtagataagcagaaaaaaacacttaaatttttcaccacagaatatgttccagcatatgtaaatttagcatgttctctgaacaaaaaagcctaaaaagtttattggtttattaaatcattttcagattaatgcattattttgatcattttctcattgcctagatcagtgatgtgcaacggaaatgtaatgcaaaccaagtatataattataaattttctagtagctacactgaaaaataaaaacaggtgagattaattttaataatttaattaactcaatacacctaagctataatcatcacaacatattatcagtaaaaaatattgagacattttacagttttatactttctccccaatccagtgatccagtgtatattttacatttatagtacatctcattacaacgtctctaatttcatcagaaatacttaattggtatttattttatagagacatggtcttgctctgttgccaggctggaatgcagtggcaggatcacacctcgctgcaacctcaacttccctggcccaacttatcctcccacctcagcctctggagtagctgggaccacaggtgtgtgccaccacatctggctaattttttttttttttttttgaaacagagtcttgctctgtcgcccaggctggagtgcagtggcgcgatttcaactcactgcaagctcggcctcttgggttcatgcattctcctgcctcagcctcccaagtagctgggaccacaggtgtctgccaccacgcccagctaattctctgtattcttagtagagacggggtttcactgtgttagccaggatggtctcgatctcttgacctcgtgatccacctgcctcggcctcccaaagtgctgggattacaggtgtaagccaccgcgccaggccacatctggctaattttttaattttttgtacagatggggtctcactgtgttgaccaggctggtctcagacgcctcacctcaagcaatcctcctgcctcagcctcccaaagtgctgggataataggcatgagccacccatgcctgggacttgatcagtatttagatttcataaaatttacagttgaaaaagtagattcacatacctcagttgttccaaccacattaaaaaaactttccaatagctgaatcgagtgtcagtttttgagtttactgaaattaaaaaaaataaatattcagttatttcatcacactaggcacatttcaaaagctcaatagccacatgtggttagtggctacactactgaaaagcacagatctaggtcaactggcttttgttgttgtccacatgtgaacttaaactgtaacgcaaatataagaggaaattatttcactttgcatgctgtggaagacagaaaactttgaaatacatgagaatgaaaaaaaaaaattgaatatgggtcattcagagaccttgccaagaaagtagaaaagcttctgtataagagtatcgaggcgatggtactattataaagctgttccaccaccaccgggagaacattcccatcatttcaacagtccccttacgttttagtctacttttttcttaaaaaaaaaagaaaaaaaggaaaagagaaagaaaaagaaaaattgaatctgtagagggcttgcgctggataccatgctgcatgcacaaagggggtgacatttagggcttgctctcaattagagtgcaatttaatcttctagtcactaggaataacgacgttttatgacatttttgcctgttggaattttgaacctaaggtgaaccggctgacatcatatcccccttctgttgttgtcacaggttttcaaaatttggtttgatctaaattctctggtaccttatgtcccataaaaatttcatctagttcgtaagtagtgattgctgcagtaaccgtcttataaaagtatatggtttttacaaatcattgtcgtatagaagaaaaaacaggtagcaatataaatatttcatactactttatctagttccaaaataatcagaaaagagccatcaaaaaatatcctacgcttaacttcatgttctcaagtttcaagagaaagtttttaaagaggcaatccttactttggcaaaaatgcattaaagcttgctgcatttaagagatgtcccattatgcaaacaggttgaaagaatattacaaatacgttttggaaaaatacggagtgtcgcgcagctcagcaatccgcagtcttaatgcgcgcctctttccaggaatttgatccagcatcaaaacccacaggtgcactcaccacacgggagtaacaagtaaatgatgtgccagtattcaacctgcaagtgcgtcgtcagagcctacctcaccctcagcataactttcaccggtattcaccttcccggaaacgcgccccagtgaaccagcaccgttttccctagtaaagcccttaagcagggttcccacgctcctgggcgtggaggggggcaccgagagcgcaaaggattcttaagacatgactgcgcaggcgctgtcgcatgcgccgcactcccctcgcatgcgccgcactcccgcgcatagccggagacggagactggccgggtagccccgcccccgtagttagcgcggtgcttctcttccgctccgggtcggctccgtttccctttccgggcgggcaggcggcggaccccagtgtctttatccctcttttgcacagtcagcttctgcagctctcccgggctagcatggcagcgtggaagagttggacggccctgcggctctgcgccacaggtaatgggggctcagcggtcgggacgctggcgggcgcgtgggacctggccccgccgtggggccgggattggacccgggtctggggcgaggcctgcggggttcgtggagatgcccacccattcccggcagcgtcctgccgcccccgccgcgccaccctgcctggccctgacggagcggacaccttggggtccttccgccgccgctgtgccggaccaatgctggacgtgggaagggcgcgctgccttgtgtttgtgtttttctcattgtggcagaagtttcaataaagcttactcctttgatgggcaagaaggatgccgccgtcccagcttaacgaccaaatcttgccttggctttaggttccgagtcttgtcacgtttaaggatttttaccaccagtactcaagagagggtggtcgaggacagatcagggtcaggccgccgggattgtgcggtgtgaaaaggacctgagtgtgtgtcagcggttctcagctgcctcccgtcagcatggagtgccctcattctcactggggtccgctcacttaacaaccttttagagcccactctgtgtcaggcactgccgtgtaataagtattagagttgcagctcgactttcttcctacgtatctatttgaggggaaatattttgaatggcatttggagtttttacggaagaggtaattgctactaaagcaaaagaaataaagaagaatgctgtctatttgtattccaaaaagataggatggttaaaaagagacgtaagatgagagtgaaaatatggaggaaaaaggaactgtgtgtattagatttattggcttacctagaacttggccggtcacgatatggttgcatacagactaaatatttattaaatggatgaactacctttgcttttgcatc

SEQ ID NO: 7702 - DNA, 6000 bp, Homo sapiens
gaatgcagaggagaaaggcatgagctttgtcagggaactgggactgggggaaagagatagtgggtatctgcaagtccctgtttgtccatatagctgtactgctggctgctgcttcctggtgtcatttagaaaaattcccaaagaagaacttagcacttacccgggcctgatgcttgaggtctggagtccttaaggtgtgtgtgtaagtacttatttccttgaaaccttgagaccctcaagagagggggactaaaaacagtggaggaagaaaagaacagtggccaagggagtcgtgggtgaagtttgctgggcccttggcaatgctaaaaccaggtaagaaccagggtgtggatttctgctccagggagcacctttcacagcagttcatccattgcttactttcatggggatatgtgtgttgtaaaaggtcttcaatgattgattgtgcaaacatataacatttccacaatatactaggtgaagacctttttgcagagtgccgtcaataagtgcctcatgaatagccattcatagcctgacctgcttaataatgtaaaagagtataaaattccaggtaactaaaaaaatatttttgatgcattctcaaaattgggtcttgccatagaggagcataggacatacctccatttattcaagacttcttttatttcctttgataaattagcaaatttctttgtttaaatcctacaaattcttgaggtacattcatatatattcacacaggcacacaattatacctacatatacatacacgtgtaaattttgctgttcttttggataggatatacaataaagctactgagtcttataaaattattttgctaggcagcttattaaattcttttctgttttatttgaccatgttctctaggtggatcacctacaaatcctacattttaaataattttcaaggtttacagctcctattcctttttaaaatccattacatttagttaaaacctccagaatatgttaaatattgacagtgattgtggccatccttgtcttatttcaaaattgaattgagatttttctagtgtctcactatcaaggttgctgttagtttctcataaattttctttatcatgctgatgaaattgtaaaattgctgtaagtctttcccaggaaaggatatttaaaattatcaagtatctggccaggcacagtggctcatgcctgtaattccagcactttgggaggccgaggcaggcggatcacttgaggtcaggaattcaagacgagcctggccaagaaggcaaaaccctgtttctactaaaattacaaaaattagccatgcgtgttggtgcatgcctgtaatcccagctacttgggaggctgaggcaggagaatcacttgaacccaggtagtggaggttgcagtgagccaagatcgtgtcactgtgctccagcctgggcaatagagcaagcctccatctcaacaacaacaacgaaaattgtcaagtatctttttggcatttactggttgtgttcatcataattgccttttgttgctggaggaaactgagatgtttgttctgcagtagctcctgctttctatgttcagttcgttgcttccttgtggtctcgtagtgtcctttaactcagtcttttattgcctgtattctttttattttctttttcttttcttttcttttttttttttttaagatggagtctcgctctgtcacccaggttggagtgcagtggcacaatcttggctcactacaaccactgcctcccaggttcaagtggttctcgtgcctcagcctcccaagtagctgggattacagacgtgcaccaccacaactggctaatttttgtatttttagtagagacggggtttcaccatattggctaggctggtctcgaacttcatgtgatccgcctgccttggcctcccaaagtgctgggattacaggtgtgaaccaccgtgcccagccattgcctgcattttctatgcactgctggttacttctagaggcttggctgcattcaggctcagctactcggggaagaggacttcctaggtggcgctgctttcttcctgctgcatcgtgttgggagtccctctcatgcctggctgtgccatatttagcaagattacggctgatctgagggctcaggtatcgtcagtcagcagcacgtttcatcatagggttccccattaaccttccacctcatggttttagcatctattaacaattgtctccatctattattttaataggggttgcaaaatggtgacttaaaaaataactatgattgttttttccacttagtagctgaattttcctataaagagaaactcgggtcaccttgaattataatttgtacaggaaaggcagagcaaatgcttgattctttctttccttaccctttgttagaacagcaagttagtgccttggtgaccttagaaaaaaagaggaaggaggtagctgatgcgatgctgcaactagggatgtgatgacttttgctgtttcctgcttctgtcagcaactggtaaggttgaagagtgtctttgctttaagttgttcaaaaagccttttgcaagggtcatgaaaaaatgttggagagagggctcttgttgatctctgagtggtaatcttcattctatctcactgctttccctctttacgtccatttgttctgctggttagaacatttaggacatctgttctctggagggatagggcaatttaatttgtctcaggttatttttattgtttgttttgtaatttattatcgatcatgtgatatttcaacatttcccctgtttgctgagtaaaattctgtagttaccatgttgggggaacaatgttgcatccttggggccaagatactgggatgcctgtgtttctttggaaatgattcaaagctaagtcttgggttctttgtatttattaccatatttcgagagcctccaagaggaagctaaataaaccagagaggataaacctctacagagaaacaacaaaaggtatctccattgtgcctcccttaaaaatagcaatagctaaataataaaaataaaaaacaaaatagcaatagctttattatgggtgataaggagaaggatgtgtgtgtgtgtgtgtgtgtgtgtgtgtgtgtgtgtgtgtttgcctgtgaacactgaattagggagtgaccatgaaaaactaatttgggaaaaccccccagcctgtatcaatctgcattttgtgagtcagggagtaagcaaaagatactttcaagctaggtccctgtaggtatgagcagcagctactgtcacgatagataggatttgcattcaccctattgtgaaccacgtgggtagacggtgactgtttcagccgatgtgtgaggttcacttcagggcccactgaataattttgaggaagagttttgactcaaaagaaaacttgtctttgggtgtgtcctgcaaaaatcagtgggtgttttgggtcaagactgtttttgtctttttccttgagaaaatcgaaaattgaggcaaaaaagcagccccaacgatggcagattggaaacaagatggaattgggattgtgatcacaatatggaaaccttacagatggaagtcattgcatggcttcgtcctattctacaagtgctgactgagcacctggcatggtcaagggccctgtgcaaggatctgatagagcagggataagagactttacctgggcctggaagtgcctgtcaggctctagtaaaaaatgcagcgagtgaataggcataataggatgtggcaagtatttcagtgaggacatatttggggttctcaggaaactcacaggacagatgtgggccccagggagagtataagatacattggagctgagacctgctggatgggagagggataagaggtgaggaaactccacgtgcaaaggccctgccccattagagcattgtcctcaaattacacaatgtaagttggatgagcaataaaggctaggagtgagcagaagacttataagacataacactgggaaaatggcagtcatcaatgacgcaggccttgcaagtcagtaagacatttggatattctcttggggacagtgaggcattgaagggagtgacgagagtcaggcaggtgtttgagaaggctactctggctacctctggcccacaataagtcttagtaaacacttgtgtcttgagaggcagtattgcactttcttctcccttgctttcgtatatgcggtggtccagcagaagagaccagtcctgtacctgcgatgcataattaaatgtgcagggtagggcagccccatgagtgccttctcacctgtcaaacgtccttccttcctagtctttctatgaattttacacactaaagcctcagccacaatccttcatggtggtttaaccagcagggaacctccataacctaataaatcaaaggaatcaataaaactaacgttgccatggcctggtgcagcaaaaaacctagtgtttctaagagacaaaagctgctaaacatgcagggttcgttctcaggaaacaccgacttgtgtactttttctgtcggagaatgggagacaaagaaaaaaaaaagagtatctagaaagtaagaccgaaacatacttagatatgggcagagataaggaagcctcttgacttaaaaagagggctgaatctaatgtgctttgattggcaggaaaaaacacgaggaagaaaaggcaaagaaacaaactgatttcggcggggagtgtagtttctatttagagctagaacaaaggagaagtgcgtcctttcaaattatagattctttgggggaaaagagggacagaactttatctgagtttggaatgagtctgagtagctgcaatagtaaagttgcttccagaagcaggtaaacttgacttcaaaaaaccccgcttcatgaaatattagtgattcacttcagttgctatctgaggaagttctggtagagagaagagctcaagagcatgggcagagtcagctcctgagtgggctgaacgctcccctcagctcctgcagtgctaattaagggagggagcagcggggagcttgcagtgaccaagagggtgttgaggctaggaggccacgataaacaggatacgataaaagtccttaaccaagacgcagatgggaagaagcgttagagcgagcagcactcacatctcaaggttagtaaccttctcagaaaaaagactggatgtgtctgagctcaactttttaaatgaatcgtgtgcgaaagggtgggggctgccagtgaaaccatggcaagttgatgcagcaggacaagagagttgccggaaaaagctggagtaagttaagtgctcggtgttctgtgaactgttagtttaatgaggggtgcagtttgtagtaaaagggtgccagttaagtactttttctcagtctgtctctagaattgtatttataatagatctgatcgtaaagttcttgagaataagaaaactgagctaattttaccggcatctggtctgtcaagcttaaatcttccttctctccagcaagactgaacaaggatgaacttaaataataaatgtccatgatccaaagatttattatcctactcaagggttgggaaactttttctgtaaagggccagatagttaatatttacagctttgtgggccgtgtggtgtctgtcagttgtgacctaacacctcttggttccagcattgcagcacaaaaacagcggtggatggtatgtaaccaagtgagcatggctgtctccaaccaaactgtttatggaaatcagtgggctgcgcccagccctcaggccatagtttcagaaccctgtcttagaggatccctgctgaaccccaactggagtctttgcgttgactggaagtggggttctactggtcactcagcagtagcctcactcctggggacatgtgtatgacttgccaaggttctaagggtatcgtggtctagaggagaccatgtggcccacattggaaaggttctcttaatgagattatttgag

SEQ ID NO: 7703 - DNA, 6000 bp, Homo sapiens
ttatactataaaggtggcttctgtacagagcctttacacttttaatcttggggtgtatcttcgtaaatgttcctgaagtttatgttgatttatagaggatgagcttataattagtcgagtgatcataaaaataattggtattatttttataagccactgcgaagtaaatatcaatcaaaatgaaaattttttttctgaagttttgatatggattgaaggatcatgtatctgaaagtgctaactggcaaaggaagtgctatgaaagttctttcccacaagaggcaaacattcttgtgctgcctaagaatacaatatatttgtacttctaacaaaactatattttatttttccctagtggtgatcataaaatatcctgtttggtttaaatgtaagatttcagagattttgacaggtcttctatttcgtggagactttctactgcgttaggatactcctatagattttttgaagagagcttcttcaatattgcttaaaaccagcttcatgttagactatttcagagaattttcaaaaaacattcctatatttaccagcaaattacttgtttttgagaaactagtattatgacatatattgttaaatgcaaaaacctttacacttcacaaccatgtaaataaattatgtaaaaatcagaaaatattattgtaatatggatgtgtcattagcactattacatttgagttattttttgtagcatcacctcttttactgatagacaacttttaagatgatgccagtactggagattaattaacaaaggagccctggtagaactgtagctttattttttcctatagagaagtacatgtatgtagacaaatactatgtgcatttgaattagaagggcttgtaccctacgccaattctttttaggattttggaagtccatatgatctttcattgttaggaagctgcaagctgagaaataaaaccaacttactaatgacaccttcattgggttcaagtggctttaattctgcaccatcttctatagtagtcactatttcaatgctaaccttggggaactgcgacaaagcaccatcttccaggatggcacactcaactcacaaaagctatcagtttatatgctcttcctttcaaaataacgacatcatcttgtaatttgaccatatgtttgcgcaaccttttctgggagaaactgaacttttcccatatgttgttttttctcagaaagaaaaatcttatgggtccctattagggaggtagcattactcagcaagtgtggattctggaactcaaaaatgagaaggcagcttgccaagtaaacaggatgtagtggatggtgaaaagcgtgtatgggtgtgtatgaagaaaaatgaatggaattgtcaataacaatgctacacttgcagcctggaaagagtaggagagtgcagcgcgggcctcagcatctgtgttggcccagtctcttggttgattatcagagcacctgagctagccaggcctctgtcctgtcctaggtccagaacgtgcacactcactccctcagcactgaggtttcagcaaaatttaatgcctcagccccacgcattgcccgagaaagcactgggcattaaagatcagcgggaggccacaggatcacttttggccaggagtctgagaacagcatgggtaacatggctagaccccctctctaaaaaatataaaaaataaaagaattagccaggcatgatggcctgtgcctgtagtcccagttactccagaggctgaggtgggaagctcagttgagcccaggaagttggggctgcagcaagctgtgatccagtcactgcgctccagcctttaattcattaaaaaaagaaaaaaaatggagaccactgtttatgcaagatatttgatttcaaatacaggcgtggacaaaaggttaggaccctttcaccttccttatgagttccttcctaatttcctgtgtcccataaaaggactacttgtttagcaacgtagccccttccttggcaggttacaaaatcccagtgtcctgggaaactgttctgggcaaagaggacagaagagggcaggtgaatgagagcatttatggtaaaaccaagttttctctgccttcaaactgtgattgagaaatgcagtaactttctacaaataattttaaatgttgccactttctttgtagaactgtgtcatcttcacgaataacgcatattttggatgtaaagaaagtgccatccaaccataagaaagattccaacattcaactgtcaactcttgcgactggtccttttgcaagacctccaccctctcctctatagatgacccggatccccaaaagcgttttccaagcattctgtcatctgcatatccctctgttgagcagcctcactgatctttgaactcttttgcttccttaaggctggagaatttcttcctcaactccacgacgaacattgcccaccacctcccaccccgcgctggcacgagcacctcacgtgggtcacaggactcccgcgggaccttctgcgtgtttccccttgatctttttacaagtaggtgcgtgggcggatactcaccaatctcccttcatccgctcacctctctccctttgctcaagcttgcagctcctctcacaggcctccagctctgctggacttggcgtattcagaggcgcgcagcctctctgtcctcttccctctcccccatttcttctgtcctccgccttctcgtctccctactctcttctgtcccctcattctctctcctgcctctcttttctctccccgctcctcttttccctttcttctctctctcctttctctctctcttaccctgtccatgtcttcccccttctctcagctttctctctttaggtctccatctcgctctactcccgggttgacccatgacccaactttcattacacggatgcacaacacgcgcgcgcgtatatgcgcgcgcacacacaaacacaccatcccctttgctcggtcactttaccccaccctggaaatcgaggaaccagcactttggtgtggtggtaggaggcttgggggcgcgtgtgagactctgaatcccttccagacttgggggtcacctcatcgtccctcatcccaacttactggcaggagacctccacccactcacagccgctgcgctaggcgtgggcaggactgcgacgagcacccaacgccccgcgcagccccgcgcgcacgtgggcgccccagcagcaggtgccgggaagcggaggccgggccagagccgggaggcagccccccggcctcgagcgctcgccagactcttctcatggccctttctcctttcctcggcctttcggggccaccctagtcttcacagctcagcgtctgctgctgaccccccgccccccggcgaccccgccattgccattagctcttcctaccccggcttcttcgccgccacagtccccaacccaagccccagccgcggcgcgggtgtgggtggccggacgggatggcttccgtagtcccggggtccggcgggctcggctgtggtctgcgtgggtcgcgtccgcagaggccgagggagggcgggacggagccgggaaagggaggaggtgccgttgcggcgcccagggagggactccctgcacccccgcgcgctccagcccttcccggcgctgcctcgcggttgcccttatttcgtattcattgattcgcattttacaagcccgggctcttccggtgctgtttccccgcaactcgtgtctcccagactttaacgcgccgcgcgagcctgtaggaggaagtggcgcgggggaacgggggtccgtgtgtgccttggggtggttttaaatacctcgaggtggggggctcaattgcaagaagcccgcgtctttgcaggagtaatttggtggggggactggacatcaggcccagtgctcaaccgcgaaacttttacggccgcctttccctggggcgcgcccctgccgtgtctcccaagctgagcgcggagtccgcggcgaaacctgcgccccagggagggagggagagggggcgcccagttcctttacgcggatggaaaagaaggggtgggaggcagagagcccgcaaggtctaacctttaaaaagtgaaacaccaaaccccacaagggattttcacacgaaggcccctcccgcttccacgccttccgtccggcacgaggatccggctcgggatttgcggctgcatcctctctctgcgccctggcgggccgagccgcggatcccagccgggtcctcaccccctccccgcccctcccccagatccgcgcggctgggatgtccttgctgccgccgccgcggccccattctgccgcgcaccagccccggggcgccggccgcgcgcagcctcgctatcccacccaggctccgggcttccaggagggtcgtggagccccaagccatgactaaggagcccatttggtaactctgccctcttccggctcctttctcctccctcccttccccgccccccggccccccccccggccgccccgctcccctgcaccgccctccagcccgcctcccagacgcccacccacccgctcctctttccgcaagatagcagaggtggcgcgcagcccggcgagccgatgacggaccccttcttcctgccttcaatgcctcagcggaagatccccaagggctggagcgaggagcgctgccgctggacatcctcccggggaggctgctccgacctgctgcgcggcgcgtctgagactggggactgagccaccccgccgccgccggcgccgccgccgccgcccgctccgtcgctgccgtcggtctggactggcccccacctcgctgcgccctctccccggccccggccccggctcggggcgtcccggggctcgccctgcgaccgccgcctcccgcgcgccgcgtcctcccgaccccgcggcggcgacgatgcccgggaggagggtcctgacggcggcggcgcggatggtggcggccggcgcccgggtgtgatgcgagcgtcacggtggggatgctgctggctgcgcggcgctgagggccagcgagagcgagagcccgcccggggcggaggacggactcatccggatctggctgcagcgtgggctcggagctcccccttcctctcggtctccctctcggcccccctttatttccttcttgctttgcgtctttaacacctctcgaccctgtcctccccccgccactggaagtcttcccgtctctaaatggaattagtggagcccggagcctctggtgtaacgcacagacatgatccatgggcgcagcgtgcttcacagtgagtaccctccccgccgcgcccgtgcgctcccggagccagccctcccgcccctttcccggggccgaacgcgcaggaaaagcctctgcgccgcgctccggcggaccctgcagtcccgcgcgggtcggggccgacgtaaactttctgtattgcagcatcgtggaaccgggcgtgggggcggcgcgcggtcagccgtcgccggatcccaaaacctgccggagaacggtctttcagtgcgcaggaaccccccgggggtggaggatagcgtgcagttcagggatggacacgtgcggcagagattggcccaagcgagggcgcaggtggaaagcgggagagcgcggatgatacctagtggggccagaggagtcttcctcttctaggggctcccggagctcggcgggcccctgttcgcagtacaggaggtagcagaaggcacacctgaagccagcgctggagggaagggcgagggtcagcttccacccctttccgccctggagaccgctgatgtcgctttatgggtgtgtggtaacgcgggcagtgtagaggtgggaaggaatgagaggaaaatagtatcacgagtcatcgagtaaaaggcagtataagaaaatgtgtggtggaaatgtatcattactaagcaaagatgagagtgttgatcgcgggccacgcagttgagaggggtttgctgctgagttaaacacagtacgtggtctataa

SEQ ID NO: 7704 - DNA, 6000 bp, Homo sapiens
ggcccgtccgctattggactgcacagaagtgggaagtccaaaccaaggaattatgtctgacagaagggaagaaatgaccacggtggccttctcagaccctgtgggaaaggcctctacctatctggtgaaagtgtcttcccagaccaagaggtatgttagtttcctgactcggggcatacgagtaaagtcaatttgccagtcctgggcaggggcaaatctccgagcttgatgtgtagggaagggagggggcctcaacaatccctgaggagtagaatagcagatagaacacagagaagcgatttccttgagaatagatttccacgatggaaaggaaatgagaggttctaagaggcgggttagcagcttataacatacatggaagaggttatgaagtgacgacagaatagaatgggcctgtgaggctggaaggagatattttccttggtctaagaaccatttaccttgagtggggagggattgataggtagaaacttcagtgggagagtaagtaggagtgactgatgagaaggagaaaaactggccgtgagggacagaagtaggaatgctagctgcttctttagctaccttatcagcataagcattgccctgagcgacgcgatctgatgccttttgatggcccttgcagtgaatgactccagcttcctttggaagtaaagtggccttgagaagagtttttattaaagaggcattaatgatggaggacccttgtgtagtgaggaaacctctttcagcccatataacagcatggtggtacgggatatggaaggcatatttagagtcagtataaatattgacatgcagtccctttgcaagagtgagggcccaggttaagacaatgagtttggcttgctgagaggtagtggaggggggcagagtggtagcctcagtgatagatgtggaagacactatagcatagcctgcctttgccagtgattggcgattgggcctggaagaactatcatcaataaaccaagcgtggtctgggtggggaacaggaaagaggtaatatggggaaatggggagaatgaatggtttcgttaggatggcaaaaccaggtatctaaaggcaaaagtacctaaccatgcctaggaaggaaaggagttgttttgtagaaggggttggggtttgggagattagctggacatgattagcagggagagcacatgtatttttatgaagaattatgccgagataggtaacggatgaggaagaaatttgggcttgactgaagtaatgggggctgtccctgaagccttgcgccagtacagcccaggtaagttgctgaggctgatgggtgtcagggtcagtctaagtgaaagcgaagagaggctgggatgaaaggtgcaaaggaatagtaaagaaagcatgtttgagatccagaacagaatgggttatggaggggtaaaatgggggaattgtaaggagagtttataggctttataaggccatgctgtaacaagtgagtgataacaggctttaattcttttaaagcgtgctgtgggatgggatattggtgttgagcagggtaagggtgattaggttttaatgggatggtaaggggtgcatgatcagttgccaaggagggagtagagatgtctcatacttgtggattaaggtgaggagatacaaggaaaatatgtgaaggaggctttgaactgggaaaaagggtgacaatgaggtgtggctgtagcctaggaatagtcagggaagcagataatttagttaaaatgcctcgacctaataagggaactgggcaggcgggaataactaaaaaggagcgcataaaagaatactgtcccagttggcaccagaattggggagttttaagaggtttagaagcctggccgtcaatacccacaactgttatggaggcaagggaaagaggcccttgaaaagaaggtaatgtgcagtggatagcctccgtattaagaaggggatggactcatcctccactgtaagagttacctaaagcatctatcatggtccaggaggcttccaaggcgatcgggcagtgtcagtcttcagccactaagccgagaagatctgggaaggagtcagtcagtgagccttgcgccagagttccaggaactctaggaatggctgccaggtgagttggacagtccaatttccagtggggtcctgcacagatgggacattgcttaggaggaatccgggctgcagacattccttggcccagtggccacattttcagtacttgaagcaagatcctggggtaggaggtcttggaagaacgcctggccactgcggtttaggcgttttgaaattcttgtatgctggagatgtggctgaagtttctctcacagcagaggcaagtaattgccactcttctctattattgtacaccttgaaggcaaggttaagtcctgttgtggggtttgagggctggaatccaatttttggagctttttctaacgtcaggagtgggttgggtaataaaatgcatactgagaataagacggccttctggcctctctgggtctagggcggtaaggcgtttaagggttgttgccaaacgggccatgaactgggctggggttttatatttgatgaaaaagagcctaactgttttgggagaggtcggataaagaaaacaggagcaacaaccttgactatgcctttagctccagccacctctttaagaggaaattgttgggcaggtggggtagggctagtcaaggaacaaaaccataagccggactaggtgtgaggaggggaagtgatagaaggattatagagtgggggaacagaggctgcggaagaattgggacctggctcagcccggcgagcaggggagaggtcagatggctccacagaaaaggaggattcaaagtactcagagcttggggtggagaccgaaggaacacacaggagagaaagaagaaagatttgggatgagtcgcattgggagcagagactagggcgggactgatgtgtagaagaatgcctggatgtcaggaacctcagaccatttgcccattttacgacaagaattatctagatcttgtagggtggagaaattgaaagtgccattttctggctatttggaaccactgtcaagtttgtattggggtcaggtggtattgcagaagaaaataaggtgtttaggttttaggtcaggcgagagttgaagaggttttaagttcttgagaacacaggctaagggagaagaaggaggaatggagggtggaaggttgcccatagtgaaggaggcaagcccagagaaaagagagggcagagacacagggggggtcggtacttgacaccaaggtgaaggatcaaggcaggtgtccctgtggtgatcagacacctctgaaatgtgggtgaataatcaggcaggcatccctgcagtgattaaacaccaagggaagactgtcttctcgagtccgtgaccagtgccggagttttgggttcacggataaaacacatctcctctgtctctatcagaaaaggaaaggaactgaaattaagggaagggatagattgaagggtggtgccaaaattgaaaggagaaagaggttgagagatagtgagagaggttggagaagagagtaaaaagaagctgcttacccaatttaaaattggtgagatgttcctggagctggttggtctgaggacccgaggttgtaggtggatctttctcacagagcaaagagcaggaggacaggtgactgtcttatcagttaaggcaggaaccggccattttcacttcttttgtgattcttcagttgcttcagcattttcacttcttttgtgattcttcagttgcttcaggccatctggatgtatatgtgcaggcttgggctcagaggcctgacatgcgtgtgttttgtgtttttctggataggcatgcattcctatggaggaggtaagcagggggaagggagctcacattcatcagacacctagtatgtgtaggaaccttctgcatccctggaaggatggatgaccccacatgtgaaacctctcgtgtggttctttttggaattaactaccattgctgaaaagggcctacataaaatatcaaattttaacatgctggaatttttctttattttttttctccttcaaacatttgtagctctttatatgtggtatttcctctgtgtcagaagggaaagagggtgccctttggggaagttctcttccagactcctagaagagaatctgatttaccttaaatgcacaaacaaggccttgccatgtcactggccaaccgcagacaaactacttcagtcacagaaataatttggacacttttgctttttaaggaaaagatgatttccctggatttttttcctgtgaggacgaggcattccaaaaccccagcggggtcaggcacagttcgccaactttatgttttggggggcagcgcatttgcttcccgaagtgagttgcgaaaccgttttctagcgcgcacggggctttcatctcttccgtgcatgcgaacggctttccgagatgccccctttatgggcttggccatcgctacttttgttacaaattaacgtctgggactcggactgctgccaataggaaactcccgcgattcgctgcctagttcgccgccctcacaagactggactctgcacaggccatccatgcccgctggtgcacctcgctctctcgcacgcttaacccgcggggacgcccccgacctcccacctcagccctcgccacagttagtcccgcccttccgcgcagactccgtggagtcctgtcacgctctccgcgcgctgcggcagccgggagattgtgaagggcacctccggcagccaattaacacccgcatactgggcgggaccacgcttgggcaggcggagggggtcgaccgaaggcggggacttttgagtgacaaggatgatggccaaccgtcggaggcccttctactgcgccccgcccctgagccggccgcccagcccccagtggggttcccggcgcggggaatgtcccgggtggagctggctgagtcgcgcgctctgctccacccgacggggctgtgtgtgctgggcctggctcgcggcgaaccgagatggcagagcagtcggacgaggccgtgaagtactacaccctagaggagattcagaagcacaaccacagcaagagcacctggctgatcctgcaccacaaggtgtacgatttgaccaaatttctggaagaggtgagttggggatgagcggcttggggcgcagggagcgtgggccgggtttgggggttcactggcatgacctgtctttcgcggcccggagtccgcatacctacgcctaggcgcgccccccgagttcgctcacctgcgcgtgtacgcctgggcgcgcttccgagtccgcacacctgcgcgtgcaagcctgggcgccccccaccgccccaagtccgcacacctgcgcgctcacacctgggagcgctccccgagtccgcacacctgctagtgtacacctgggcgctctcctcgagtccgcacacctgcgcgtgcacacctggggagcgctccctgagtccgcacacctgcgcgtgtacacctgggagcgctccccgaatccgtacacctgcgcgtgcacacctgggagcgccctgcgcggcggcatcctcgctaggtggtgctggagcagccttccggggatagcgcgcagccatgcgggggatttaaatgatccctttctcccttgagtttgaatagaagggtgtccttccaggaccggcggcattcccgcagtggccggctggagaccacccaccccgagagctgcggatcccgccggaggggaccccaagtgcggaggtcgggtgtggtccgggcctgcgcttcccgcggcagccactggccgaccttgcggtccacacccactcgcgttcgcgttcacctggaagaggctcggtgttaattaaccttttccagtcacgccttggcagccaggtgccgtgcttgactcctgagaccgcggtgtgtggctggagcaagaacac

SEQ ID NO: 7705 - DNA, 6000 bp, Homo sapiens; identical to SEQ ID NO: 2011

SEQ ID NO: 7706 - DNA, 6000 bp, Homo sapiens
tacaacttgccatccttgaatatgtcattttggaaatctatacaagaatgcttatttacatttcccatttctctcaaaccacactttcataatcccaacatgcatctaaaagtgggaagtaatcatttcagcaaggcctagataagaaaacatgagcaatggaaacaatgacaatcttttcttttccttttccatcggttacaattgagtgaccttgggaggtatccaaatgatcattttgtccatgcttcttggcaaatacttcagctagcttaggaacttgccgcacggggttaacctcctaattcgacataacgttttggataggtagggatgggttatggtcagatcagttttcattgttatatttacattttgactttaatggggtttggacaaatctcaagagcagagttgctattgccaggccccagcactgcacaagtacagccagcaattcggcccaccgactggcaggatgggctcctgccctgggcatcacacacctataaaaataaatttgttaaggaacatacagccacttctgtcagtagaggtctggtgctcagtgttaaagactgcataaaactttaccctaaacttttgctttcaaaaccaacaccgttcgggccccagagaaacacttctcccctatagtcccttgtccttgaaacaaaggtgagtgcatcccacaacctgaagatttgcagggtgtgctgctgctgacatggaagatggacactcctaaacgtgtggatgatgtatagtggaggcgcttgattcaaagaaaagtcaaatgaattaaactgtcaaaaccttccttttagatagcaagcatatcatacagtcttaaataatgagggtttcctagcaatgccaaacattcattttcttgcttctctttttgttacaattcatggttctggcagaagtcatacagcagtatagcatttgcatgcggttgaacgtggtgattggccaatattttgaaaaattaactaattaatgttactgttaaaatggtagatatgaagttataacacatgaaacataatactgattatttatgttagcaaccaggtggacaatgaatgctagaattgctaagtttatgttttatttacacattaataaggtgtaattaaatttccaaatattaaataaaatgtttatgctttaaaaaaataacttttcagtgtttatattcattgtcataatttgtattttgcattttaattctaatagataactttaaatcatttgaaagaaaacttttaacaactatagaaaaataattctaattttctgaaataaaaaaaggaatttacatttgtggtgtaagtacaaacattttgtatgatttgactacattaatcctttatttatttattttttagaattgggatttcattctttacccagacggagtgtagagtgcacagctcattgcaacctcaaactcctaggctcaaatgatcctccagcctcagcctcctgagtaggtgggactacagggataaaccaccatgtttgactatttaaaaaactgttttgtagtgacaggatcttgccatgttgtccaagctggtctagaaatcctggcctcaagtgatcctctggcctctgcctcttgagtcgctgggattacaggtgtgagccaccacatggggcctgaatagatgaatcttttagatcaatgttgttcaatagtgctttctatgatgatggacttgttttctctccatgttgtacaatacattagctctagccacatgaagctactgagcatttgaaatgtagctagtgtcactgaggaacagaacacctgaaatgctgttaggtgctaccatacagaacagcaaagctttcaatcaccgctgtcaatggaacacaaattaagtgaaaatctcaattataacaacacagtgattttactaaagagaaatatcaattttatagaataaatatatatgaatcatgtatattacttatccatatagcctatcaaagaaaatctagatatgtataatgtctagcagatatgcataattcagttgctgatattttgctttttgtcatataaaatctgtaggttttatatttcaattttattgttatatgtgtcaaggtaggaatatacatagtagtttgctagcttaattaataactttgaaatattaggcatatggtaagtggctatgcatttgtactcttgcccaagcctaccaatgtcaggggctggcctgacagcacccctaactctgagcagccattctgcaaatgtcactattgtcctcagtgagtcaggagtgaaatgtggttaaaactaaatctctactgctgaaaaaacaagtcaaagcaaatgtcccactgggaggattcctacagcatcccttccttagaggaagtccaatccattcatttcagcagaggacttccatttaggctcaaaggctgctctgaccagttacctgtaagagggagtaaactaacagtagttgtcatgaattgagagggcagaagctgctggcaaaaatcccaccaccctttgaaatgtggatggaaggctgcaaagggtagagtcaacttaacagtgtaaagatagagaacaggggtaatagaaatttacagaccctcccactaagctttaagtaacaggcagaagggacagggtttgtagaggttaccaagaggagtcctgtggcagcagcagttggagtactggcagggatttctgtctaatgcctcagtggcaggtccgtagagtggccctttcctcttccatccagctcctcatcgtccccccgcagggggattgagtttcccttgcccatagtggtaacctgcttattgacacatctcatatcgatgtctgcttttttttttcttctctgtcttgctgtctcaccttccttatagtgctttctgggatcacttccccaattcaaaaccacttatagttaaatcctaacctccaggtctgtttctgagggagcccagcctaagacaacctccagtacttagcacagtgcctgacatatggtattgactcagtagatatttgctgaaagaataaaatactttgcaaatgaaatcctaccctaatattaacttcacctaatttaaagaagttactctgaagcaaagtgattagatcaacttttgtctccctagcttccacctctgtcctcccactagcagaaaaactccattggaaagcctattactaattttttttaaagcaaatttgaactgcagtatagaacacaagtacatcaaaatggaaagcccaggttgcagatttgaccatcctcacttgctgatcttgaagacattgcttcctttctgagatttcaatgttcatttcacaattaaagataaggttccataagcacatagttgggagaagtggcaggacaatgtaagctcatattaacaagcaaatgattaatatagagacttctaaagagcaggtctggtaagtatctagtaagtggacttcctgaagtaagaggagtgttggttgccacactaaaggcaagtcttctagtccccaaatttgccttgggaggatgacagctgtatctttcttggttctggtgtacagtggagaacagggtcaagatgagtgtggaatccatttatttttttacgtgtttataagcactagaaagcagtgagcactaagcagaggacccctcttgcggaaaaagtgcaggagagctcctgggtgcctctgtatcaccggtttgccttctagccagaatcattgctagaaccctgtcactcagttactttggttcctaatttaacctcttcccaagccttctattgcgttcagttagctaggccaggagcttacagctgtctggttggtgctggctcaatgtgcttattccctggaagatagaaggatcacttacaaaaaaatttacaattaaaataaaaaaattattttttgctgaagcattgtaaggtttttttaattcactcagacccaaaatcgtaaaactaaaatatttcaagacattacttgattcaccccccacttctctttctcccctgtttctcagcactttgcaccagatacagaaaccacgggttatgtccaaaccctggttttggtgtgaccaccgccttccgtgtactgcctgcggctcgcttcgggcccacacgggacaccgaggcatgatgaggacgcagaacagcagaagcgcgccctgcttcccgggcgccagtgctcggggccagcggcgtgtacccggcgggcccggccgggagcgggctggcgatcgcggggctcggcgctcccggctcccgcgccatctcccggcgcccgccaacttcgctccgcccgcggcgtagagaagctcgcagccctccggagcctcagcgatctcctggctcgcttttcccgcagccgccgagcagcgcaggcccggcgactccgggtgcagctggccctgtgcggtgacatcgccgtccggcgccaggctcgaagccgcctggccgcgcccgcggggtcgcaggccgctggtcccgcccggccgcgctcacaaactactcgcggctcgtgacccgggacaaacttctggcggcggcgcagcctcttccacagtcaccctccccagagccagctaccaaaatagaagacgcggccggggcgaggaggtgggcggggggagcccggtggccgctcctccccgcgcggctgacgcccgcttcggcggcggtagtggctgtggccgcggggccgcccccagccgagctcccggaggcgctcgggcgcgggccggcggggcacgggcgctcacgccctctagcgggccgcggcggcgccgggcggccgtgacgtgagcgctcccttcagccggcctgcggggcaccgccagtcagtcggggagcaagagccccgcgcgcagccggcgcgggctcggtcatcggcgcgccgccgcccggggctgggcttggggctgcctgtggagaggcggcgggcggaacgcgcgcggccacggccacggccaccgccacggccacggccggcagctcgggtcccgggtcccgggcaggggaaggggagaggcggcgagctcagcaaccggaaccgagggaagattttggctccgcgggctcgccctccgctccctctgccagcggcgccagacgccgagtggggccagggacaggggaggaggacccaggaccctgtgcccgcgcccctggagccgctggagttcggacttctgcaactgttggcactttgggggcttggcttagcgctctgctgtttacccgtctctcctcgctgcctcggaaccaaagctcccggccccctccgccctcgcgcgcccacccaccgccgccggggagcggcccggcccgcactcagcaccatgaggggacttgggacttgcctggcgactttggccggacttttgctaactgcggcgggcgagacgttctcaggtaagcgggaccgcctctgccgcccccgaggcgcgcgggccggcgcgggacgcccgggacgccgacagctccctggtggtagagccctaaggctggcgtcggggccgggcggggggcgcggcgggccggacaccgcttctgcctgtgagccgggcgctgggcgaggggccgtggggctggcaggcacccagtcctcgggcgggcggagcggacggaccccgagggcgagctccccagccgggactgccagctcggccgccgtccttccgcggcctgggctagtgctcaaggttgggcggcttgcactcttgagtccctggccggctgcaaaaggaacagcagaaaactttgcttgaagttcccagttgcagccgccgggccgcctggcgtaggcgctgcgcggtccccgccgaccccgagcagcggccgggcccaggccgctggtgttcggctgcgcccgcagcgatcgccgggaactggcggccgctccggcggcggcgatctcccggtgccctgccctccctgtcgccccct

SEQ ID NO: 7707 - DNA, 6000 bp, Homo sapiens
cccaccagaacactctattgcttatttaacatttcctcatgaatgtctcaaaggcatcttacatcaaactggcttagtgatctttccttccctgcaccccaacatcagaatctggtcctctgtctctgtgactagtaccatcattcattcacctgcacacaccggaagaaggggagtgattcctcactctcttactttctcttaccacccctgtatctaatcaatagctgattggttattgattctaccacctaaatatctctcaaatctgttcgtatttatttgctccatctccactgtgtctaccttagcccaaactgtcattctctgcaataccatcctctgtaatatcatcctctgtcttctgaattatagcactaatctaaacagttctccccatattccctcttactccccctaatccaatcaccacattgtagtcaagagaacttttaagaattgctcatatgactctattgtttaaaccctttgatggtttcctattttcttatgataaagactcaaatccttaatatggcctgaaacaatctgcataatctggcttttcagcctcatctcctgctactcactacccactttatttaccataacacatcagcctttcttctacaatttgcaatgagccacgctcatgtcagtctggcctttgcatattctgttctcctttcctgggtatccagatatccttcaggagatacttcttattactccctgaaggagataatctccaaaccctcaactcagttcccacaggttactctcccagtaccctagacctctcgttcctagtgtttaccacaattcaaatgaaataattgtatagttatttcacttttgtctctcactcttgaatgtaagcctataagggtagggaccatgtctatcagctcatgactaatcaccagtacctgccacagtgctgggcacacagcagtaatttaacatttaatattaataaggtaacagtgctggaatcaggcactattataagctcttcatgtgtaggaactcattgaatcctggtaacaaacccagaatgtaggtattcttcttcttctcattttacagatgtaaaacaggcacagagaggtggagtgagctgcaaagatcacacagtggaaaatggaacttgaacctagcagtctagattcaaagcctgtattttactttactgcctcaatatttatggaaagcatgcctgtttaaatgttcactgaagtcaataactcagagaattgctcataaacaaattcataattatagagcacctctactgtaaagtttaacatgtttaactatggagaagtagaggggtataagtactttgatactatccgtactgaaaacaaaaaaaaatctttgccaagtccataagagagaacttgtccaaaggtgaatactattagtgattcaaataggttgaaataatattcaaagcctttgtacttcttagactcatgaaaatttggttgcttgatatgctggagtgtatatatttgctaatactttaaggcctttctgtgctgcattagccaatctaaaaagagcaaacaaaatgaacataggtcacatggttcattattcctagcttaaatgttaaacaatagagaagtcaatgacattttaaattgtgggttgtcattttattgcggctttgggaagagcaaaaatgcacagaatagaacattgggcaatgtcccctgcccatagctgagctctattactaagatgagatgctgtcatctgtgttttcatttccacatttaacaacaaaagcggcacttgccaactgtcatgaagttgttctgagtagggtgtgatgatgtttgtaaagtttgtagtgctggaagaaaagtactaataaataccaaagcacaaaccacttaaatagtgcacaattcgatgtgaagtagaagattcaaaatgactcagtgattattaatctaatgctctaaaatacgaataggggattaatcccaagatgtttcacatattcttagaatattagaattttaaattcttatatgttttaagactatacctacatgatttttgaagcaatattgagaagtgaaaaaacagttgattccaacgacagatgactcaaatgggcagagatttcttaataatatagactgggaaactagaatacatccaattcaggcttcccattaaatctatagtgaatgggcgatcattcatcctcccataggggagttactgggaatttcctccgcatgctattctgctagttgactatttgcacatgggggcttcccaaatggtttccggtaagagaagtgtgcttcctgctatggagggactggatcagcctaggctagctggcccatggaagagagttcttaggccggcaaaaaactggagtttgtgagggcctttagggttgtcaattcacaactaaacctatgtgggacactatcctttggactgattgtcacttttagctttttttttttcttaaacaaaaacaaaacttgaacccccattttaataaacaattttttttgtattctaccttaatgataattgacatctcaaaataaattttgtgaataggaagaaatcacagtaaaggtaaatttagaatatgcttcaaactacttaagcactctatcctcctgcatccggagttgattccttccagtgggttcctggtcttgctgacttcaaaaatgaagccccggaccttcacggtgaatgttacagctcttaaagatggcacaaacccaggccaggcgtggtggctcatgcctgtaatcccaacactttgggaggccaaggcgggtggatcactaggtcagtcctgtaatcccagcactttgggaggccaaggcgggtgaatcatgaggtcaggagatcgagaccatcctggttaacacggtgaaaccccacctctactaaaaatataaaaaaattagctgggcatggagacaggcgcctgtagtcccagctactcaggtggctgaggcaggagaatggcgtgaacctgggaggcggagcttgcagtgagctgagatcacgccactgcactctagcctgggggacagagcgagactccctctcaaaaaaaaaaaaaaaaaaaaagaaagaaagaaatgatggcacaaacccaaagactgagcagcagcaagatttattgtgaagagcaaaagaacaaagcttccacaatgtggaaaaggacccaagcaggctgcccctgcaggctggggtggccagtttttattggcttatttgtccctgcccatgccctgctgattggtccattttacagagtgctgattggtccattttacaaacctctagctacctacagagtgctgataggtgcgtttttacagagcactgattggtgcattttacaaaactctagctagctacagagtgctgattggtgcattttacaatcctcttgtaagaaaagttctccaagtccccacccaacccagaaatccagctggcttcacctctcactcccaggaatttcagggctgaaaacacattcctcgtgggtggcacaatcttctgtgaatgccaggctagcaattccagcaggctgttcctggatggaccctaatacctggatcgcacatgaaaacttggatttggtgcctacttctagactgctgtttcgtctcgtttattttctagacaaactgtgctgctccatggcagtagcatcaatatgtcttttgtttcgtggcgctacctagggatttaaattcaaaccgtatcacaaaatacaataaaggtttatttacagcacattggtttcatttgacgttcctgtaccggactaccctggcaatcggctaaagttttgtcagcaagtttgctgctgggatttttcttatttggttcagtttactacagcctatcgtaagtgatgcagatggagttagtttctaacatgtgaacgtgagaactgttttggtttgggtccatcattaaaactgaagaagattatttgggttcgatggtgtagatttttgacttttatttctagtttctgtgtgctttgtcatatttccccttgcttcctagacgaggtgtgtttccttatctgattttgcatcactggagagaactcaggaagcaggagaggctgaattggataccacggggaatgcagccctgccaacagaggactggatagaattagagcaaacggacacatccccccacgcctgttctccacagggcagattttattaatatatttctaacattggggcctcgtttcagtcttcaagttttttcttttttagcgcaaactagacgcgctctgagagccaaaattagcgtccgcgaaccccaccccattgcctccaacagacctagctctcctttccaccctcaaacagccgttactacagttcccagcaagcaccgcgcagggccgcaaagggccaggccctcggcgaaggccccgccccgcagggggcatgccgggagttgtagtgagtgggcgcttccctactactacttgtcccttccactgggcattcccacttggaagagtgtgatgcgctgccagagcagtttctctagttccgtactcggagctcaaggtgacagaggactgcgcttccagccctgcgctgcgcatcgcgtcggtcccgcggacctttgccccgcctccttccacacccgttcccttgacagctgggctgcgctccgggccgcggcaagccgcgagcgcgcaggcgcagcagccccgcgccgcgctaggccggcctggagggcgggacaagcgctagaagctcccggccgggggcgcgcacgtaggcacgcagaggccgtcacgtgggtcgccgaggctcgcaagtgcgcgtggccgtggcggctggtgtggggttgagtcagttgtgggacccggagctgctgacccagcgggtggcccaccgaaccggtgacacagcggcaggcgttagggctcgggagccgcgagcctggcctcgtcctagagctcggccgagccgtcgccgccgtcgtcccccgcccccagtcagcaaaccgccgccgcgggcgcgcccccgctctgcgctgtctctccgatggcgtccgcctcaggggccatggcgaagcacgagcagatcctggtcctcgatccgcccacagacctcaaattcaaaggtaggcagaacggggacacccccgggtggggtggggcgcgcggaccgctggctgtcggcgggggggcgcggagggcacgtccgcggccctggcccgagggagcgccccctcccccacgccccggcgccttccctttcccggctgctttcttgccgccacctcggccggcctgccccttgctccggcccgcttcatcccctcccgcccgccctcgctgcggtgcgcgcgccggccggggcgaggcggaggggagcccggccctggcgccgccgccgccgccatcttgcggtcccgcgggggcgcctcctgggcgtccggtcccgcccgcgccgcggtccgcctgggcccgcgtccttggccccagaggccgacggcgtgcttcggcggggcgtgggcggctgggcacccgagggcgtgcgctctgggctgcggcggggagtgggctctggaggtggcgcaagctgcgtctgtcgcccgctcccggctgtcagcggcgcggggaggctagggcacggcgcgggaccccttgggagtgagagccgccccccgacccctgccccggcccggggagagctcgctgcagccggccctcgggttccgcggagggcgtcgcttgtcacctttccgccaggtttagaactcggccgtcaggtgtaggacgcgccggggaggtggagagtccttggaggtgcctggcgagggctgcccggtgctgttggcacggacccaggtgcgtgcgggcaggagcgatgcgtcagccgcaaacggagagttgtaggttcatagtagcggggcttcctgccttctacgacatttcagtgtgcc

SEQ ID NO: 7708 - DNA, 6000 bp, Homo sapiens
aattcaattgaaaataaaaaaattaataatgatggttctgtgaaaggttagagcaggagaggttgagaggaatgtggagaaagcccagcaaaaagaagcaaatacaagccaaagaaatcactggaaagggctgggtgcaggggggtgcactggtgatcccagcactctgggaggctgaggcaagagggttgcttgagcccagaagtttgagatcagcctgggcaacatagtgaggccttgtcgctactaaaaataataataaaaaatagccaggtgtggtggcacatacccacagtcccagttacttgggaggttgaggcaggaggattgcttgaggctaggagtttgaggctgcagtgagccatgattatgccactgcactccaacctgggtgacagagtaagaccctgtctctaaaaaaaaagaaagaataatttaaaaaagaaagaaagaaagaaagaaaagaaattaccttgaagaagggccatggccagacttgagagaaaacaccttccaagtgtccaaatgcttcttcctcttcttccgtaatgacacaggactttcagccaaaattgactgagttctgctctggaattcgcactgcactgtgttctgaacacagatggtgagtgcagtcacagacgatggcaactaacagactacgcggtggctgtggacagggagatgaggagacgtggttgcctctgggcactttttggaggcaaagtcgacagaatttcctacagattgcatgtgttgtgcgacagaaagagcagaggagcatgactccaagtgtttgggcaaggagagggtgaagctgccatgaacccagcatggctgagcctgaagggagagcaggtatgggagcatcaggagctcagatttgaacagattatgtatgacattttagatgtctaggtggagctgctaagaaggcattggacacaggaatctggagaacgaattctccatattaatctcatagagattcagtggtgatttttaaaagtcaatgtattcattaacacttaaccagaaaaaaaaatacagatcataatggcttctattagttttatcagaaaaaaagccaagaacaatcttctaaaatcctattctgatgaaaggaactgtcaaatgatagcagaatttgttccaaaggttttttgtaaattcgttatttataactcagaatatattttcccagagaaatgattttatgattcatggctaacctcttgggctgggtctcagaagtgtatctcttgtataacataacagtatatttgtgggggaaaagggtaaaattacacagtcaggctactagcaattaaacaaacaaagaaaacttagcgatataggagctcttatgtttccttatttatgattcctgatttgaaatagagctcatttgacccatcaaaccctctctccaagaaatgacaaagaccttttatttgactggaacattcagctgtgggaggtaggtccaaggattttgcttcctggcagcagactaggctaggggaaggaagcaggtttgtgtagacaaggaacctggggatgcaggcttaaagaactctcagagacttaagcccaccatgagagaaggaatggggtttgcaagctctattttaagcctcattcacactttgatgtgaatcattttagtcacatccaaaacaagtagatcactcaggaatgcacatttttattgaggcaggataaagaaaaagagtttctagaactagaggagaggattggctcagatggaatcacttgggccagcagccagcaagtctgtatgttgacggggtaggtgagggaggacatgagcgtctaaagagccttaggagaggaggcaagaggtaagttgaagtcacaaagacaacttttgctgaggttctggtggtagctgctgtgataacaagaattacgtttatgggtcaacaaggcctggggtcacactatcgattctagcttgggaaactacacgtcttagtctatcatcatttggtccatgctttccattctcagttcttctaagctgacttctcagtttaaattccccttgctcaactcccacctcaatgttattgcaggaagagaaggggaggggaagaaagtgggggcatttgtgttacacctttactgtgcccattctctctcttcttctcccctttactatgaatgcatgttagcacatacttaccacggcttccctggtcaagggtcctttgaaacatagaacccttgaatgcccatggctattgatatagctccaacgaatggaggaacaccagggttgttggtctcgtgctgataggattaacaacacggacacgtggagtggttttaaggagtgaaaagtttaataggcaagaaagaaggaaggaagaagaaaacacctcccccatacagagacagaggtagggaggatttgaacaaagagaaaacccagtgtgcagtggaaaagtggttgcttatattgggatcctggaggaggtggtgtctggtttgcatagggcccaggggattggtttgaccaggtgtgtcatttacatagctctcgaaaaacctggccctcccaccttagccctttaatatgcaaatacaggtcaccgtgatgttctgaacacatggtgttatctggaggtggccatgacacttggtacacctgatgacaaggaagagatggcggaatcaccatgttgagtgaactcagtttctaaggactgacatttgcatatcaaagcttgcgggcctggctcttcaagctgccttttctgttagaaaagagatggttcaggggttgtttcttaaaacaggaaaatttccactgagaacatttacccttactatctgcctaaaaagtatttcttaataactgctatatcactatcgtggggtttttttcccattctttctttgttgatgccaaagtaaaattaagttaaatattgtatcctctcatagatcatgaatgcaatgagggcaggcattatatctcttgctcaacaattgggtcctaggtgtgtaggcttaatgtcttgtgcagagtgggcattcagtaaacaataattcaataatgaatgaataaataagggagaatgtggaggaggttataggcttagaaaactttctgggcactttcaatggttttagagggtgatggtattgggtggttaataaatctaaactcacttgaaaacataaggctttccactggtaacagtccttttatatttaatcagtcatcccagagttgtggtgaattggaagtcatggccaaagtattttacactcctctattttcctacctcttgaatctgaacttgccttatgacatgttttcatcaataaaatgtggcagaagtaatgtgcagtgggagtccaggccttacgaagcctgaagtttccactttcactctcttgaaattctgctgccttcctataaaggaagcccaggctagacaaccaaatgaagaggggtcttgtgtgtgggtactaaataagaaagtgaggatagagaaaaaaatccaaggccagttcacctgttggcactagaaaaaatgcaaaatattgattggcaaatagatgcaggaagatcgatcgattgtgtggtgaggccaaagggaagaactcttcgaatagttatttcatattcaacaataagtgagagttggcaggcaagcagagattgtgtaggagttttgagaaggaaggtgtgaacagccctccaagtgagtgggtgagtgatttgaccatggaaacataggagagttgctcagcagcaccaaaggtcggcttaatgtttatgatcattaaaatgagtaatgttagcatcctcgtttgtttttttccagtcaaattcacttgctcaagagcagttccagagtaggtggagagctggggtttttcctggcttggagaaaggagggagagggagccaaggccgttgagagtatacgcactaaaatgatgggacatgaatttatgctgggaaaagaaggacgtgtaagagcagagggatagggaaaggtgaggaatctggtgaaggttaagtaattactagcactaggaggtatgagctggaatggaaaggggaagtaaagtgagctgtttgaaactgacactacggagggtacacagttatgagtaaggtcaagggtgtgatcccaggaatgtgtggctgcgctagtgtgggaaagatcacaggaggttggaagctgagaggctgtatagtcattgcaggaatcatccatgtggatattgaaatcaccatgaattatgaatgaagccaactgtattactggttactatttttaccagaccactgtacgcgactttagatccctcaacttcccatttagagcacttatcacggcttgaaatattagagcgattatttgggttgggcgcggattatttgacagtaatcagggtttacaagtctgtttcgtttcttgactgacatacaattaatacccaaaaggcagaatggatagaagaatactattctatctgtcatacagagaaacttcagatgtaataaattataaagccaattaaccctacaaacaggatccacagcagtttcacattaatgaaaaagcaagacttcaagagggcgggagtttttgtctgctgatcttcccgcatctaaaatagtgcctgacacatattaggtgctttgcaaatattgaatgaaagaatacgccccatcagtatctcaccgcgcctgcgctagatgccctaggtggggccagccttgacgcgctgcgcctgcgcaatgtctctttgcggggcgcaccggcaggctcccagccccgcttcgtcgcagcggcttgggccctccggccctccgtagccgctcgactgtcgcgctgcaccagcttcctcctcggcgttcccacgcctatttgggcggattcttggcgccggaggaagaggcagggtcaccctctctccacgtcagagacctgactgtggagatggcggctcagaagataaacgaggggctggaacacctcgccaaagcagagaaatagtgagtgagaaccttccgggggcctgtgtgtagacgccgggtccgtctctcactggcgcggccttagcacccggggggggcgggagggagggctcagggctgaggggcctcggcgcgctggtgcccgcagggctgccggggctcggtgtcctctgggtcacactcccggggtcggggtcagctctgcggcgcctcgggaagcgccgtgggtccaccccgccggaagtccgctccccagagccggtgtgggcggggactcggcgcagtgctgcggggcgagggcttctctacttgggcgctctgctcctgaagattgtggtgggggctgtctgtgcatcggaggctcgttagcagcatccttggcctctacctgctgggtgccggtcgcatctcttccccatttgtggcaacccaaaatgtcatctggggaacaacatcgctctgttgagaaccaccgccctagaagagccccctgtgtggaggggaccataggtttaccccaaaaactcctcggtgaacctttgtcatctggcattttactgtccctgtgggcagggactgtgcttcgttcgtcctttgatgtgtatgtcctgccacctctggtacagtacgtagtaggcaccctgcaaatgtttgtgggactgaactgataatccttaattcatccttttggcagcctcttccccccgtttcattactccagtgcatttttatctggcagttacagttaatagaaagtcagcattgtgggccgggcgcggtggctcacgtctgcaatcccagcactttgggaggccgaggcgggcggatcacaaggtcagaagatccagaccatcctggctaacacggtgaaaaccgtctctactaaaaatacaaaaaattagccgggcgtggtggcgggcgcctgtagtcccagctactcgggagcctgaggcaggagaatggcctgaacc

SEQ ID NO: 7709 - DNA, 6000 bp, Homo sapiens
tccttgtgtccatgtgttctcattgttcaactcccacttatgagtgagaacatgtggtgtttggttttctgttcctgtgttagtttgctgaggatgatggtttccagcttcatccatgtctgtgcaaaggacatgaactcattcttttttatggctgcatagtattccatggtgtatatgtgccacattttctttacctggtctatcactgatgggtgttcgggttctttccaagtctttgctattgtaaataatgttgcaataaacatacgtgtgcatgtgtctttatagtagaatgatttataatcctttgggtatatacccagtaatgggactgctgggccaaatggtatttttggttctagatccttgaggaattgccacactgtcttccacagtggttgaactaatttacactcccaccaacagtgtaaaagaaaaaacaaccccatcaaaaagtggatgaagaatatgaacagacacttctcaaaagaagacatttatgcagccaacaaacatatgaaaaaaaaaaaaagctcatcatcactcatcattagagaaatgcaaatcaaaaccacaatgagataccatctcacgccagttagaacggcgatcactatttctaattcttcaagtgatctttatctgcgagaatttctgttgtgagtgaagcacccgcggtggggcaggctgtggagggggaggcaactggagggggaggcagcggggcataccgagaagccctgggggtgagagctggggctgggacctgggctgggtgagatgctaactgggcttagagatgacagttacagattctgggcgagcagagcctccctttaccactcagaaatttttttctgaagctaatgagctctgagtagccgctgagctactaacttaccatacttggagtggctggatgagagctgaaatctcagctgatcacctccaatcaaatccctggcttaggctgcctctttttggccattcaggacagcaaggttccagccaccttagcttctcctatgcaggtctcaactggtagccgatccttaaagcccgtttggttccttaaataagcaactacctgcagatggaacctgagacgagctcagccacacagaaacgcttatctgtaggacttcactgaaggtccagtgcgtttcctcctaaggactgtaaacgctcaggtaaatatttgtcagatggattaatgaactgaagacctttatagaggaaaccttgaagagatatcgttagaatctcaagtccttgttgctaccaacaactcttgtgaaagtctttggtgtccctgccttgctccattttcaaggcccctgctgcacacacagatgcctcctaagctctgagatgcgttggtgactgcacaaaactcatattagacgtgatagccatcagagtacttacgtgaaagatgcgatgtaaagatgatgagggaggagagagtgccgaatgcaaatgtttttacactttcatatttgtgtgttccacagacttccctctcccatgcccttctgctatgtgtgctgccattttctctgaatgaagggaaaagaaatattggcagctctcagctaaaattcccagtgatggacgtgctgtcatgcagccagggtgagctgtgtatcagggcatgaaccctgagtcacgacttgacctcggaacttcctttctgaagcaccatcttcaagtggtgcttaaaaggaataaaaacaaaactcaagagcactatctagtacatccgcccagacagcccctcagaggcgctgggagaggccctgtgcctgtgtttaagccacacatcccaagacagactctacaccatgtccccagacacccacaggagcgctcattatgcgtgtgtgtgtgcgtgtgtgtgtgtgtgtgtgtgtgtgtgttaggtgtgggcaatgttttcaaagtaaacttgtattcataaagtcaaaagttttgaaagtggtttttaaacaggttgaactgtgagaacattaaactgagtgggcaaggagcttaattaagatcggctccatggccgggcgtggtggctcacacctgtaatcccagaactctgagaagccgaagctggtgggtcgcttgaagtcaggagttccaggacagcctggccaacatggtgaaaccccatctctactaaaaatacaaaaattacaaaaattagcccggcatgttggcgcacgcctgtaatcccagctactcgggaagctgaggtgggagaatcacttgaaccggggagacagaggttgcagtaatcagaaatttcgccactgcactctagcctgggcgacacagcaagactgcatccaaaaaaagaaaaaagaaaagaaaaagattggctcccatggccaagatgcccagtgacagggaagctagccaaacacagtaagtgtgttgagacactggggaatagctgatggccgttaaatgaaagaaaaaaatgttgattttctttttttatatatgaaatattcattttacaccatgttaaatcccagagcgggctatttataaccatttcaaaatgcaaatatgttcattagcaaaggagagaagaacttttccagttccatgaagttcaccaaagccctaattttttttttttttttttttttttttttttttttttttttgagacggagtctcactctgtcgcccaggctggagtgaagtggccctatcttggctcatggcaacttctacctcccagttgcaagcaattctcctgcctcagcctcctgagtagctgggatcacaggcgtgtgccaccacacctggctaatttttgtatttttagtagagacgggtttcgccatgttgaccaggctggtcttgaactcctgacctcaggtgatccgcccacctcggcctccgaaagtgctaggattacaggcttgagccaccgtgcctgccccacaaagccctaattttaagaaacagacaggtacagtggcctacagcgctcctcactaaggccctggcttgagggcaagcctatcatgtgactgagcctgaccaggaagtgctggcccaggtggcaaggagcctcggggctccagggacaaggggcgctggtagccagggaggggcggcttgaagtggctgcagcttctaattctttctgaagctgcctctttctgagggtgactccctcttcattcacccagcagggtgactctgagaagtcagggaaagtctggcacagggaggggagttccatttttaattcggaaattgctcaggaagaatcataccatccggatttccctcgcggctgtatattaataaatggtcactttccttgctgaaattctctggtttccttttatccacgtgaagcttctggaaactcttctgggtggttcttctgttgcttttctgcccctgcccccaaaaatgagaacatgagaaagtgatgtcttctagccacctggaggaccctgcggtgacatcagggcccagtccctgctgtcatgccccaggtgacgtgctgggctgacagcagggctggccgctaacgtcactgtcctggcttctaacgctggtagtaaccaacagagtttagttttgctttgacaactcctcctacagccaaaactattgttatggcccacatgtcattcctatttaccctaaataaggaaaaacaaaggctattctgggctcccggcagtgcttgtggtgggggttatttgcagcgttaccatggcaggctgccctttccaccacggccaccccgtgattttctctgaaaactgcgacagactcgcagcctgccctgaattttcttcacacagcctgggggcatccgaatgcacgggagatgttttacactcagatgaaacaaactgtttagacctcggggaaaagagactgtgcttgaacaaaatgaaccaggagaaagcgccctcctgagacatgtctctgctttcatgtttgaattgcctgggattctgttctctaatttctgatccttataaactaaaactgcctaggaacattgagcatcctgactttgaaggagtctctgtggtgtttttgtgctaccatacatggggaataatgatgtgaggcagagggagagggaatgaatgggagagccaagagggaagagcgagccggggggaaaggagcgcgcagtgtttcctgctgcggttaggacctcacgccttgccagtacagagctcggtggcaagagccgctgggagctgctcccatcagttagaggatgtggagagggagcaccagaagaggacagcccgcagcctggctcgcagcctgagggacgctgtgggtgctcccagccgggcgagcacgctctgggagcggatctgcaggggagaagcacgcgagcctaacgtgagcgtcccgcctgtcgcgtgtcctgccttggtaagcgccctctccggtccttccacactgaaagcttccagcagagatcaagggaaggagtattgtgtgagacttgcagatttcctcctttctgtctggactggtttgatatttgcctgttgaaaagattactgaacgcagtgtgacaagatgagccgtctagctgcgttctgcttgcctgtgtgtgtgacacgtccaggtgtgaggccaaacctgagaagtgcagactgctcactgatagacgttgctgtaaacagtagtgccctgggtgtacagctggtctcaggatcggagaccccggacttattctctgctcggtgacacggccggcttcctgccgcagagctcctggtttctgttgatggcagttgataattggtagccacagtctgcggtcggagccacagcatttgagtctagcacctggggtgggccctgctgatacagtagagagagagtgaacgaggcagacagaaacacaccccccccccctccacgctcacacactctcccacaccccatgccagctataactgcagctctgagctgcctggagaggagattgccggaagctgaagggatgctttgaacgtgggggggctgcgtcacagttggactcccacttgcagaggacctgattatgtccagtgaccacctgaacaacagcacactgaaggaggctcagttcaaagacctgttcttaaaaaaaggtacatttcccaagaactgctatggatgatgcatgctctttcgggtttgctgtggttcttcttggagtttggtctgaggacagagctgagaagaggagaagctctttctcaagaagtttctttctacctaagaggggtctgtcaactcagaacatttccgggtgggactccctttaggaagatgcatgtcaggctttttcatcttctttcaagcctggaattagtttgttcctgttggaggtgttatgcatgagtacacagtttgttgctttggagttttgtttttttcaaatgtctgtatataaggctgagacctcccctggaaattctgctacttgttaataattcctttttcttcaccctcatgagctgaaaactgcattttaaagaaaaggtatttctcaggatgtggctggttcattgaacactttcttaggtcatccatgtagtgacaggagctattaggaaggagaactgtgactctgagagatagagagccaaagaaagtgagagacagacagactggctgtgggatgagagcctcagaagccaccactctcccctgtggaaatgaaggttccattccatgtgcagctgtgttttttttctgatgcactttcctaaattaataatgtggaggtggaggtgagggtggattttaaatgaatcctatagggggaattatggcttatgtatgtatttttttccatttatagcatggcagagggatagacttttaaaaggtttataattgctcttactcctctgctgattttttagaaaatcctgtcagtcatctttgatcagaacatatttaggtaaatttctttctgaagagatcatgaaactctagattctaaaa

SEQ ID NO: 7710 - DNA, 6000 bp, Homo sapiens
cagccaaatagtgtcagaaactccatgagcctcagagtctgtgtctatgaatatggtaataatgttaataccttccagggttgctttaaggactacgtaagttaatatatgaaagtattttgtaatccttggagtttaaaaattgtcataacccagcacttgtgattatcttgctttctcagcactcacttgggtgagctttgccttgcagcaggtcttttagtgccttcgtccagccccttggtggtgttgagcacagagatgacatttgataagagttttctggcgccatgagagcgacagacacagagctgtgccagacacctcaggggaggacctgctgcccaactgtaggggtggtctgctgcctcccccagctgtcagcccctccggtttggcctcacaccttcccggaagcagcttgcttctggtgactgagctgggtggggcgtgagggctgaggttgttggagctgcctggcagctctcttctctccctcccctcccatccctccctccgcaggcctgcccccaggaggcttccccacagcatcctgcatggtgaactcttcagagcctgtgactcagagaacccaggccgagacatccagtgtccagctagatttgacccttgcaagccttcacagatatgactccacgggttgtctctgtgcactcgaattgagaatcctctctgttgtcattgttcaagaaataaaacacctgggttgttgcatgttatgctggtctttgacagggaaaggaacattccttcctgggtggctcatgtcatcgtgtgtgttcagcattgtcattaggctgctgtttgggagaaagtttccaatgacaggaacagttgaagagcttagtctctattctcttaactctattaaccttaattcaattattttcctgcaagaaaccgagaattcctacatcacctaaggtgtttcagaatataaaaataatcaaaatatttccccagtttattaaacaaagttagggtaacttatataccaaaatctgataaagacagtatgaagacaggaacactgcacatcaaatccagcagcattttaaaagaataatgcccggtggcaccagggctctcagggaggctgcgtcctgccggggaaagtgcttgggctctgagtcagtcggggctcagctctctagcgctggaagctggagcttgctaagtcacctctcccagcaccggctccttccattgcgagaggagaaacccacttctagggtttcgtaaaggttgaggaaggtaattcctgtgcagcactcagggtcacccctgcacatagggcccctgggccagccgccctcaccactgtgggaggccgcctgctgtggtccagctgctcatcttgcacagagccctccattttgagcactttcctgggacaccaggaccttttgcagagccctctctgatctgatcttggatgtgaggactatatgtgggagtgcttgaccctgctgatgttttcaacacacggaaatgggttccctccctcacaccacattcccaatatgtattctcaacattcagaacctccttctagaattccaccctgtggctcccagcacggcttgggactccagtggcgtgaggccagccagactgtggtccccacacttgaaatactggaaggttgtgatcatctgcaaagcccaaggaaagctctggtagtgatatggccccgtgcatcctgccctggcttgcagggcagtggcacttctgcttattgtgagtataatgattcttttgggggttgaaggtcagttttaggtgtcagagaaggagtggggtccagaaactattgcgaaaggccaggatatttggtgagaggacatcctttgttcttttttgctggagtaaggaaagcctgtgtggttgataaagcctggcatggcatgtgtagtcctggaggaggggtgagagccttgggcaaagaggggcgtggtagggccacagatgagggctcccaggcactgggcctccttcccaaagaacaatcatcaggacatcccagagaccactgtccaggagaaacggggtgacaagccctctttgagctcgggagcattttaatcagtgctcaagaggaagagaaaagaaacaaaaagtgcaaccagccagaaaaacaaccaagcagctacccacccaaccacccatccacccacccactgacccaaccaaccactcccccacccaaccacctatccatccacccaccgacccaaccaaccaaccaaccaaccacccacacaaccacccatccacccaacccactgacccaaccaaccaaaccaagcaaccacccacccaaccacccatccacccacccactgacccaaccaacctagcaaccactcacccaaccacccatccatccacccactgacccagccaaccaaccaaccaaccaaccaccctcccaaccacccatccacccacccactgacccaaccaaccaaccaagcaaccacccacccaacgacccacccacccacccactgacccaaccaaccaaccaagcaaccacccaccacccacccacccactgacccaaccaaccaaccaagcaaccacccacctacccaaccaacccccacttacccaatcaaccaaccaagcaaccatccactcacccaaccaaccacccacccacccaagcaaccaatcaacgaaccaagcaaccacccacctacccaaccaactaccccccacccacccaagcaagcgagcaagcgagcaagcaaccaagtaaccatctactcactcaaccaagcaaccacccacctacccaaccaaccaatcaaccaaccaagcaaccacccacctacccaaccaaccaatcaaccaaccaaggaaccacccacctacccaatcaacgaaccccccacccaaccagccaagcaaccaagtaaccatccactcacctaaccaatcaaccaatcaaccaatcaggcaaccacccacctacccaactaactaacccgtaaccacccaaccaaccaagcaagcaaccacctgctcacccaaccaaccaatcaccaaacaagcaaccacccacccacccactcaaccaaccaactacccaaccaagcaaccactcacccaaccaaccattcaaccgaccgaccgaccgaccgaccgacccaccgacccgaccgaccaaccaaccaaccaagcaaccatccaaccattcaagagtgtgttcggggggattttcgctcggggctgacgcggttctctggccgctgtgccgtgctgggccactaggtggcagcggaggccgcccggagcgacagccggcggtgcggaggcgggcccggcgcgggcaggcaggaggcttaaagccccgcagagccgcagccgcctagctgggggagaggcccgtccggggctggctctgagcgccgcacggccgtcggatcccggggacgccgggggcccgggctgagcgccgcggcccgcgaggaggagcaccggtaaatagccacaactttctatctccttgagatcctgagaataaatgcaaaatcgcgcttccgctgcatgtggaagtgagcggggcggcagctagcttgccccgtgagtttttaacacagctcgatatgatgtttagtataattgcataatttaccgatatatctgagctggaactcagctgtaacaaatgattgtagttcaataaatgcttagattaccaattttttccttttttatttttatagatttagggggtacaggtgctgttttgttatatggatgtattgcatagtggtggagactgggcttttagtgtagccatcacccctatagtgtacattgtacctattaagtaatttgttgtccctcaccccctccctccctcccaaagtgattacaaatattaatgatgacagtgatgacagaaattctctccagatgtgatctgagtttggagggcaaagggatttttgaaaatgaatcataagagagaaattttgcaacaaaggagtgtggtacatttaaattgctgtttttttttttaaatactgtgctcacgcggacctaataaactatcaagcagacctcatggaattccacataatgcagaagcgagggaaaaataggtattgagggaaaagcagcactgttttcctcaattttaacacgtatgtgcagcctacacttacaaacttaagacagtagcttttaacatgtgactttgctcagggtaacagaccattctggttatagccttacttacagctgtggaggctgaatcctgatgggtctaagaagtgtcaggacaagtgttagggatgcacctgtctgtctgtcttaagggaatacgggtctgggcagtcttaaatcggagctcccttgaggagaatgtcgtgcagtagccttaggaatgtgaacattgggagactggctgggattttgtaggttatgagttggggacacttatgatagtgaacttgagcccaggagagaagccataaaaagtgaaactgtcctgggcacttggaggtgagtgtctctctagtaagatgcatgtgaaaggctgggagctgaaagcaaggagagcagaagaggctggtgaagattctaatctgcgtgtccaggggcactcttccaggtctcaggaacgcaggtcagaatgtgcaagccagctgccgggcacgtggctcacccctgtagtaccagcactttgggaggctgagagagaagatcgcttgtggccaggagtttgagaccagactgggcaacatagggagaccctgtctcttaaaaaaaaaaaaaaaaaaggactgagtgagccgagcccagtcctctgatgcactgtgtcattcatcccctttcttaggctgtgttggttctaggctagctgctgtctttctttggtaggctgctaacctctttggattgtgaatttaaaacatgttttacagtaaatttgctgccaagacaagaggtgtatttctccagcaatgaattcctcatttcacctgcatttcttggatctcaacctgaatgccacagagggcaacctttcaggacccaatgtcaaaaacaagtcttcaccatgtgaagacatgggcattgctgtggaggtgtttctcactctgggtgtcatcagcctcttggagaacatcttggtcataggggccatagtgaagaacaaaaacctgcactcccccatgtacttcttcgtgtgcagcctggcagtggcggacatgctggtgagcatgtccagtgcctgggagaccatcaccatctacctactcaacaacaagcacctagtgatagcagacgcctttgtgcgccacattgacaatgtgtttgactccatgatctgcatttccgtggtggcatccatgtgcagcttactggccattgcagtggataggtacgtcaccatcttctacgccctgcgctaccaccacatcatgacggcgaggcgctcaggggccatcatcgccggcatctgggctttctgcacgggctgcggcattgtcttcatcctgtactcagaatccacctacgtcatcctgtgcctcatctccatgttcttcgctatgctgttcctcctggtgtctctgtacatacacatgttcctcctggcgcggactcacgtcaagcggatcgcggctctgcccggggccagctctgcgcggcagaggaccagcatgcagggcgcggtcaccgtcaccatgctgctgggcgtgtttaccgtgtgctgggccccgttcttccttcatctcactttaatgctttcttgccctcagaacctctactgctctcgcttcatgtctcacttcaatatgtacctcatactcatcatgtgtaattccgtgatggaccctctcatatatgccttccgcagccaagagatgcggaagacctttaaggagattatttgctgccgtggtttcaggatcgcctgcagctttcccagaagggattaagcacaaagtgctcctctctgtg

SEQ ID NO: 7711 - DNA, 6000 bp, Homo sapiens
gttctaacccaatgcaaggaagctaggaaacttgaaaaaaggttagatgaattgctaactagaaaaaccaatttagagaagaacataaatgacctgatggagctgaaaaacacagcacaagaacttggtgaagcatacacaagtatcaatagctgaatcgatcaagtggaagatgggatatcagagactgaagatcaactcaatgaaataaagtgagaagacaagattagagaaaaaagagtgaaaagaaaagaacaaagcctccaagaaatatgggactatgtaaaaagaccaaatatatgtttgattggtgtacctgaaagtgacggggagaatggaaccaagttggaaaacactcttcaggatatcatccaggagaacttccccaacctagtaaggcaggccaacattcaaattcaggaaatacagagaacaccacaaagatactcctcgagaagagcaaccctaagacacataatcatcagattcaccaagcttgaaatgaggaaaaaatgttaagggcagccagagagaaaggtcgggttacccacaaaggaatcccattagaaggggaagtccattagactaacagcggatctctcggcaaaaaccctacaagccagaagagagtgggggccaatattcaacattcttaaagaaaagaattttcaacccacaatttcatatccagccaaactaaccttcataagcaaaggagaaataaaatcattttcagacaagcaaatgctgagagattttgtcaccaccaggcctgccttataagagctgaaggaagcactaaacatggaaaggaacagccagtaccagccactgaaaaacatgccaaattttaaagaccatcgacgctatgaagaaactgcatcagctaatgggcaaaataaccagctagcatcataatgacaggatcaaattcacacataccaatattaaacttaaatgtaaacaggttaagtgccccaattaaaagacacacactggcaaattggataaagagtcaagacccattggtgtgctgtattcaggagacccatctcatgtacaaagacacacataggctcaaaataaagggatggaggaatatttaccaagcagatagaaagcaaaaaaaggcaagggttgcaatcctagtctctgatgaaacagactttaaaccaacaaagatcaaaagagataaagaagggcattacataatggtaaagggatcaatgcaacaagaagagctaactatcctaaatatatatgcacccaatacgggagcacccagattcataaagcaagttcttagagacctacaaagagacttagactcccacacaataatagtgggagactttaacaccccactgtcactattggacagatcaacaagacaaaattaacaaggatatccaggactggaactcagctctggaccaagcagacctaatagacatttacagaactctccaccccaaatcaatagaatatacattcttctcagcaccacatcgcacttattctaaaattctaatattgttatgtgtgaatttgaacctgtcattatgaggctagctggttattctgcataattggaagtaaaacactcctcagcaaatgcaaaagaatggaaatcataacaaacagtctctcagaccatagtgcaatcaaattagaactcaggattaagaaactcactcaaaacctcacagctacatggaaactgaaaaacctgttcctgaatgactactgggtaaataaggaaattaaggcagaagtaaagatgttctttgaaaccagtgagaacaaagacacaatgtaccagaatctctgggactcatttaaagcagtgtgtagagggaaatttatagcactaaatgcccacagagaaagcaggaaagatctaaaatcaacattctagcatcacaattaaaataactagagaggctgggcacggtggctcacgcctgtaatcccagcactttgggaggccgaggcgggcggatcacgaggtcagaagatggagaccatcctggctagaatggtgaaactccatctctactaaaaatacaacaaattagctgggcatggtggcaggcacctgtggtcccaggtactcgggaggctgagtcaggagaatggcgtgaacccgggagatggagcttgcagtgagctgagatcacaccactgcactccagcctgggccacaaagtgagactccatctcaaaaaaaaaaaaaaaaaaaaaaaaaaaaaaaaaaaaaaaaaaaaaaaaaaaaaaaaaaaaaccaacaaaactagagaagcaagagcaaacaaattcaaaagctagcagaagacaagaaataactaagatcagagcagaactgaaggaggtagagacacgaaaaacccttcaaaaaaattaatgaatccaggagctgtttttttgaaaaagatcaactacatagatagaccactagccagactaatgcagaagaagagagaagaatcaaatagatgcaataaaaaattataaaggggatatcaccaacaatcccacagaaatacaaactaccatcagagaatactataaaaacttctacgcaaataaactagaaaatctagaagaaatggataaattcctggacacatacactctcccaagactaaaccaggaagaagtcgaatccctaaacagaccaataacaagttctgaaattgaggcaataagtaatagcctaccaaccaaaagaagtccaggaccagacagattcacagccgaattctaccagaggtacaaagaggagctgttactgtacttcctaaaactattccaaacaacagaaaaagagggaatcctccctccttcgtaaaactcattttacgaggccagcatcatcctgataccaaaacctggcacagacacaacaaaaaaagaaaatttcaggccaatatccctgatgaacatcgatgcgaaaatcttcaataaaatactagcaaacagaagccagtagcacatcaaaaagcttatccaccactatcaagttggctttatccctgggataaacactttgggaggctgaggtgggaggattgcttgagctcaggagttcgagaccagtccggccagggaaaatagtgagatatatcccccaagaagctccccactgcccccccgctcatctctgccaaaaatacaaaaaattagctgggcgtggttgtgcgttcctgaggtcccagctactcagaaggctgaggtgggcggaccccttgaacccaggaggcggaggttgcggggaacggagatggcgccactgcactccggcctggctgacagtgagaccctgtctcaaaaacaaagcaaaaaaaaaaacaacaacaaaaaaaaccaaacaaaaaaaattttatttcagtacatagtaattccttgggtacattttacgtccgttttcttgtcttttcccttgattatccattctgttagcatttccctcctttgactatcaggaaaagcaacagtttatgctaacaatgcatgctaacggtgccaacagtgctggcctgtggaaacactggttttaaaccctatgcagcataatgtcatttgaataacggcaaccagaaacttctcttacagtcttcgaatcttcctttgaaggttgtattttgtaattagggactgaattttttcgtgagtggaggcaattattaatgagcaaagtttggagtctgcctatcaccctaattctgcataaagtcaagacacaccttctaaaagtctttaccgttgctcacaacattccataccatgctgttcagcttaaaaacacactactaacctgctctgtctggtttgaaatgttttcaatttacacacaaatacagatcgccctgaatttgtgaatgtatttctaccttcgttaaaaaagaagactaaaagaatatggaatccctaattcacatttagttcgcctaggaaaactagcagttagtgaaaaactggccacatcacagccgcacagctccagcagcccgggtagcttccccaccctcactttctccagccccgcctccaggacggcctaaccgctttcctcatagctcattgggcgcgcggcaccaccgggcggcaactccagggatccgcccctgggcccgcccctccatcgcccggggctggggttgggcaaccgtccgccctttttctagaccgcgcgcatgcgcactctccttggaccctggagagacgcttagggatcagttttctcctcctttcttcccgcgatcgcgcggctctctggaagccttcccactctattattgccgaggatccccctcctagacactctgagaaggtgccgctccggccttgggtacggcggtacccggatgtggagtcgctctcgcccggctgggactctgtggcggggcggagcgcggcggctggtgcgggggcagagagaagggggcctgagggcccgggcgctcgccggacgccgggaggtaccaccgctgcccacgggggaggaggcggcgccggcgcttgggtgcccgcccccgagcgaggggccggggtggcagaaaggccggcagttaagcttgctccccgccgcccccctcgggctagcctcccccggccccctgcgctcctcgcgctgccggccgggggagagcgtggtttccttgcggccgtcgctgtagcctggccggggagcccggaggaagcgggagagtccccgcccacggccccctcccctctgcccgctctccgccgccgcctccgagcagccgcgggccgccctccactccgagcggggggcgcggcggcgacagctgggcagcggctttgggctccgcggggaccgcgccgccgcccccgtgagttattctcacgtcccccggggctcgctgccgcccccgccgacgcctagagtccggcccgggcccaactccctcacgggccccccggcggcagcggcggcggcggcggcggcagcggcggagcccaccgcccgggccccgatgagtaactcccggaataaccgggtgatggtggaaggggttggcgctcgggtagtgcgcggcccggactggaagtgggggaagcaggacggcggcgagggccatgtgggcaccgtccggagcttcgagagccccgaggaggtggtggtagtgtgggacaacggcacagctgccaactaccgctgctccggggcttacgacctccgcatcctggacagcgcgcccaccggtaagccgcggccacctggccagggcttgcgcgcgcggggggaaggggcgagctgcggtgggcgtcggtgtcgcggggagaggtctgcagtgggacacctggtgggcagcgcccggctggagcgagcggaaaggcaaagcgccaaaggaattctaggttccgaacgggtgaacaaacactttcagaaaagaccctctacccccaagggaaatgatggcagcaccatcaccgggatgctttcaagcctggaagacacaaagcaccgggaagagaacagacacaggtcccccaacccgactcctcctcttgggaaggggtctggagaggcctatctaataagccattgaaattaatcagccaccaagtgataactgtctgaagggaggcttgctttgccatatggtgctcagctgaccgtttataattgccaaggggccttggtacctcggatttgtggagatgccttttttttttttttttttaacctcctgtgacacagaattacttggagttcagtagccaaatgttacttgggactctggaatgatttttcatccaaattgttctattttatatctttatatcaatagagagaaaaacatcctgagctcttgaaccatttctttgtgttaaatactttttccaagtggcagatcggcgtgggggacacctgatgttattttttgttacactaacgtccgtctcagtaaggtgatgtcagaatcttactcattcacccagcagtgagtcagggtccttgattagtgaatc

SEQ ID NO: 7712 - DNA, 6000 bp, Homo sapiens
ctagcaaatattaactttagatatgaagcttttatttgatcatctttatagctgttctcggtgggcaaatacacttaatgtaccttgacatcgcaaagttatttttaaactgcaatgacaacatgaagtcaatgatatcacttaccctctgactagggaatgcaataaaacacattaaagagaaatattgtcattgtacagtgcaataaatttgtatatcatgctgttaagtgttgccgtttatagcaaaatatgaagccctgtaaggacaaagccttgatttgaatccagggatggttgtagctgctgccgaggtttctgatagcatcagaacatctcagcaaaaggacttggcagtgtggaagagttactggccagggcagaaaacaactttttaaatttagactttgctttcacttttacatgttaataaaatagttttggaatcttagccatttgttgaatgctttccttcaaataatcttgtctgagaggactttaaaaagtacataaaatctttctcactttttttttttttttgagtcggagtctggctttgttggccaggctggagtgcagtggtgggatctctgctcaccgcaagctccgcctcccgggttctggccattctcctgcatcagcctcccaagtagctgggactacaggcgcctgccaccacgcctggctaattttttgtatttttagtagagacggggtttcaccatgttagccaggatggtctagatctcctgacctcgtgatccgcccgcctaggcctcccaaagcgctggggttacaggcatgagccacagcgcccagccctttctcgctttttatcaatcttctttcatcaatttaggtaggaccatatcacttagggcaggactattagagtcagtgctgggtactcattcagttgatttaatagaatattttgaaagtttttattaggacaaaagcaatatagtttcattcttggagaaattaaaaaatataagcaagcaaaaagaagaaaataaacaaacaaacaaaaaatcccctctctccatcctatctagccacttgaatatcctattgtaaagctttcaaaaattctggccaggcgcagtggctcatgcctataatcccagcattttgggaggtcaagatggatggattgctggacctcaggagtttgagactggcctgggcaacatggcaaaatcccatctctacaaaaaaaaaaaaaaaaaaaaataataataataataataaagaaaattatccaggcatggtggcacatgcctgtagtcccagctacttgggaggctgaggtgagaggatcacttgagcaccacaggttgacactgctgtgagccatgattatgccactgcactccagcctgggaaacagagtgataccttgtctcaaaaaaaaaaaattatttgtctgctttcacacacacgcatacacacacacacacacattcatatacagttcttttttttttttttgagacggagtttcgctcttgtcacccaggctgaagtgcagtggtgcgatctcagctcactgcaacctctgcctcccgggttcaagcgattctcctgcctcagcctccccagtagctgagattacagtcatgtgccaccatgctcgactaatttttgtagttttagcagagacagggtttcaccatgttcgccaggctggtctcgaactcctgacctctggtgattcacccgcctcacctcccaaagtgttgggattacaggcgtaagcccccacacctggccacatttcttatgtttagtagatatttcagttctgcaaaaatccataataacagctttaagatataatttatataccataaattcataaagtgcaccattcagtggttttagtatattcacacaattggtgatgtgatagtggtgatgcatagcgtgatggttatcatcaccactatctaattccagaacatttttatcactccaaaaagaaaccccatagccaatagcagtcactccccatacaatatgtggtcttttttgtctgacttctttcacctaccataacgttttcaaggttcttccatgttgtaagcatggatcagaacttcatttctttttatgtgtgacagatattccattgtatggatatactacattttgtctatccattcatcagttggggaacattaggttgtattcatttttttattatatgactaacgctgctataaacatttatgtacaagtttttgtgtggatatatattttcagttctcttgagtatgttcttaggattggaattgccagatcacatggtcatgttatgtttaagtttttgaggaattgccaaagtgtctgcaccattttacattcccatcagtaatctgtgagggttccaacttctccacatcctcacaaatacttgttattatctatctttttgattataactatcccagtgtgtgtgaagtagtatctcattgtggttttggtttgcattttcctgatggctaatgatgttgagcgtcttccatggtcatgcttatcgaccatttttatatttgcccactactttttaaaaaatggttgagttgtaagagtttattctggatatgaatttctaattagatatatggtttgcaaatattttcttctatcttgcggattgtcttctactttctttttttttttttttttgagatggattctcagtttcccaggctagagtgcagtggcacaatctcagctcactgcaacttctgcctcctgggttcaagtgattctcctgcctcggcctccctagtagctgggatttcaggtgtgcaccaccatgcccagctaatttttgtatttttagtagaaaatttcatcatgttggccaggctggtcttgaactcctaacctcaggcgatcaacccatcttggcctcccaaagtgctgggattacaggcatgagccactgtgcctggccatctttcgctttcttgagggtgccttggaagcacaaaagttttaaaatttggtaagtttcaatttatctttgtgtgtgtgtgtgtgtgtgttttgagacagatttttgctctgttgcccaggttggagtgtagtgccatgatcttggctcactgcaacctccgcttcccgggttcaagtgattctcctgccttggcctctggagtagctgggattacaggcacatgccaccatgcctggctaagttttgtatttttagtagatacagggtttcaccattttccccaggctagtcttgaactcctgacctcaggtgatccacccacctcggcctcccaaagtactaggattacaggcatgagccaccgtgcccggcccaatttatatttttcttttgttgcttgcgcttttgatatcatagctaagacagcattgctaatccaaagtcatgaagattttctcctgtgtttttcccttagaattttatagttttagctttatagtttagctctctaaatgtaaaatttagagatcttaaatccattttgagttaatttttgcatatagtatgaggtggggatcctactagattattttgggatgtccagttttcccagcagcgtttattaaaaatattattcttttcccattgaatagtcttggcaccctgttgaaaatccagtgaccataaatgtaacggtttatttctgagctctcaattctattccattgatctatgtttatcgttatgtcggtactacactgtcttgattactgtagttttgtattaagttttaaaactaggaagcgtgagtccactgacttcattctttctcagaatcgttttggattttctaggtctcttgcatttccacatgaattttaggatcagcttgtcaatttctgaaaaaaaaaaaagtcgggattttgatccctatcaaaatccattgtgttgaattgtaggttgctttaggaaatattgccatcttcacaatattgtctcctaatccatgaacatgggaggcttttccactcatttaggtcttttaacatttctttcaaagaggttttgcaatttttattgtacaaatattgcattcctctaatttcttcgagggcctatgtgggttctgttttagtagggtgttctgcatataagaccaagcatcagtccggggtcgtggggggagggggtcttctctgttctgaggccatcatggcaggtggcgtacctcactcaatctctgttagcttatttgtaaaattgagcagattaggcatctaaaggatttcctctaaggttcctttccaggttggcaaattacaacttgcattattggctgtcttttaaatatgtacgttccaccactcccagttccctggctcagcctgtggctgcagtgccacagggatcctaggtgcacagtgttgaggagttgacgactcaacacttggctgggaaatcgaaatgtctttgatgtgagttctgtaggtagtggcagtttcctctgctctcaaccaaattcgtttacaagcctcctttactcttaggtcacaggtggcttttctggctttgacctgagcggtgagtatccagagaggagaacgatctaattaatttctgtcctggcgcctggagggttcgaagatcccaggctcccgttcccgccgcctgggtgggagcccgggaacgcctctcccattccccgcccgcgaagtttgcagcgcgcctcgcgcgggagagacgccgtctgctggcgcgcggctgagcgctgtcagttcctgatccggctggtgcccgctccagccgcggcaggttccagagctgagaggccacccccacgccgcgggcttccagcgcgtggagcaaggggagcggccccggcgccgcccatatccccggctgcgctagtcctggcgctgcaggtccgggaggcgcaggcggagagcggcggtgcccccgagcccctctgcggacggctcaggcgggaggaccccgcgcggctggatggcggcggccgcgcggcctcggggtcgggcactggggccagtactgccgccgacgccgctgctcctgctggtactgcgggtgctgccagcctgcggggcgaccgctcgggatcccggggccgcggccgggctcagccttcacccgacttacttcaacctggccgaggcggcgaggatttgggccaccgccacctgcggggagaggggacccggcgaggggaggccccagcccgagctctactgcaagttggtcgggggccccaccgccccaggcagcggccacaccatccaggtgagggcctcggagagagccggggtgggcgcgccttttccttcccgcgccggccagacacccggagaagggatcgggccctttcctcacgcgcgctagtggctccgggcgactgggaagggcagcccccatccccgcgcgcgagggcccacgacccaggagcgatctcgtggaagcaccgcaccggcaccaccggcccgaggcgaggagggggagcacgcgaggtgacatgaggctgtggtcaggttcgggctggtggaggggaaagtgtgaggctgcgctctaagagatgcaggcgcctcggcccttcccgcctccgtcacccacggagcgtcccgccaggcttgagtcctcgagggttcaggggcgcctcctgccccacctcccgggccttattcggagaagtcggtggcaattaccttctgtggtgtattttaagagagaatttttaggttataacagcggtatcactctaatgttactgaaaagattcacttcactgcactgcctgaagtgccaccatccagtcattgggggcgaatgagaccttaggcggacagagatagaaaggctctcagagatccgagcctcaccgcgaacacccggggcaaacgacattgcggtgcatgttaagcagcatcttgcagtgcctggcccttactcacaggtctcagccaggcaagagtgcagtggtgcgatcacggctcacggcagcctcgaactcctgggct

SEQ ID NO: 7713 - DNA, 6000 bp, Homo sapiens
tgtctcaaaatggggtcactcctatcaagtagtattgaggccacagtgaagttgtttactcctcaaagtgctaaatgtgtactcctcaaagtgctaaacgtgtgtgtgtaatggcttgaggtgataacacctgctcttgcctggtaccacctgagacctgaaatgaactgacagaaattgaaaagtggctgagttaatgacagtggacatatctgagaggatcctgaaagcagcaagcacctggtcttagcctagatgccttaagaggctctgcccatgagaactgtgaggtcatctcccaacttggcaacggtcactgcgggctctgcctgagagaagcagaagtggtgaccccccacccccacacctgaccaacatctgaaggacttctgtacccgctggacatgtctgtcagtgcgttggtctcccaagcccatcactgtggttcattacccacctctgatgactgcctatgtgttaaatattaattacataattgatggtgtgtgaagacctcacaataaaccatgaattcaaacatacataattggctactgagtcattgtgaaacctctcagctttggtcagagttagcaaacctaggccataggaaattaacataacagctctgtatcttgattcgggtggtagttacaggaatcaactcgtggtaaaatggcatagagctacacacacacattgcaccaatgtcaatttcctggttttgatattatactacagttatataaggtgtaatcattgggggaaactgcaactattagtcactgttacctgccccacctcccacaaatgcctaaaatgtactgctctgatcaccacaaggctttgatggcatcctgactgggatgctacctccatctccccagggctgccttcacctcgctgacatgacatgatcaccaccaaatggatgaatgtaccaaggttcctgcctgcatccaatttgcgttctcttgttcctgggcctcacaacagtgagtggtcatgacagcgatgatgtctacgggcaggggagctatgagacgaagaagtgcatgcatgttcctgaggctgcagccacaagacagagctgccaggcctccgtatggcaaagcaaacacaaggagtaaaaaatcataaaataatggtgctttgcattctgcatgattccacatacttcgtatcactggacatctgtgtgggctagtttgtgtctgtccctctctcatccattaccctcttctgttccttcccacaagtgggtgcttgacacacaattctgtataaacaacctctactcttctcccttccctgcctaccatgtgggtcagttgttcctggacagtttaccctgcttcaggcaacccccccacatctctccattaaaccaaatccaccctaggtgccattcatttggtttctaggtagtcaggaacaaacaatttggccttattcataaactgaaagaatattagcatcatttagataacaaccattttaaagggggcctgatagaaataatgccctgaattaataagtctactccaaggagcagctcccctggtgtgcttccgggagtcgggggctgtggtgaggggatgtcagggcagataggctatttcaggtaggattgttcaatttcaatgtgtctccattacttactcttctaggggttaatttcttctatggtaagatcatagaaatcatgaaaaatccttacaaatccataaaataatgaaacaaatcttgaatcctaccattatccagcccaaagacaatgtcccttaccccacaggcataccacgtgcattactggaggcaaccaatgagtcctggggcagagccaaagaaaaacaagattaacactgggaaagaaagcattcttactctggattccctggtctatgccctttcaactattccttcttggcaaatcttgactttgttgtaaagaatctagttttttcctgctctcaaatatgcttacccttttctaccccattttctgttctgttagcaggtacagtgaagacacattttggaatgaataggagtagacttggattgttgaagggtaaatgtgcttggttataaaaacagttgtgaaaagtgcatttgattacacggtagaattatgtgcaaacagcacacaatttttcatttgtcttacaggtagttttcattgcaaagaacttgttgcaagcagattaaaaaggtactattttcctgcgctatttaatggtacacagttatctttttttttaattgctttattgaggtaattgcacataccataaaatccacatttcaagtgcacagttcaggtagttttcgtaaatctacaaccattaccacaatccaattttagaacatttatatcactgcaaagagatctcttgtgcccctttgcagtcattccccatatctacccccagctctagaccactgattatctgtatcgatttgccttttctagatatcttacatagtcaatgtgtcacttaatgacaggggtatgttttgggaaatgcattgttaggcaattctgtcattgtgagaatatcatacagtatactcacaaacctagatggtatagcctactacacacctaggctacatggtacagcttattgctcctaggctacagacctgtacagcatgggactgtactgaataccgcaggcaattgttaacacaatggtatttgtgtatctaaacacagaaaaggtaacccattgcccaacgacattatgaaggctacctcacttggtgatagtaacttttcagctgcatataatcttatgggaccaccattgtacaggtgacccatcattgaccggggcatggctgtaaatagatcctacaatacaggctcttacacatctagcttcttccacttagcttatcgtttttgaggttcctctatgttgtatcttctatgactacttcgttccttttactgagtagtagtccactgtatggcatatactgcattttatccacgcagcagtttctggacatttggactgtttctacttcttggctatcatgaataacactgttattaatattcatgtacaagttactgtatgaatttatcttcagttctctcaggcatacgcctaggagtggaattgttgggtgatagaatacttcatgtgtaactttttaaaaaacctggaaaactgttttccaaagtggctgcaccattttacatttccataggcaacgtatgagggttctaatttctccatctcttcaccaacactgctattgtctgtctgtcttttgtactacagccagtgtagtgggtgtcaagaacttccttgttgtgcttctaatttgcatttccctattaactaatgatgttgaacacctttttatgtaattgttgatcatttaaatatctttggtaaaacgtctattcaattgttttgcccatttaaaattggactattagtcttattactgagttgtaagagttcttcatacattctggctacaagtcctttaacagatatatgatttgccaatcttttctcccaagataagagtattttttaacgatgacaactttattccaaagtgaagtttccttgtggaacagtaacaggctagtcatgattgactttgtttcaaaatattatataagtacttttaaaatagtaacttttaacttttattttagaatacttggaagatgtagacaagcaaaaacaggatactaaaattccagagataatcttcaggtttttttttttttttttcggacagccttttggttatgtgagaggtaatataaatttaaaagtgggaccacttaaatattaagtaatctcttattgcagctcttggttggcaagcaataagacacaaacctctgaattatttaagtagaaaattaatttattaaaagaatggttggttatgcctcgcgtgagtgacagagccagggttttgtcttctatcttcagggcagggtacagctgggtattggaattgtaccaagcagtgtttcccaagggggcacagagggagggcccctctccgggcactgtgcgggagccacttccccaaacagtccccgttctgcaagggccccggcgttgctgcccccgagacccgggtgcctgccccggcggtgcgggtcgcgggcctccgctctcgccgtcctccctcagtcccgggcctcctgcatcgcggtcgccaggcgcaggctcagcgcggctgacagcgctccagctcccgcgctcgcggccgcctcaggcagccgaccgggttggggcggccccgcgctcggcccgggagccgatccgctgtgagggctcctccatctcctcccaccccgtgacctgctcgacgcgcaacagcccgagttgtctttaacttgctgcggcagcctctttgtcccgacccagggtcgggggcacctctcggcctggcccggccctgcccgtagccgtgtgagcgggggccgggactgggcggtcggtccgggaggggcgccgcgcccgaccccggagtcccgagcccgaggggagcgtcgcggccccgcggtgggctcgccgcagcggagggggcgcgcatccgggtgagcgccggcgcccccgcctcccccgcgcagccgcacgggccgccgccgccgctgccgccgagcacgcagcgcagggaggaccgcgcccgagcgcctgcgggcgccctgcggcgcccgccgcgcgacgagccccaagtgagcgggcaggcggcgcgcatgcggggcggcccggagtagcgccgcccgagcccgcgagcggggcgcccggagtagccgccgacccgagccgggcgcggaggcgggggcgggcgcggcggagcggggcccggccggacccgcccgcccgccgggggagccgccggcagtggccgaggagcgcgcggcggacggcggcccgagagtagcgcgctggccgcgggaccggccgcgaccgccgcggccggcccggaggacgcctgccgccgccgccgccgcgcgcctagcgaggtgagtgtatcgcccgcggctgggcagtcccggagccgcagcgctgcgcgcgggtcggaggtggagaaagaggccccgccgcggccgcgtccccggtccctttgtggccggcgctgcctggggccggggcgcgggcacgctcggcgcgggttcgggtctgggaccccggtgccgttggacacgcggcgtctctggttggcagctttggcgagcagcgagtttccgtcctagtttgacattgagttagaaccgtttttctttagaagacggaagtttgttttattgacaaaaataaagctaaatatggcttctgggttcggccgtgtggtacttgcaaccgcggtgccagcctgaccctcgcggcgccacgggggaggggaagacacgccggcagcgggggagggggcttcccggcccgctgcccccgaggaggacccggacctaaattagcaaatgtttgtggttgggaagtagcgggctttaggtaatgtagtagcttttccgcttttcctggaagaatgaatgaatgagatgtcatttactcatccataatcaatacgttgcccatttaagcatttaccaggaattgggatgatttgcattgtcattgcttctcttatctggtcagccttgctagatgaggttcccttactccccagatttgtgaccttgtcctcattctcaaagccactgagctaaccaacccgtctaccaaactcacttggcatttttttggtcaagtgggcaataggcaaagtagtctttctgaactgtttctggagggcagagaatgtcactttgatcatatcttatgtttaatacattgctttataatcgtgtcaagaacgctgagagttaggaggtcttgtcatttcacagatgaaatagtgaaggccctaagaagttgcaacttttcaggtcacaatctgagcagcagagttgggattcaaacctagaccttgttagtccagtcctcttta

SEQ ID NO: 7714 - DNA, 6000 bp, Homo sapiens
tcctcaggagcatgccattgcttcaaccctgagcaggctgcttaggaagcagtgatttaaattccactggccaagacacaagctgaaaaagactgaggtgcttgccatttcctttcatctggagatgcaggatgcaaatggcatttaattaaagtcataaatctagtttttgtttagttggttttgctgttgctaaatctaatctgattttgcttgcttactgaatgctttgaccactaagcaaaaattgtaaaataaatgaagatagtttccagcccctctcccaccatcccctctcccttcttatagctgtctgcaccccagcactgccccattacacccctgagaagcctgtgtgcagacctgagtgagcccaggaatcacctaaggtgttattcaaaatacagattctgttatgggggtggggctgagagcctgcatttctaacaagctcccaggtgaagctgatgctgaaccctcattcacctggagtagcaagggcataaaatgtgtgcagaaagagcatagacagaaagatctaggtcagggtttctcaatcctggctgaacattaccattacctagggagcttttaaaaattccagtgcccgggttacaccaattaagtcagaatctctggggaagggacccggtcatcagcattttttaaagtccctagataaagatgactgtgtgctgtcaagattgaggatctcagttctcagggcttcaaggaaggagtgttcacatccactgaacactgaagctgaaagggaaggggaaggcattctagaaacaaggctgtaactgaactaaaaggaacccctgtctcctggtaggtttcagctcttgtcaatagaccagcaggaggcatatgttgggaatggtaggctttgcaaaactctgtaattccaacaccccatggaattccagactggtctagtgtggccacacacatccattgatggtcttctttcacctagaggtttgttttgctctaaccctggtcttccccaacacccacagatcaccaatgaggtggcagcatcaccacctactacctgtcagtcttccaccaagtcaggataaaagcatgacttagggtcttcttgtacagaaaatgtgtgctgaaagccagttttaaaggagtgtaggtttactgcctgcgatgaccctaaaacacattttgccaggatgagaaacaccacgtaaggcacagaggatcggcacacccaggtgctccactaggagaactagggcccatcagctggtgcttaagaagacctgagattcaacaccagcccattaagcattttccctaccctcaccaaacaccagcctcctcccattccaaacacccccattctgactgcaagttatccttttccccaccaggaatacctttaatagtcatctgactccgagctttacctgaataagaagctcttaggacagcatctgatggtatctgtcccgatttctaccccctcccagggacagcccttcctcttgactccaaagccatgttgttcttagaaaataaacatctgtgcaggaaaaggggatcaaggttctgttgaaaaggaagaaggtagctcaagggcctaaaggacatgccacactgagcccttacagaggtcaagtgcaggagaagtgcatcctcaccaaaaggaaggagaaggtctacataccagcccagcttgcacaaaggaagacccagcttcacaccatggcacagcacctgaaaggagacgtgtgtttatacacattgaatccaaagacaaaaagcttaagctacataaggcccagctctagggagaagaattaaggactcacatgcccacagtcattggatgagggagagaaccttagggaagagtccagggcccaacacaaagaggttgggaatgctgttgagcaaagaaggctgagacagtcttagctcctgtgtcaactcactgtgtggcccatgaagcaggtaccctcacatcactgaccctgcaaaacaagaagaagagcaccatctatagcttacaccccatcatgagattgattgaggaaataaattcagtttgaggaaggaaagtgctttgtaacatataaaataccatgtgcatggtgacttcaaacagtacagaatttgtaaagttcatagtctgcaatcttcagtgaatacttcactcattcatcaaatatttattgagcacctattgtgtacaagatgctatacttcaagaaaacaaggaaattgccgataaggggctcctggctgtctcctagagatgagacatatacataaacagcaatgacagatagctgaggcctggaaaaggaaagataaagagctctcaagcagttgctgctgctcccagcctccatttaaggtgtttactcagagatcttccagcccaaggtcaacagagagaactgcccagagctcagtgggaaagagcaaggatggctcagactctgcgggctggcaagataagcaaatcagctggtcagaatattatgtgcccatgacattccaacatggcaaggttaacttcttagaacatgcagaatagcatttaaactccttacccatctctctactgcctgaattcacttttgattggggttcttggacaatggccctgaagatgctcagacacacccacatgaatacatcactcacagcataagcatgaacaattaaaatcgctaatgtttattagctacttaatatgtgctaggcactgcactaagcaacttgcatgcattatttcttctgaaacaatcttatgaggtaggcactattattgtcctcacctcacagatgggatgagaaaaccaagacacagagaggttgtggggcttccccaaggatgcacagctaagtaggtgggtggtagggtttggctctgtgtccccacccaaatatcgtttggaattttaatcctcatattccccatgtgtcaaagtcggacccagtaggaggtgactggatcatgggggcagcttccctatgctgttctcatgatagtgagttttcacaaggtctgatagttttataagtgtttggcaagttcctccttctcacacactctctctctcctgctgctatgtgacaaggtccaagtttgcttccccttcttctgccatgactgtaagtttcctcaggtctccccagcattgtggaaatgtgagtcaattaaacctctttcctttataaattacccagtctttggcagtttttttttgttgttgttttttgagacagtctcactctgtcgcccaggctggagtgcagtagcgcaatctcggctcactgcaagctccgcctcccaggtccacacaattctcctgcctcagcctcccgagtagctgggactacaggcgcccgccaccatgcccagctaattttttgtatttttagtagagatggggtttcaccgtggtcttgatctcctgacctcgtgatccgcccgcctcagcctcccaaagtgctgggattacaggtgtgagccactgcgcctggccagcagtttttataacagtatgaaaacagactaatacagtaaattggtaccaagatagtgggacagtgctataaagatacttgaaaatgtggaagcaagtagggaactgggtaacaggcagaggttggaacagtttggagagctcggaggaagatagatagaaagatgtgggaaagtttggaacttcctaaagacttgctgaatgattttgaccaaaatgctgatagtgatatgaacagtgaagtccaggcagaggtggtctcaaatggagatgaggaacttgttgggaactggagtaaaggtcactcttgctatgctttagcaaagagactggtggcattttgccacctccctagagatctgtggaactttgaacttgagagagacgatttaggatatctggcagaagaaatttctaagcagcaaagcattcaagaggtgacctcggtgctcttaaaaggattcaattttatgcatttacagagagattgtttgaaattggaacttatgtttaaaagagaagtagagcataaaagttgggaaaatttgcagcctgacgatgtgatggaaagaaaaactcattttctggggagaaattcaagctggctgcagaaatttgtctaaccagaagccaaatgttaatcgccaagacaatggggaagattactccagggcatgtcagagaactttgcagcaaccctaccatcctgggcccagaggcctaggaggaaaaacaatgggctggtccagggccccactactgccctatgcagcctcgggacttggtaccctgcatcccagccatggctaaaaggggccagtgtacagttcaggccattgcttcagagggtgcaagcctcaacccatggcggcttccatgtggtgttgagcctgcaggtgcacagaagtcaagaattgaggtttgggaacctccacttagatttcagaggatgtatgaaacgccaggatgtccaggcaaaagtttgctgcaggggtagagacctcatagagaacctctgctagggcagtgcagaagggaaatgtgaagttggagcccccacacagagtccccactggaggactgcctagtggagctgtgagaagaggaccaccgtactccagaccccagaatggtaaatccactgtcagcttgcactctgcacctggaagagccacagacactcaacaccagcctgcgaaagcagcaggaggagagctataccctgcaaagccacagaagcagagctgcctgagtctgtgggagcccacctcttgcatcagcatgacctggatatgagacatggagtcaaaggagattatttttgagatttaagatttaatgactgcaccactggattttggacttgcgtggggcctgtagccctttgttttggccaatttctcccatttgaaatgggagcatttatccaatgcctcctgcacccccactgtatcttggaagtaactaacttgcttttttttttttttttttttttgagacacagtttgctctgtcacccaggctggagtacattggcactatcttggctcactgcaacctccacctcccaggttcaagagattcttctgtctcagcctcccagtagctaggactacaagtgtgtgccaccacaccctgctaatttttgtatttttagtagagacagggtttcaccacattggccaggctggtctcgaacttctgacgtcaagtgatccacccgactcggcctctcaaagtgctgggattacaggcgtgggccgccgcacccggccatttgcttttgattttactggctcataggtggaagggacttgccttgcctcagatgaaactttggactttgactttcaagttaatactggaataagttaagactttgggggactgttgctaaggcacaattttgttttgaaatgtataaagaacataatatctgggaggggccaggggcagaatgatatggtttggctctgtgtccacacctgaatatcatctcaaattgtaatcccagtaatccccatatgttgagggcaggacccagggcaaggtgactggatcatgggagcggtttcccccatgctgttctcgtgatagtgagtgaattctcacaagatctgatggttttataagtgtttggcaagttcctgctccacaccatctctctcttctgccgccatttgagaaggtccaagtttgcttccccttcgccttccaccatgactgtaagtttcctgaggcctccccagcaatgtggaagtgtgagtcaattaaatttcttttttttttttttctaataaatcacccactctcaggtagttctttatagcagtatgagaatggactattgcagtgggggagccaggatttgaatccaggtattctgtctccactgtgccaccactgtctaataacactaaaattaactacctagagccacctcggggcagcttgtgtatataagtatgtgtgcatgtgt

SEQ ID NO: 7715 - DNA, 6000 bp, Homo sapiens
attttcacctcaagagtatgtaattgggcagcacccacactcaggaattctataagacattctcatgcttctctgtcccctcaccctcaacaaagagcatggcaaggactgcaagtctggaatacaacattcctttgcagtgtgttctgagcccacggatgttttggtttggcaaaccttcagacaaaaagacagcagatcgatctgggtgcccagcgagccccattcgcaatggtgatgccaggccgtcccacctcctcttcccggcccaattatcaaatcgagctcaacttcctaaccttggggccagcatcccctcatcttttacagtaagagaacaatccgatgcatgtggtttatccttagcaggggcctagggaaacgcggccatgccagtccccacccctcatttttccaacactttactctccttttcatctgagcctaaagagattgagatgattctcctcctacctctttccctattgttcctcactgggaaatgattttttcttttaatcttgaagaaacaaaaggcgcaagcctgggagggaggatgatgccccgggtggtgtagtggatgggatttggcgctctcaccaccatggcccggatttgattcccggtcagggaagcctttcttcttgccaggcgtggtggctcatgcctgtaatcccagcactttgggaggctgaggcagatggatcacttgaggtcaggagtctgagaccagcctggccaacatggtgaaaccctgtctctgctaaaaatacaaaattagctgggcatggtggtgcatgcctgtaatcttagctactcaggaggctgaagcaggagaatcgcttgaacccaggaggtggaggttgcggtgagctgagatcacaccactgcactccagcctgggcaaaagagcaagactctgtctaaaaaaaaaagaagaagaagaagaaaaagaaacaaaagctggcttctcggtgttcaaaaaaaataaaaatgaaaatttttaaaagctcaaggtattgctagacaatatggctccttgcacagacacactagcaccccttttctcaagacattttagtaccatcttcaagaactttgttgcaataaacacacaaatttctaggacattaatagtgacccccttagacgtggtgcatttgtgcagtgcacaacctgcacacccttacgcattggcccatgacaccagagactacattatgagccttacactggtctgattttaatttaaaagctggaaaggtgacagatgggcatctgatgaaagttgtaggtagggatggagattacatgaaccctctgctttgtgcaggaggaacatcatctctggatgctcccagctattgatccccgtttactcctaaaatggatggaataatttcaggactgcatttaaggggagctaaaaacttagggacctcagtgcctcctttcatcacccgtcattgtgttcccccagcaagggcaggcagtggaggtttgagtgagacttttgcactctctgcgctgccttgatccttggcttcactctagggaatgcctacatcaaagggtcccctccaagtgtcgttctgggagttttggctctcgtctggtacctttttatctgactgtttaccaaaccaaagaactcagtaggctcagaactcactgcaaaggaacattctgttccagacttgcagtccttgccactctcttcgtgggggggtgaggggacagaaaagcatgagaatgtcttgtagaagtcctcagtgagggcactgcccaattacataatcttgaggtgccaattatttataacattaaactgcctatgcgtagatcaatatcaagcagcaatcaaatgaaacagtgttataatttctgattaaaacaacacaaatttagaaataccaacaaatgcaaggtattgtagaaaaaatatgaaaattgtgttttatccatagttgcattctcctttctccattttgtcacctagttcttatgtcctcttacgtatatttgatgaactgcctcaaaatctttctggaaagagaggtccattaggaatggagagagctattggatcctgacttcatcatccggtaccttccggcccagatgggactgtgcatcgtaagatatattctaaaaaataagacagtaccagaactgttgcagagctaggcggcatgatttcatggccagtgaggaatagagatgtaaactgctttaagtgcacagaagcccactgcgaaatccaaatagatttgggcagagtatgaggagggggaggagagagaaaacattctaggggcagaaactccaagaagaaagtcgaagaggagagcagctttatgtaggttcatttgtgattgttccaggcagagagatggaaggtgcattcacttggtatgggaacagagaggggcacccaaagaggagatgcaagggaaagaccaaggaaaggcaatgttagggcatactcagcaaatgactctctggaaataataaaggagctactgtagaaagaacagagaaaagttcattgtattgtgcaattaggctgttaaaagcaccgagaacacatgtatgcacgcaatgagtgcccagttgtctacagcaacagggtggcagcggaccctggcatctcagaatcctgcagtatgagaatttggcaagccctgcatcagaaagctacctagttcacagttcttgaatgaagcaaatggtttcctctgtactcataactgcaccccttctgatgtcaaagcagggagaagtttgtccccttattcaagccaggaggaaggttccatttggaaacccccaaggtaaaccagtgctgattgagaggggctgacatcagaatgggggcacctctacatgttcggcacggtgctttgaagatgtcatccctcatcacaactttataaaggaagaaaagttaccccactttacactgaggaatctgaggctcagaaactgtgagtaacatgcctaaggtcatacagcttgtcagagaaaagctagtattcaaactcaggtttatctgacttggaattccatgtgccttgtgctgccttgtgcatacaatatggcaaggctgtaatttgtggccccccacttaaggtgtggctttacagggaccaggagaaaggccagggagggagggtgggtacagaaagaggtggtttttccaaggaggtctgagattcactacacaccttcagccctgaccagtgcgactgaggcagaaggctccatgggtgtcatgtggaggcagcttcaggatgaggtccataaatatgcatcatggccaagttgagtgaaggaattaatgaaaagcaaacatacaggcagaagttggaaatattggacagcactggagtggctaaaagtacaaactttgagtcagactttgagcaagttatttaaactctgagcctcagattgctcatctacaaaatggggacaatagtataatataggaattttgcaaatgctctaccatttgtggcagttattattctcattaccatcattagcatgattatttctatcagggacagtggtccatttgcataaggaagtcatggagacactagtatgattcctttcattcccaaagcaggccactcacactgtctcctgaagattcatttttctccttcagggaaacccgaggagcttattttctccttattttaccagggaaaaaatgttggaaggagatttgcctgaacctggaaactcttattatgaacctagacctatacacaccctacctcagctgctcgggaggcacttggaggaaggatgtcccaagccggcaagaaccctgtggtctggcgggtgtccagcgggtggagccagagagctcccagccatgggccacctagctgaaggctgataagtactatctgcacatccaagcaggcaggagacccagataaaagacctatgacatctgcatggctggctgtgggattacatatatatattatatatatatttaaaagtatatgtatatatgtatatatattacatatatacacacatatatatctacacatatgtaatatatgtatatatgtatatttattatatgtatatatctacatatatacatgtatgtatgtaatatagatgtatatatgttacatatatacacacatatacatatatacacatatatttttttaaaattctgcactcataaaagtagatttgagttagatttttgccataacagaacaagccacaaaattgaaatttaaaaagaagggggaaggaggagatattttaattcagttttagatttccctgctatagaatgtttgcttcctgacttttaaagaggcagcagagtatgtccaagaattctcacctgggaagacagacattccagggaaacactgatatttttgttttctcctcactgggaaaaaggcagctggccttcagaaaacaacttgcatgtaccttatcttccccaccctcccaacagcccctcaggcccttgctggagtcttacatctgtgtagaagttgtgccaagtctaagaaaatttcaccccaggagcagtcgcttagcttccgagtccacacagcagcaacctgccccatggtttttagtttgacaccgtgttgatccttttcagttgtaaatctttccaaaaatatgagtaggggccagaggaaacaggagaagaaaaagatgcattttggtaggattattgctggtcaaagaccttggaatgctgtggaaactgtggcaaagcagttggtactctgtcaagaacagagagagagacatcgggtactgaagccaggggaccagttccttggtgttgctttggcattgatgcctgaagtgggaggagaaagccgagcccacaaacacacagagcagagtggggctctgagtatataactgttaggtgcctccctccagcaccatctcctgagaagcactctcccttgtcgtggaggtgggcaaatctttatcagccactgccttctgctgccaggaagccagctagagtggtgtaagtactcatccttatttctattcatttccaactattcatcatttggggcttgtcttcacagttctaagttttgctctttttcttaatgaagaaaatgttttatatcaccggaattgatcagaagtagcaaaatcagagttctggtagactagaaagcaatttaccaaagccacaggcttcttcctggaagctcaaaggcatgcctttattcgtgatttctgaagcaaggtgcatgcagcacctgagctgatgtggaagagggtttgcagggaggtgtccacccaatgtgctcaatgattctgggttaatcaacactattaggagtttcaggttgtgttcttgaaataataatttgggctgtgttcttgaaataagttcgaggcgagtgtctacaagactcaaaagaaaaaagtgggccactgggaatggccctttccagtgatggatttatggactcctctgtgtgtgctgtcatgctgaagggaatgttcttgtgcacccatcgggagaacaagtcagtcacaactgaagccacgaatttggcagcttccttgcagctgcactctctggagtctggaatcaagacttctgggagtagtgttttccaaggagggaagtgttttaaccaggacacaggaatatctgacagcattttctttgtttccaattacagctttaaagaaaactgggcatctcctgctacttaaaatcaaaaactacctaaaataaagattatagtaagtaccaaataagtgtcaatgctgaaagtctctttattatgctagaccatgagtgtttaaatgctttcttctatatccatatccaacacttcatattatttttaaaagtaatagctgaagcatggaaaattgaagacttcaggtctctccaattgcacaaatttctaatacatgctggcaatagaatatattttatttcgtgtaata

SEQ ID NO: 7716 - DNA, 6000 bp, Homo sapiens; identical to SEQ ID NO: 2004

SEQ ID NO: 7717 - DNA, 6000 bp, Homo sapiens
ctgccacaattttttcatgaggcctggatccctgccttaatctttttgtgttcatccctgaaaactgtagtcccactgatggataaacctcagctccaaaagctggggccttgatgttcacaaaaataaggcccacacagctgattgccgatcctcatactctgtgaacgtcctaacatttgtctcatgcttggacagaacttggagggtcagcaaggatgatgagacatgtctccaccctgggagttgctaaattctgtgttatttagaaacctgaattccagccatctctgttttcatgggctggtctaattccaggtggcagcaccaccctggccatgcttccagtaaatatccatacctccctgatgaatcttgatacatgtcatcagaatctctaaaggtgccaaagttgtatgatcttgacagtgaattcaagctctgagttgtctttcccttttccccccatccttcttagggctcagtgtggtacacactagacactaataaatggccacagacaagaaacgaatggttatcttgagagccacacactctaatcttgagtttgtaaaaggtcactgaaagcatacatgtgtcatcagaaaagtggggatactactacttaattcttgtaggtattacaaagattagctttgagcagtgtggtacaccaattggaagggacataaacgtttctataatgtcagtaatactatggtaaaatcaaatctatgtcagagattgcctaagggtagcaccttttcctgtgatccagcaattaaagctattcttttcttcttttttcaaatatactttattttttagagtagttttagattcacatcaaaattgagtaaaaggtacagagaggaaaaatatgttttgatggtccctgccacatgcatagcctcccccatcatcaacatttcccatcagaatggtatattttttcacaattgatgaagctatattttcttctcattcacagttttaaaatggcagtcatgagagtcagtttactatttcaagtcttttatgaaatagttttccagcacgatgagaataaggagggacgtaactgtctttaaaaaattgtaaaattttacacaaatgagtgtgatagcgcacaactggagttcctgctacttgggatgcggaggtgggagggttgcttgagcccaggagttcatgtccagcctgggcaacacagcgaggtcctggctataaaaaaaatgtaaagtttctacaaacccatcatacctcatgtgaaaagcttgagttaaatatgtttcataattcaaatttttttaaattttatgaaatatggtacatatattgcatattacacaacacgtgttagtagcctgaaacacacattaatattttttgtaattgaacatataaataaccatgctaagattattaaagacccaaaatgttcttgtttatattaatttttactgccaaataaatttatgccaaacatacaaattaattttcagtttgcaaagccttttggatttctgaaattgtgtatcagggattgtatatccatattctgaagaaaaaatagtttattttgggtctctccatataggaggatcagggtgtaagtcagccagagagacaaggaaaattttggatctataggagaaagaactttcaaacagcaaaagtcacccaaaaatggaataccaacttctaggtaagtcatgaattcctagtcgctgtgctcaaacacaggtgaattatacagttgccttttattctgtagaagttgttatatatttatcatttatatttatcattatggtcctttctctaattccaacatacaaaaagctaaaagagaacattctctttgattgaacaaaaatagtaacacttcaaacaaatttgaaagttaaaatcaaaagtcaagctttcgataaagaaagaatagactgtaagcagaggtcttgtctgtcttggttgctactaatttgatatccagttttcagacatgcctgtgatacattaggcactcaataaacagttgggaataattttttttttttttttttgagacggagtcttgctctgtcacccaagctggagtgtgatagcagatctcggctcactgcaacctctgcctcctgggttcaagcaattcttctgccccagcctcctgagtagctgagattacaggcatccgtcatcatgcccggctaatttttgtatttttttagagacagggtttcattatgttggccaggctgatcttgaactcctgacctcaggtgatttgcccacctcagcctcccaaagtgctgggattacaggtgtgagccaccgcgcccggcctccagttgggaataaattaatggaagactgtgctttgtcagtataaccatatttaaaatttataagtaaactttacatttggaattggaaaattcagtgatgtaaatcaaaacatgttttcctcctgaagtttctattttgaataggactaatttttctaatccaattttattgcttaaatactgtttcattacttttgattcagtaaaggaatacttggtataagtattggctcagctttgtaaaaaatacaataaagaacatgctaattgtgttgtgaaaaaaatatatgaatttacagaatgtttcagtttttattcttacttttaatgattggttcaaatttctttggtaattttgacagggcagtttggaaatgtattgttcagtttctatttttttcacaaggatctttcatgctttttgggttgcatgtcagcattttacttaggctttgaaattctgtgtctgaaaaaagatgaaatataataatccctttccctaaaatgtctaagatcacatggccgaagctgtcatgttggctctcagtttatcagtagaccaaagaaataataatcagagcatatcaaaatttcaggtaagaaaatttttgagtaagatgattttaaaaaatcaactttgacctaggctttgagacaacagccaattcacttctttattggatgactgaaaaacagcctcctccccttgccgccttagagtggaaaaaatggccagctatcagagttctctcaaacacatgtcagccaacaagactttcagatttctttttggttataaatcctgctcagaacaaagatcctttattggcgactctgagaaggtaatgagaggtatccatgctgtctgtcatgctaacaatccaggtgtgctctgctttttctgttaaggtttagattgaggcattcaaagaattgttcataatacatggtgaagaaatattctttgcaaaataaaaatctgactttcacatggtatatttagctatagaacaatgtgttgtctcatttttatgttactattccttttgattttaaattttaaaattttctcccaaattttgtggctgagtcatgtaactgcttggccggttagagatggtgagggtgagactccagtgacaagaataatcttccactctttatgccattgatgtaatgtgtggatgccatcaatagtaatggagtttcacttccactgtggctatgtggctctactgccaaatgaaatgtttttgcagaataaaattgtagtaatattttaaaaatatacaattaatatatattattggtttaattatattcttctgattttcaaatgaatcaaaaaatcaatcaaaaagtctttcaaaagtcatttttaatattattgacaccttcaacccatgttggtcccttgtaccccatggctgtttgctttgcttcaagaagagtaaatctttatgtttttctttgtgtttcactttttaaattgtggtaaaatacatataacacaaagttcattatcttaatcattttaagtatacagttaagagtattaaatacattcacaatattctgcaaccatcactgccacccatttccagatctctttttatcatcccaaactgaaattgtgtattcattaaacaataactccccatttccgcctcctcccagcccctggcaaccaacattctactttctgtctctatgattttgactattctaggtatgttatataagtgaaatttacagtatttgtcttttttgtgatgacttatttcaattagcacaatgtcctcaaggttcatctgtgttgtagcaaatcatcgtattttaaactcctctttagaacaattttttttcccagtttttcaattccttgacagctttccatgttctttatattctacagcttgagggtaaaacttacaagctgaaggtattgaatacatttataagagaaatttcaaagattaaactttaaaaatattcagaatccaaaagtgtcatatacaaagagaataggaatttttttttattatggaactttctgcactacaaacatacctggcacacttttgaaacagtattctcacttgttgagtgaataaaccaatacaagaattgatcattttacaatttaagacaaactagattttttgaccaaaataaaaaaaccctcttcttaaagattttcaatattccatcactcctttgacattattgcctaggaaattgattctaatagtttttaatgagtgtgaattgcttgagcaactgaccaaagagacttccagacaccaacccagggactgaaaaggtgaagtgtccctaaggtcatgggtacctaagaggtggtgccaacaaggggagagaggcttttgtgcttgagtagaaagcaagcaatgatacatttctatctcagaacgtttttctggggtcggtcctaaaataaaaggtgagttcctgaatgatgggactaaagaggagagacggaacaataatgtaaggttttcagagggagtagtcacaaaagctttcagaggaagtactggttttcttgcgtctttctgcagttaacatttcatttcctcctctaaggtggatcctgttttagtgaataattagtatttagtttaatccacacttgtactgatgcatcatagttgacttccaccagtgttttaattgtttcatggttgcagatataaagggcaatgaacaaattgaaaaatattcttggagagaagcttgtgatactggcagctcaagaatggacagaaagcatggaaaatacatattgaacgttgagcactctgaaaaccagccggtgagtgtccttgctccattttgatagtttgcctatattacagtttcattttcagcatttaaaagcagtttaatctctttattactatctagccaacatcataattttgcattcttctccaaaataaagagcaaccctgtatcaatttttgtgctgtaactttcatgttttattttgctatgttatatatttaggtattaatttaaatatatatagctataaagtattagaaatgtttctatggccataggatatacaaatagatccatttaactttctatattcaccttcatgtaaacataaactccaatgatgtcagtgtttatttattaagttctgtttttacaattggatgcttagaatttttagacctgtcagaactcagatttcttaatatgctgaaaaaccagatattaattctagatattaatattcctaagaaagaaaacttccaaaaatacctgctctgtgtcaaaatatgactattttgtctgctttttaaaaaatatttttataccaaaaaccaagccttcagtgtatagttatcataatcatatatctgtatcatatacagattttatgtatctatttatatccaaccaaataatctttgacttcagaaaaggaaggacatgtaatgagaattaaaatagtgagttaaaattcactgccagcagaatgaatgaaacatgtgtgaagaaatagcttgcttttgtcatatggagctgtggtaatcagcctgtgtaactcatgagataaaccaaagaagaaagtcctgtttctcagtaagtgttaatacaagaatcctatagaggattt

SEQ ID NO: 7718 - DNA, 6000 bp, Homo sapiens
tctcacctccccacgggcctggctccagctgctttgacatccattcagtgcaaatcacattgagtcactcctctctgtgaactttggatggttctgagcagcgctgcgagaggatcctgaccaagtcctcaccatgtcccacaggcccatcccgatctgactgtagtcttctaggcttttctcttgcagcagtcacctcctacctcttgctcttccccaagcccaccataatctttcctgcttctagtctttcctttacttggaatggcctttctaaacttctgtacctaatgaatcctactcatgctttaaaatccagctcaaatgttgtcccctatgaagaactttgctaacctcccagacaaagcgtgttgcccagttttctcagcagtcctctagtgtggagctttttgcgtagtacctctgttacatttacatccttctccccaacaagaccataagcatcgtggggtcaaggatgattttataacccctgagtctgccaagcatggtgtctgataaccaacacatttcattgcatgaataattaaagaaaacagaaataaatgaatgaataaacaatgctctttttgttttgttttgtttgagacagcctcattctatcacccaggctggagtgcagtggcgcagtctcggctcactgcaacctctgcctcctgggttcaagtgattctccttctttagcctcctgagtagctgggattacaggggcccaccactgcactaggctaatttttgtatttttagtagagacagggtttcatcacattggccaggctggtctcaaactcctgacctcaagtgatctgcccgcctctgcctcccaaaggaacaatgttgtttctaacaaaatacaccacctttcctggccttcccacctaaatgggttcctggaaattgttcttggccagtatgggttggtgaggggctagccagggagcagagtcatgttcgcaaaaggtgggcactcatgagagtggaagaagggaagtaagttcctatgtctagaataacactctcctagaaaacattacatctgggggatttttcatttctgtgcttcttattttcactcgcctatactcttgcacaggattgatttccaatgaaatttgataagtgatattttgttaaaatgtcctgattttttttaattattaaatagctataatcccaggcctgaaaaatcccttatccagtagctacagttgttttttgaagcaccgccaccaaaattattcccctggtaattattgagcaatccgttttcacccataagcctgtcacatgtaataaggatgcctgcctgcctgtttattttctggctaatttggtccctttacatcatgtgaccttcagtggcctgtatgcaatatgaaaatcgtcctcctaggactttctttagaaggttcacagaggtgtgctaagcataagtaatacatcagtttttaaatccaggcagagcgaacccatatcagatgtctcaggaaagcctgcaatgctgttttataaagggaacagaagagtttcttgatctttgctattctctgcaagaaaatatctcacctaagtacatcctttcgtatgcactctgtagcaggacatttacagggtcagagaaaaagacactaaaaacttacccaagctgttagctcatatttattaactgcttaatataggccagggtgcaaaggcctttatatgctttgtttaatcttcccccaaaccctgggagatttttatcccagttctgcagattagcagactgaaacacagagaagttgtaacttacccaaggtcacctggctgtggatgccagagtaagcatttattttaattgatacataataatcatacatatataggtacatagtgatattttgatacatacaatacatagtgatcccatcagggtaattagcatatttgtcatttcaaacttgtatcatttctttgttttggggcattcaatatcttctcttctaggtatatgaaaatatacaatacattattgtaactatagtcatcctatagtgctatagaacactagaacttattccttctatccagctgtaattttgtatcctttaataaatattttatcctctctcccccgtacacttcccagcctctagtattctctgttctactttttacttctttgagatcagcttttttagcttctgtgtatgagtgagaacatgcggtgtttaactttctgttcctggcttatttcacttaacataatgtcctccaggctcattcctgttgctgagaatgacagaatttcattcttacttatggatgaatgggattcctttatgtatatataccacattttctttatccattcatctgttgttgaatacttgggttgatccatatcttggctattgtgaacaatgtggcaataaacatggtggtagatatctctttgacatactgatttccgttcctttgcataaacgcccagtcatgggaatactggatcttataatagttcagtttgtagtttttttcaggtacctctgtactgttctccatagtggctgtactagaatgcattcccaccaacagtgtatacgagttcccttttctctgcatccttgccagcatttgttattttttgtgtttttgataatacccagagtatgcttttgaagtcaggtctttctggctccacagtctgaaggtgtaacactaccccaggctgcctctccatagcatgtttcctgatttctggttcaagaagactttttctaacaggtgtcattcctagatggctctcttaagatcttactccctttggcattttacaccttactcatacaatcatttttaaaaaatagcaatttaaaaaaatacagttcaagtgttcatcatatccaggcatgcaagccttttctaaatttttttaaataataaaaaagccccacagaggaaaggaggttatttgtgtcctcctgacacacacttttagattttggttaaaaagtctctagtgggtgcaaagtgaccccctttgtcactggaaacaaataggagcattctttgtgccactgtccacaaccacacagatatgtttcccaagggagctcatcaggtcttcaaacatttagcaagcatgacatgtgtaagagacagtattggagaagtaagacaagccttgctctgccgaagcttacaatccaggagctcaccccttcaaggaatttacagcctccagacagataataacattaggtccatgaaagcctacaaggcaagaagttcaggagagaaagaagtcataaccatcttggaagaatctcaacttgttttatcagaactcaaacgccaatttctcacccctagcttccctcattagtgcttattaactagtattgggaggaccaagcgaagagtaaagctagggtagcagaggccataagctaattgcaaaggacagagctaaagaaacatgctagtttcccctgagcacccaactgcatgactgaaaatggattaatttgtatttctaatggatatacaagaaacacgtgaatatgctaaaataaatttaaggtcaagcaatgcaaagtgttagtgcgtttgccttccactctcagaggcagcctctattatttggttcttgggctgcttcataaaaagttctgtgttttttaatggcctcagcttttgggaggctcaggccacctagcccatcaggagaccaggcccgaaggatggatctgaagagtgggcaacggagagttaaaccagggctgacttcaacaggcccagtcaagtcaggggcaagcacattgtccatccactggaagacggaaaggggagaggaaggcaggccctcccgactcacaggtcacctcgcaactttgctaggcactacccaccctttagggataagtgaagtatgtggtgggcatacaaggcgcacaggggagtcattctggcaaattccaagaaggttttaagggctcccgaggcaggcaggcccagttgctgtttggagcttcctttggggtgggaggatggcgggggcagggggccggggcggtgccttaacgaggggagatgcttttaaatagctgccttccaaaaaccatcctccctgcttctttgagaagcacccagctgttgtttaccctccaggacagcaaatccggttatttgtctctctattccgtgatattataaagtaatgaatggtccattaaactaagtttgggatcccgtctccccacagccacctcctcgccggcaccctcagccggggaggccgtaggctcgggctgcagcctggcagcctcagtccccctccctccaccatttccctctactccctccctctcctgcaccccctccccccggttatttgggagattagagttcattaattaaatcctgtgcttagatcgaactgtaacattattccaatcacatttatcttgcaggcggcggaggagatggcagcctcgctggaaacgcgcgggggagcctgagccggcggccggggacgcacggcgctgcgcgctccttcgccacgccgccgcgcagcccctccatcttcctgctcggcaccgggccccgcgcgcccctgcctacggggtcccgctgctctccggggctcctgccagccccaacccccggccccggtggcctccccccacccccgcccgggtccccctcctccgccacacgcgcgcgcgctcacacacacacacacacacacacacacacacacacacatatatacacgccagcgagctgctggccgctcaatggaccgatttccccggtttccctgaacccagcccagcccgggatgagaaactgcaaaatggcccgggtcgccagtgtgctggggctggtcatgctcagcgtcgccctgctgattttatcgctcatcagctacgtgtccctgaaaaaggagaacatcttcaccactcccaagtacgccagcccgggggcgccccgaatgtacatgttccacgcgggattccggtgagtgcgggcctctgtgttagtgccctcgggaatttggttgatggggtgtttggggaagggaaggcgtgggggaggggtgttttggcctctccgagactctttgggccagataactgcgcggtccttccactcctctctctaattctcccttccccctccctgttattttttttttaacccaaagcccctagaagccgctgtccaaatcgatgtgattgcatttctcgtattcttcctcagcatcccttccctcatttcagaaatgggggttgggggaggctttcaggagggtgagggtggagggaaagacggtgtgtttgttcgggagggggcggcgagcagagatggacaggcgtgaggggagcgccctccccgcgccctgtccgcagactccgcgggccgggcccggggcggtgctggcggtttaatggcgcaggcgccggactcccctcgcgccctcctcctttactcccccacgcctatcaaaggacacgcgggtttattctcaggaagcccctggggcgttctctctcaaccctttcccccgcagccaccgccccccaccagctttccgggatttctgcaattcccccgccccctgcgggaagcgagcctcggaagggccgcccaccctcgccaggtcggagtcaccgctccgcgctgggccggcctgtgaaggctccaggcgcagcttgacgccgctctgcgagagcccccgccccgctctgtgaccccgggaactctcccagcagggcctcctgacgggcaggtggcaactacaaagtgccacctgtggtccaagctgggaccgaggcgaggaacccagaggagcctcgcctggaccgaggagcggagtaggccggcggcccccgggggtccccagccaagttataggaagtgaaatcggacgtgggtttgggaaggaagaggttaaggcaggaaccacccccagactttccctgggtctccggt

SEQ ID NO: 7719 - DNA, 6000 bp, Homo sapiens
caagtcttggcagtgcccaggtcggctctttgtcattgggtgtaccccttaccctctctgagaggggcagttctcagaaaatgattgcaaggagcatagggcaggggttgacacctaaagtcacaataaggtcaggtaaggagagggaatatggccaaaccaggagctgagaaagaggcctgcagggcagtacacttctcccagagccatctacccacgtcaggaaatttagattgaagttactattagggcagcctcagggaggaaaagactgcaccaaagagcagccttctatgtgccaggggatgggtgggtattaatatctccctccttgtcccccagccgtgtagagctggatggagtggacaacttgataaaagattacccacctagcactgccccatgagccttgcttcatcatggtgctggatgcagggcagggagagcgtactttcctcgctgtggcccttgggctggtgctggcttccatcttagtggtggtagcctgtctctgtttcatgtggtcctcagtggcctccctgtccttcacatcctattttctgatgactgtcactgggttcactgcaaatgggttcatggttttccaaaggtaaaacaaacatgagaacagctcagtagttagaggacctgatgagtgttaaaatataagtttacaacacgtctctccggtcaggaaagcaccaggtgtatgtgagttacactaagaacaagctacacctgccattagaatgtctgtaatacatgcagagagatggtaaagacttcagctatgaacccgaatggtggtgatcactgtgcttgctgatcattggtagtaattaatgatgatgatgatcatgtctaacatttaatgagcactatgtgtcacacactattctatgtgccttacatataaaaatgactcttcataacctactcctgtgaggtaggtgtaaccactatcactataaaaagaggcacagaaaggtaagataacttactcagggctgcacagctagtaagttttagaacctggattggtacccaagactgtcttttgctagagcttaggctctaaacctctctgctaagctattattccagtatacaaactgcatgttatgggttgaattgtgtcctccaagaagacattttcaagtcctaacacctggtacctgtgactgtgaccttatttggatacagggtcttttattgcagatgtaatcaagttacaatgaggtcacattagagtagggtgggttctaacaaatatgaccattaaccttagaagagaagaggaaagacacagacacagagtgaagacatgggaagatggaggcagagactggagttatgctgtagaagccgacgaatgcctggggctaccagaatctggaagaggcaagcaaagatccttccttagagaatttgggggaagcaggtctcagcaaaacctccagaatgtcagaaaacaaatttccgttgttttaagccacctgactttggcattttgttatggcagcccaaagaaacaaatccagcgcgtatcattcacaaaagtggggaagacatcttcacagggcccatgctccagtggttctgtgcaggccaatgtggtttatacctccatttacaggggctgattctctccatgacatatgcttgcatctaacatttataaaatttacagtctacaaaacatttttacttatcctacctgtgattgtcataaccatcagggcagatactaccaacagttgaaaaactttttaaaactagactttatttttattatttatttatttatatttcaataatttttgggatacggatggtttttggttacatgaatgagttctttagtggtgaattctgagatcttagtgtactcatcacctgagcactatatgctgtatccaaaatgtttaggcattatttttttggagtagttttaggtttacagcaaaaatgagtggaaagtatagagatatacccatctactcctgcccccacacatgcacagcctcctccactatcaacttcccctgccagagtagtacatttgttacaattggtgaatctacactgacacatccttatcacccaaagtccacgggttacatcagggttcactttggggttgtacagtctatgttttgacaaatatataatgatatgtactcatcattatagtatcatactctcccccctacccccggcaaccactgatcattttactgtctccatagtcttgcctctagagttcacgggaaggagtacttcactggggaagaggccaccagtgacagaacaaatgaagtgaacattctagttctcttaattacttatgtcctggattaagaaaaaaatattaatagtagccataattcctcctactggttctgagagtctattttgagtcagatgggaggttttttttgcatattattaatacctcacttgactctcacaacatctcttgcctttttcagtatgccatgtagttgggatcatacagtatgttgccatttcagatagacttctttcacttagtaatatgcagttaagcttccctcctgtcttttcatggcttgatattacatttcttttttgcactgaatagcattttattgtctggatatcctgcagtttatttatccattcacccactaaaggacatcttggttgcttccaagtgttgacaattatgaataaagatgctaaaaacatccgtgtacgggtttttgtgtggacatccgttttcaagctggtatttgggtaaataccaaggagtgcaattgctgcatcatatggtgagaggatgcttagttttggaagaaattgccaaactgtcttccaaagtggctgtaacaaatacggtttttatttggtggatgagcaaagggttcatggaggtgaataaattagtctaagactggacaatatgcagggacttctacccaatgtcttcctgtgttgcttctcacccaatgctcaacctaagcaggagcctggaggctgggccaaaggttctgatgtgaagatatcacactgggttctaggtttattggtcacattttggacccttactctattcccacaaacctgttccacccacagctttcctcattgaagttgaggggaactctacccttctagttccataggttaaaaaccctggagtcagcctcaatctcttttcttctttcacgccctatatttattctttcaaaaaatcctgaagactctttcttcaaaatgtatccagattctgaacctttagtgctgccaccttagttccagcaattattagtggcagggttaactatcaccatatcttcctatgtactaagcactgtgtcttgcacttataattttatacatctgatatttggaagaattttacacagactagcttctggatctgtacatttcaaaccttgtttttcctctccatccacttatttccaaggtcaagtgctgcagaacactttcatatcagatgccacttccagtgggacttcctgccacggtgccaggtgagttggcccagtggatggcagtattcccagaagccattttttacacgaggatggcaggaaagaccatgaaccacataaataaattcactaaactcaaaccaaatgtatctccaactcgtttcctccttagctggatccccaaaattctccttgtccctccaacaggaggggaaatgtaatggaggtgaagttggaatgcaaagaaacagaactcttaaccaatagcaattgcaatatcttgcttttgaaagttttacacattctatggttaagtttctcccacaccttggaaaaacacctttgcaattgaagggtcccagaacttacctttcattagcttcatggtaagtcagcttctggtatattttaaattgcaacctgatcctttcccccagacctccccattcaacttatctgcttttcctgttgtcatagcacctccatcctttaggtaccgtataaattatccattatgtctgccttcggtagaatataagcttcatgagggcaagaatctttgcttgttttgttaactgatgtttctcaagtgcctagaacaaggccaggtgcatggtaggtgctccataaagatttgtggataaataaatacaataaagaatgcataatgcatacacgagtgagtgaatgaaccaaaggtaatctaggatcagaactgtgatgatctaggacttctaaatttaaaactttgagttatattccactcatttccacttaaccttggccatgtcaatgaacctttctgggcctttgctttctcgtgtatgaaattaggtggttatgtattcatttaattaatatctattgcaacccaattatggtcaaggcattcaaagatacttccttgcatacaagtggtaccactcaaaatgcagaattcagcggcctcaaaagtcccgcctcttccaagccccgcccaccgcagtccatctttaggccccgccccaattcggctcagcccgccccagcgtagaggcaccacctttcctcgctgcagtcatccaatagccaagatacacggctaggtgatttgcgagcgggagttaggtgtcctcttggcgcctgaccagagtcgggaaattcagctcctcttgagtagtcccttccccgagttgccccccgaggtatgcggggtcactcgctgctcgatgttccctccgaagggtcggacaaggctccggagccctgtagctgccctccctaggagccccgggtcttcactggccgaggtgcccaccccgcagcattctgggagtggtagttttcttccttcaggttcattcctggctggccagtgcccaagactggcgagactacgattcccagacgcccaagcgagtcgccggtcacgtggccgcaaggacgctgggccggtgggcgggggccggcaggtgctccgcagccgtctgtgccacccagagccggcgggccgctaggtccccggagaccctgctatggtgcgtgcgggcgccgtgggggctcatctccccgcgtccggcttggatatcttcggggacctgaagaagatgaacaagcgccaggtgacggaggagggtggtgagcgcgccgtggccgggaccgcctgtgctagcggggagtcggggcttcccagtcagggctccggctcccagtgaatgcggccgggcggccacccgaagctcccgcgctgggctctcaggccctgggttctacgcctacgtgtgggcatgggtgtgcacttccttgccctgacaagagcacaattaggggagggtgcaggaaaggggagaatagaaaccccgtgccatggaatgtcaaatgtggttgagaatgccacagccacgcttgtgggagagatgactcggtgaacgacagctctctgagcgtatttgaagggccacccggtgaagagggaaccgatttctctgtggggcttcagaggcctgactgccggcaggtggaagaggcagaaaggcaggcgagagggaagaactttcctacaacgggagctgtccagcgatgcctcccaaagcagtttcttcccagcctgggcagttgtttttcccctgaccgtgggtcgggactaaataatgctccttgtgcctagagagctcacaagctgtgcgcaatcattgtggactcaaccagtgttcccagcgagattccagaagccttctctaacttctgagatggctgcactctgaatataggaggcagtgtagggtctttgggcagctggggtggttgaattccctctcctttgtgagaggacctcagaggaaaacgttcctcttgctctctttttagccacttattggccatcatcactgtctttggggccttatctcttcactataaggttaagagtgagtagggattggaaaggaagccctctcagtcaggaaaaatacgactatgtaggcttctaggtagagaatttgggggacctgtaggacctgaa

SEQ ID NO: 7720 - DNA, 6000 bp, Homo sapiens
gtcccagaagaaactgggatggatagaacctctgtagtaaatgaaaattaagctatcacttttacttatagaaagagcctcaaaaatgcacttagaagagagcctttatggagatcttagatattacaagaaaacatgacagtatatcataaggtgcatcaacattaaatcagaatacagctcaatgtcatagtgctattccacctcccagtcaaggttctctctcgagaaatagaaaaaaacccattttggccaggtgcggtggctcacgcctgtaatcccagcactttgggaggccgaggtgggcggatcacgaggtcaggagatcgagaccatcctggctaacatggtgaaacccggtctctactaaaaatacaaaaaattagccgggtgtggtggcgggcacctgcagtcccagctactcgggaggctgaggcaggagaatggcgtgaacccgggaggcggagcttgtagtgagctgagactgcgccactgcagtccagcctgggcgacagagcgagactccatctcaaaaaaaaaataaaataaataaacaaacccattttacttaggagttaaaatccttctgtatagagtacagaagaaataagaacttagtaaatgaaaacaacttctggtcagagaactgtgtcccctttcagcatataaaaccatactatccaccctgtccaagacagatccctagtgatggactttggtcagtagcagaaacatacacaaacaaatccagaaatgttgaaagtttatttagaggagcactcgaactattttctttatgggattctacaatgggaatattattgtttgtgaaccatacatactgaaatacacgaacaactttttactccaatttatactggtgaccacctgtgtcattctctggggttttgtactctatacaaaaggattttaactcctaagtaaaatgggtttgttgctatttctcaagagagaaacttgattgggaggtggaatagcattatgacattaagttgcattctgatttaatgttgatgcaccttatggtacactgtcatgtttcattgtactatctaagatctccataaagtctctcttttaagtgcatttttgagactctttctataagcaaaaatgatagcttaagaagtttggctcttaaaaccatgacaccactgtctgcatttacctctcttaaaggcattaggccacatcagaaccttaaaacaccccatcttcttaaacaaagtcacggagtcgactgactgcttctatagagatgtcatttgagctttgctaagcagtagttccattaaccatgaaaagctcaggaaaactggaataatgaggaaagaaatcagagcaagaccataaaagcccagttcatttcaaggagaaagcagtaaccatccctccccactacattttaaatatcacaacgaatttacgtaacaaactaaacaattcactgaaagcacactttatgtacaactttaatttcttcctactgtgttcattaccaagctgttttctttctttagggaggatgaaggggaaacttttaaaagactcatttaacacagaagtcaatttccactaatgtattcttcatgtggcatatgtagtcttccaaagcagatctatatatacaaatacacatgtatcagtatcttcttttataagaacaacagcaattagcccaccccaaacacattattgctattcatatcctctagggaaaaacatgaatatgagaaccacctcatttataataaatgcaaactgattagtatttctgatagaactgttttgtaaaaaacacctctaattgtgaaaagaataatgcgactattgtataacccagcttttaccttctagaaagttaggcagggagtctttttcatgcattcatccctaaggaagtagaaataaagtgctttgcaccaactgttgctatcaagttatataagacagaaagagttggtacgacattgcggtctttgtgatttggggtgtgtaaaggtaccatcagctttcacagaatcaccaagggctcccccggtcaagatcccaaagtcacctttgtacgtgttcagtggaggggaggaaaataagaatttgcactagtgtgtaggaggccaaagtagaaaagagggagagatgaaaacaggcaacctgaccgcctacaaaatattcatcacagatttcaaagaaggcttttctccttgagctcttcagatcatgcctcaggtagggggatagggggttttaattgggaggaacacatgcctagttagaaatggggaatataaaaaacactacttacaattcctcaaatctcattctgtacataaaatgtagccagtggaagcagaagaggagacatctgcacatagcacacatgcatgcacaggcactcttagattcaaagcaagttgctacaaccagccagagaaaataacagacatgtgtgcttaggcaaaatataggtaagaaacaaagacattaaggggaatacactaaatagaatacgtacatacatatatatatatatgtacgtatatatgtatgtatagtgagttctagctttaatcaacgcaatccgcaaaataattttctttactattgaagagttttctaatagctagcccttgattaaatctcctcaaatggaacgcaagtgtttggttattacagaattagactgagccagaatctgctaccagacgggacttatcacagatgtagagatctgaaaaataacagatatatattataagccctttcagaattctggccccaaaggtatccataaaatatatatttctggcttagctccatgatttttacatatgacccaggtactttatctgactgttcaaatgtcggttggcaccttagtcatttacagggcacttttttgcctgcatgatcccatcagactcttgtgatggtccagtgaggtaggtgggagaattattggccctgcttaatagatgaggaaactgaaattcatacaactaaataagtcagaggtaatgaagatagaaccagtaaccaaactgtctcttagtctaatgcactttgaggaattatagatacattgtgtcttacaatatacagaatattgcttttatggtttactaatcacagcattctggcagtggctttttttttgtttgtttgtttgtttgttttggcaatgccctttagtctgccttctaggcccctaaaacagcacagctatttctcactaatctttgtcatcaattcgtttcctgggttaaattccttcttcccaaacacctccctgtagacagggatcagagaaacatgaactgggcttctctgttccctaagggaagatgtccaccagtccaaagagagagagaacagctaatatttggtaacccacctgctagcagcaccattgttctttattagcaaacccattgccctcaatgaggtgcacctggcttgctttttcttaacactcaatctgccttcagagctggagctcataagaggcacagcctcccattctgctacaaaaattctatagtctcctcagctactttctctatcatttctcattaaaatgatttattatacagaaatgaaatggcatattgtattaaataattataaagtagtttaaaatttcttttgtacatttcaatcatgagtatttgagaggaagctgaaaccagttctgatgacaggtggaaggtagtaactaagttagcatcaatgcattcacttcaaaccacttgaagaaatgaagtgttatttagtttcacagagctgcaatctccaaatacacacatttgttctcagatgacagcagttcttcgaattaacagtgaaaatattaagccgaaggaagacattttggttgtcttgacaggttgacttgagtgttatgccatctcattaaaccaagccaagtaagggaagaaaagattgatgaggccatagcccagaagtgaggtcaccagctaaatgtgaccacatagcaacaaaagaagtttgactgataaagatgtgtccccacggtagaagtccttttccctaaatgagtccttcaggtcaagaaaggagatttgttgactagattctcttagcttgctcccataggcatgtgactaatagcactttaaagtctgttgtgaaggatataatgatcaactgaccatttaaatcctggaaaggtcacattagcagcccctatcagtgcttcggagccaaaacagtagagtgtgaaacttgaaatccactgtgagctcagaaaatgattaaagtcagaagtgagccctggctgcttataaatgaagtccaagatttctagcattatcaataacagcagtaggcacaagatcattgtgggtgaccaaaaaaaaacaaggtagttggattttactatttttttaataagcaaagaaaagcagttgggctaatggaaatattagttattagctgtaaattttgtaaatgaatgctgcttttaagagtttaagagcctgtctgatcataaatatttcaaagagcacactattaattcaaaccaatcaataatacagtataaccctccagctaagttaccaatgagaagaaatttattcatcagttttattcccaccgaatctatatccaaaggtttgggattgattatagcaagatgtgttgtcttattatcaaaatagtatttattactcaaacatttctaaagcaataacctgttatgactttttaactcattgagtagaaagttgaatatttactgacatttcttgaaaacttgcaacccgcctgcaggaaagaatctgacatcatcacactgtgttttccttaacttgacaggaagtcaacttcaagcagattgacttgaaacgggatctcatttaggaagcataagtgtccaatcaaaaactgtgtatttttttaaatttggaaaatactcaagttccagttgcttatcattctccttcattttctgaaaacctggcaatcccatgtggacttctggtagaatgagcaatgcaaagaactggcttggacttggcatgtccttgtacttctgggggctgatggaccttacgaccaccgttctctcggacaccccaacaccacaaggtgaattagaagcactcctgtcagacaagccacagtcacatcagcggaccaagaggagctgggtttggaaccagtttttcgttctggaagagtacactgggaccgaccctttgtatgtcggcaaggtaagaaatgccaagtagaaatgacccgggtattggatattgaaattgaatatgaattgagtatcaaagttgacctagcctttatctgagacctgagaaaaactagaacaagtggtacgttacttgacacctagctaaaatgtaacttctgctttgtcagagaccagtctgaaaggaaagatttatttccttgtccatgtctctgttatgaatgggaaaaagtgggaattgggatttggaggaaaaggctcagaccctgcaagagctattcaagtcctaaaagaggcagcagcagctgtctgggaatgacagaatgggtgagagggaaacttggaaatacaagaagagtacagagttttttgctttgtgtttttgtggggtttttttcagagcatttccagaggtattgcctgaggtgcaaatttaatgaaaaaaataaacatttttcatttcagaagatcttagcatgtgctttaggatagttggagacaataaatatatttataaatgttatatttgaattctcttgatttaatctatcattatttcatctttaatcctggatttttcctgtgtttactttattggggtgttaattacagaccattttgtgaaagcaaccaagtgagagagaatgggagacaagaaactaattagaaaataactaattcattcaaatggtaacttaaacgcttgtttagcacagaggctgggagcatgggtttcagattcaaacacaggt

SEQ ID NO: 7721 - DNA, 6000 bp, Homo sapiens; identical to SEQ ID NO: 3681

SEQ ID NO: 7722 - DNA, 6000 bp, Homo sapiens
gaggatttgcacttacgttctgccagattacataataaagttccttagaccccatcaaacatctttgcctctgcctttttttttttttttcagatggagcctcactctgtcacccaggctggagtgcaatggcgtggtctctgctcactgcaacctctgcctctcaggtgcaagcgattctcccacctcagcctcctgagtagctgggactacaggcacgtgccaccacacccggctaactttgtattttttgtagagatgggatttctttatattggccaggctggtcttgaactcctgaccttgtgatctgcccgcctcggcctcccaaagtgctgggattataggcctgagccactgcgcccggccaacttcgcattttctaaatatttctgtggcgtctaagcagctcctttattctatgaatattttagggtcttttaactgagtggtatactctccaggtaagcattcatttttgtgcaaaactgaattttttggatagtgaaggaggagaccttgagtatatcgtaagaagcaaaattgttgtattacctcagattttggatttttctagtttggttactctatgaagtggcatggtcatgagtgatgcggtttgggggttgactccatgacgccaatctgaggtaccaacatctttcttcttttagtgattatttatgctgcattagtgatgactctagtcaaaaaatctttacatctatttatattttctgactatatccaaggaactttcatataattccagtgccacaactagagtccaggccaaggtttttcccagcaactggatttctaaaacgacttcctaaacatttctttcacctcaggtccaagactgacttaacaggggctagggtgtttcttcttctaatgcaaatatgatcaccatttttcttcataacactcctcaataaagccccttttgtcctcacagcacattccaaacatttttccttcattcaaggtttctcatcatatggcccctttgttgtactcccacatgtgacattttgtgcccacctcatcacgtggtgtgtggagatatacacacctctttattttcagagtagattgagaagttcctgacgttaagaactaaatcttatttatctttgtgttcccatgccccagttgaggaatcatatagcaggggttcagtaaatatgcactaaatggctaccttgtgctagaagtccttactttccagaagatggaatcatatttaattagatgaactaaactgaaggacatagataccctcagaacaaatgttaagcattaaatataaatttttattattattcacagtttatattgggagaaacattcacaagaaaccataagtggtcccatgttctaagaccttttgtggccttatggggagagcctcctaccttctgccatatctctgttttcctacctgaggttctccagaatgtttagaactgcttagttctcaaggattacatctgttctcttcttagctaccagataccaggcctatgtctttggctttagagtaagatcataatggaatgactatgaataaaatctgatcagcaatctcatcagaaagtacttgcttgcatcgtatctactttggatgataaaacacctaagaatatacttttcatacaaacagaaaccgtgaaagaattctcctacattttactgattcctccttctccaaaatatagtttcagagcaggttaacttttcttaatttaatcaagacagtgaaaataaattgaaaagaggctttttaaagtaggatagaaaagggaacagttattcaaataatgctatatacaacactaaagacataaagccttcaactgagggaatttgaaaatatatacacacatatgaatagaaatattataacatacatttgaaatgtataagaaaacatgaaattttgtaagtaagacattatggcttgcatttgtagtttatggaatcttaaataattggcagtgccttgggattcatctactacagtttttttatgttgttgttgttgcgtttctcagaaaactgggtcttctaatcaaaccagaaattgtgagaaaaagaaagaagaggagaaaggacctaataaaacatgtgttgaccctaaacttgacaacagcttaagcctggtgaactcttacttgctgttcttgatgctgggcttcctcctaagataaaatataaacatctttcagggcctggaagacctggaaagatctattccatatctattactacaacataatccatctccattctcctcccttcctgcagtacatacatccaaccccttcctgccgcagacattccccttgtttattctgcctagatcattcttccctcagagctgcacaacgctgactcattgtcatcattacatttcagcctatgtgccatcacctcagaaagagaccatcccttaggtaaaaggtgtcccttggtttctgtctgtattattcccagttcttacccttgctctaggttgtgtcttttggacaagaagaatctagacctccctctaagatcaacagctgttagtgtgggaaccagggctagaattttggttaactgaaattacttcacctgttttggattctgtagaggttactgaggaaattttttaaaaggaaggcacatagaatggtttaagaagaaagcgtgcatttggaatcaacatttatgtggagtcataagaagagaaaaaatatgaaaacttgaggaaaaatatctttttcttaaagggcctcaaaacattttcattttctatgcaatgtcttttgaccaaaacaagccggtagatgaaaacagtgcagtttctgattcccaatcacaatatgacctcctatagatgaacaacccaggcaatccaagagcagtttaaaaatagcttggtatggtcagatttgtgataaatgctagatgggatacaaacacttctttattcaaaaaatgcttactatgggccgaacatgtgctgtgtcttgatgatattgaatattaatcacagccctcctgaagcttttagttcagaacagttataagaaaaaatctcatcccagaagtcagttcgtaggcaaaacaaggcaaatatatgtaatgttaccagaaaaatctgaattgaatctaaagattgtactacatgagccagaataattgagcattttaacacagaaaagtatttcaaagagctcaaagatgaagccaaggtttgatacctggctaccaggtgaatgatagtgcccctgacagaaaagaacatacagggaaaatccaagctaatatctaaaaaaagatacggaggtcttttctaagcatcttgaatttgggtgatggctgacagctgagtggaaatggaccatgaaatggtcatccaagcagccctggatctggggagctttggggttggagttagaacttttaaaatgcattaatgttaggtaagcaacataggatggtatctggaacttaacaggagtccataattgctgtcagaattattagcatagaattcggttttaaacattgactaaattgaatgggcgaggtgggggaggcatggcgccagttaaatagccaggagaggctggactggggacagaaaagtgtgcttgactgcacaagaaatcagagataatggtacggacaagcctaagcccatgtaactggtatccgaagaattactgctaaggttaagtaagaataagtgcgtaagagaaagaggacactttccattggtagagtgagaaaaatgaaaggaaggtagttggaaatgatctcttccccctcctaacccctatgacagaacacccagtcatcagattaaagcgagcaccagagcaggggaaaacaaagcgtgctcaactccaggggctgcaccgcgctctaaagaaaagaccagatcctcttccttccttctttccttccttccacaccttgcaagggtcctctgtcccgcactgcgagtaaatcatacactttggaagtttagcattagagagcccagcaggggagaaaattgtctgcaagttaaaaaaaaaaaaaaaaaaaaagtagaactagggcagtccgaggagattgaaagggcaaaactatcaagcaagaaaactgtaagttctgattagttttatgactttgccttcatgcctcaggagctcaactgatcacggctttcacgacaggctaaggtgggtgttggaggggcagcttgaaaataccctcaaaactctcctccagctccgtgctttcagatgcaaatgcctcacggagagatggatgggctgcagcccctcctactttcacccctcttctttattttcctgcgaaggaatccatctgtacagatccgccaggcgggaggtggaggagggtgcgcgagggtgcgcgcgtgtgtgtgtgcgcgcgtggcggccgagcggctccgtcttcgcgttcttttccagtagcccccaccgggtctctgggaggcgccgaagtctcagtggctccctgggccggcctccgacagcgctgacagcaggcgcccgccgcccaccatcgtcgccctcttcccctccctcttcggccccggctccggcgcgctctctcctcctctcctgcgcgccctctcgccctctctctggccgcgcgctcccgctggctccggaccctgcgtctcagctgcccgggcgagccggaggggcccctcgcagtgagcagacgcagcgggcccccggcgcccgaggccggggcagggtccccgcgcaccgcggagtgggctgtgattggaggaggagcccgtgccgggcgggcccgagcgggtgtcgagccggttcctccagtctgccccgcgcgcggagctgcgcgcactgggtccccaagagcccgcgggcgtccggcagccgagcgcacgttctttcggatgcacacgcccgggtccctggcgtctgacgccgtggggagggcagcgaggccccaggtgagtgtgtctgcctgcgcggggctggggaggcgccgctgggcagatgtgcgcccttgctgtgcgcctttggaagcaggactaatcagtgagcggagagcgggcggggatgtccgtgtggagtttcccttggcgtccccaagttactgcgtgttgcagtgagatgtggctctgcaaggcaggacaggcttgtggacggaggcgggggcgtttggcccggaaagccggtgttgacagacaccaggtgcgacacgaggagtagtagttgagggtaagagcaaatcccggcactctccaggtgcagcggcaaacatgggcaggctggagcactctcctcaaagaggaccacaagcaggctcctccctcaacctcggactgatgggggcacaactccgcgccggctgtgccgccgggttctgcagaggtctgaggctggaagggggtatgcgccgctttgggcaggagtcctttgaaccattcgctctggacaccttttacctttcgtgaaggtggagctcacttcagggtgctttgcttttttcccctgtaattagtattctgctgatctggttcatctgcatcctgcgtcccctccgcctggcagtaccttaagtgtgcgctgggaaaagggcgccctgcttctctgaatgcatggtggacttcttcatgggtgcacatggtacactgctacttgccggtattcaaccttccagtgtggattaatgagaaaagacccgttattctgtaccgcttcacgttttagatcgttaaccctacggatttcttaaatgtcatagttcaggtgagtaaagattggcaatgagttcacccagcactgggcaaatggcaaactattgagaaaccatcaaggattgggtgtatcaaggctttggagatctgcaaattgaacgaggaatgtacttataacatcttttgctttgcaataaatatcttgtctctattagatcgtttattaagtgagacctttacgtaagacttgtcctcat

SEQ ID NO: 7723 - DNA, 6000 bp, Homo sapiens
ggggaaaaaaatactaaaaacggtatagagattggttaaattgcatggtctccatagagttaacaatgtctagtcaattaaaatatagatttttcaacccaggttaagtgtttgaattagaaacaggtccctgatggcctccaggtgtctatatggcttgctccctcactttcttcagccatttactacaatgtcaccatctcactgagaccttccttggctgttatatttaaactgcaatccagtcccctctgccacacacacatgcactttgtgtcctttctctgtttctctccttagcacacatcaccatccaacactatacatttaacctgcctgtcttgcttactatcgctggaatgacatgggcagttatactgcatgggtttgttcactgctgatcgttcagcacccacaatatgcctggcatgcgagcagcattcaataaatatcgctgaatcactaacagtataactgagaaagcaggttatatcagtatatactactaggttggtgctaaagtaattgcggcttttgccattactttcagtaacaaaaaccacaattacttttgcaccaacctaatacataaacttatttttctatttctctaagaggaaaagtaaatatatgcatacaaagaaaagagatctagagacaccaaggtttaacagttaacagatctgattcataggattacaaaatctgttggtgaaggtctttttaaatggggacgatttagggggcataactccatgtatgttctaatttttcttagcatattgaatctgtaataagttggggggtgggggtgttgttttaatttcaaacctaagagtcacatgcaaaagaaggccagggaatcacagtttgacagcacaatccttgagactggagcagtggttctcaaaggcattcctagcaacagaactcttgcaaagaaactgaaaccaggtcccccgaaatctgggggtacagtctgcagcaaactcaaaatttcttaggagtctcccaattgatcttaaaaattaaagcaaatactgcattctactaaataatctgtctttgtcctatcataaaaatgtattatattatttaccagttaaattatttaacattttccccaaagcctttgtgttgattttgcagacaaagaagatgctctatgtgttccccacccactacaactactcgtttgagaagcacagcgccagggtgcttagatgtttcaagaatacatactggcttaatccaccaccaagttcttactgaaaaccttaacttgtgtgtcccgaatttatgaaagattactgtgaaaacaccagtgaaataaagtcacctgttttgtaaacatatatgcatataaaatatatgtaaataaaatgatcttagtaagttcctcaaagtcatgctgtaactctccccactcaaagatagttttaaataacgattaagcaaataaatcctgtttggtactagttattttttttaagtaccaaatgcttttccctaatctgaaaccctaattcagtaacgaatggatatgcctctatctttggctaaaacatttaacagggcttagttagttcaattctacaaatacttcttaatcatatactctgcacaaggtaatgtgtaagtgctttaagacatttcatcctttatttaattggaatatgaaggctattttattacaaacatgttttcacacttttaaaacgtcaaagcttatttcttgctgttttgttttttcacaattaaaatggatctcatagagtccctcatttcagtttacaaggctaaggctctaacaaggcaactaaagaaacttaaggtcccaagctagaagcaaagacagtctctgagacgcccatctccttaatgtcctgtcagagctctctgtaccatgtcttacatgagaccatacatcttatcagtgtaccttttaacactattggaaacacatttctatttatccataaaataaaccaactgcactttttttttttttttttttttgcgacagagtctggctctgtcgcccaggctggagtgcagtggcgctatctcggctcactgcaagctccgcctcctgggttcacgccattctcctgcctcagcctcctgagtacctgagcctacaggcgcccgccaccatgccgggctaatttttttgtatttttagtagagacggggtttcacagtgttagccaggatggtctcgatctcctcacctccagatctgcccgcctccgcctcccaaagtgctgggatcacaggcgtgagccactgcacccggccccaattgcacatttttaaggtccacataattaacaaatcagcaagttctatttatgtttttatgcgaatctatacgtctacaaggttaagtgtagacatacactgatacatttagcaagataaatttagtttgaaaacactttttttcaagtgacaggtttttgtctgatagctttcaataagtccaatattttaaaaacctaatgactgtgcttcattttaaatatctggcaaatcaaataaattacagcaggtacaaattaagccaacttaatacgctttctgctacacttcttacagtttgtgatatttatacatattcacattttgtgttaaaagggaacactgattccttaacaacatctaattttccacagcgatatattaaaataaccacctgctttgaccatagtcaatcattctatttttagcagcggacttttctttaccaaaaataatgcatacatttccaaatcagcttgaaatgcaggttcccatgccaggcataatgacaggccctctaattatatcaatccaggaagttcactcaacttacaaaggataaaagattcatcatataaaaatcattctgcttccccctaatagagcactatgtaaagactaattttagtaatagcagcaaattgattaaaagttcaagtttcctatttaaattcctgctttttctcctacataaaagaatttttgcaggcattgtcaccattctatttgtgacaaggcttgtggtatgtctagcattataggtattcaattaagaactattatcacagcactaagcaacagggctgggcttctgaaaacaggtaagtggaagtaatggagacctagagaggacacaggacatagttctggagattcagggggaaaaaacaagtagttcaactagtatgtaatagactccctttgtgtgcttaaacatagaccattggtttattagaaggcaaaatatgcatgactttccctatttataaatcaaggagtcttacaagcagaaagataatcctcaagaatgtaaaccattcttggcattatccctccatctgtaaactaactgcagtgatgggtacacagctagggaacagctcacgatataatgagagggatttcataaggtaccattatgcatgctgatacttctgatgcactggctcattttacttcttcacgctgaagatgcttctggaaagcagatgagcaagacctggcaatgtagatggcaacttagccttgacgttggaggtgcagaaagtgctgccccccacccgccagaccaacctgcctgcccgaggtatctgcttgggggatgagggtgtcaactgataaggttttgatgaacagactctacttccctaagttgtaaggtcatgaaaaacacgaagggagattcttggttacagaagagcgaaaatacgaaggcaggggcggagcacacgtgaatttagggcacgcatcccggagaaacgacctcttggacctgcacctgtcctggcaggtgcgcgcatccccggccacaggcgccgcaagaaaaaatatttccccgagaggctactctatttgtgtcataacttagggtaccccacgttgcagggtagaaaggatttcctccggtcgttcttccatacccttctcacgttgaagacggccacgggccttgcgccaagctggacgaataaaatacacggtgaagagagcggggccgcgcagtgacgggcttcccgccaggggaccccacccgcaggccctacagtcacctgcacccaaaggccctggcgcgcccccgggccgcgccaccgcccctgctgggcccgcgcagcgtctggaggccgagccagtgctgctgcaagatccgaccgcgtccagtcgccatagagacaaggagttcaccacaggaccgcgccagggctgaaacgaagagtgcacgcaccgcccccacgcccgcacgtcgccacaccccttatgcgcatgcgcgcgtgagcaaaagtaacggtatgcccacccttgcgcagacggcaccgcgccagacacccgctcacagagcgggcttctagaaacttccgggcctcggcttccttacccacccctaacattctgccgcctagggcgccaagccaagttcgcggcttaaccatttaggaaaccggtgcctgctttgcagcggcctcgttcatccccacttgctgactctttattgtccagtttttctgaaaacacagtaaaacgcaaaaactaaatcatttgcccacgcggaattggcaagaccacagtccaagggggtatttcccactgtgcacagtcctctctataaggatcaggaaaacacgtagattgtaactgctaatttggcttttgcaagtcccgcctgaaccacgtagggtgggtggtaccaattcccccaccaacaccccactttccgccgctccagggacgcgcagcgtctgcgccgacgctgggcgcggaggcgtctgggggcgcgggaaggacctgcgccgtgctctggccgccttgaattgtgggagatgtagtctcttttgcgcgcctctttgccgtatcccagttaagagcgaggttttcaaactactattcccaggaagacgggggtttcccaggtgactttgcgaaggcatggcggggacactgtgaatgtcagcccagaaggtgatcagagcctgttaattaaaatggaaagaagacagaagggaaggtagacatcaggttctccctggagacttttcgttttcatttacgctgcggaaactgacgtttttgcctaacaccccatgtaatgtaaacgtataggcttgagtacgtgtccggccgcatgtgtagtgaaccctaaagctttcctaattgtagttagcatcgtccctaagcggaacgattttccgtgaacatgatttgtacttttctacgagccgtacagtatacggagaagctgcacaggtcctcggcaaagcgattgcttttgccatacatcgtgcttaacaaagcgtgcttgaagactgagcccagtttgagatgtgggcttcaatatcaaaagaaaacgctgcgacctagatgtattcttggagtcacccagaaaaccatctggacgcagggaccgagcccccgaaaagcaaaggaggatggcagcaaacaagtgtctgtgcacaggagtcagagagggggaaccgccgtcccaacatcacaaaaaggtaaaaaggagtactttaatgattgggctttcaacagacatgacaagagctgccaatgcccttttataccaagttcactgctaaaggtgaaaaagcaattcacatgaatttttaaaaaccgtttaaacataatttagaactagaacatatagatctacagttttcttcacagattggaactcagatgtgaaagttgatcttgaatttgatataactttttttcattatgtttgggaaatttttctcaagttatattggctctgttacatataataaagagtaattggataggataaaaagagagagagagagattattgactcataactggtagggaaaactttcacatgttacctgcagtaatagaaaaacataaaatagggaggatggaatgtaagttgtcagggaaagtcagagatgtattcacagatattttaagatttttttttaatgtcttcatttcgcatgtgatttgtaggaaaaaaaa

SEQ ID NO: 7724 - DNA, 6000 bp, Homo sapiens
gattgggttcttcactccattcacttctaatgttacaattgatatagttgggtctgtgtctgcttttgattgggttgttcactccattcataacgattgatatagttgggtctgtgtctgcttttgattgggttgttcactccattcacatctaatgttacgattgatatagtggggtctgtgtttgcttttgattgggttgttcactccattcacatctaatgttacgattgatatagtggggtctgtgtctgcttttgattgggttgttcactccattcacatctaatgttatgattgatatagttgggtctgtgtctgcttttgattgggttgttcactccattcacatctaatgttacgattgatatagtggggtctgtgtatgcttttgattgggttgttcactccattcacatctaatggtacgattgatatagttgggtctgtgtctgcttttgattgggttgttcactccattcacatctaatgttacgattgatatagtggggtctctgtctgctttagattgggttgttcactccattcacatctagtgttacgattgatatagttaggtctctgtctgcttttgattgggttgttcacaccattcataatgattgatatagctgcgtctgtgtctgcttttgattgggttgttcactccattcacatctaatggtacaattgatatagttgggtctgtgtctgcttttgattgggttgttcactccattcataacgatttatatagttgggtctgtgtctgcttttgattgggttgttcatgccgttagtaacgatttatatagttgggtctgtttctgcttttgattggattgttcactccattcacatttaatgttacaattcatatagttgagtctgtgtctgcttttgattggattgttcactccattcataatgattgatatagttgggtctgtgtcttcttttgattgcattgttcactccattcataacgattgatatagttgggtctgtgtctgcctttgattgggttgttcatgccattaataacgattgatatagttgggtttgtgtctgcttttgattgttcacttcattcacatctaatgttatgattgatatagttgggtctgtgtctgcttttgatcgggttcttcattcttaacgattgatatagttgagtctgtgtctgctattgattgggttgttcactccattcacatctaatgttacgattgatatagttgagtctgtgtctgcttttgattgggttgttcactccattcccatctaatgttatgatttatatagttggatctgtgtctgcttttcattgggttgttcactccattcacatctactgttttgattgatatagttgggtctgtgtctgccacatcttattttctgtttcatgcacctcacggagcacgttgtttctgtatccttccttaactgctttcttttgcatggggtgaatattttctaatggagcattttaattccactaattagatatatatatgtatttttttttgagatggagtctcactgtgttgcccaggttggagtgcagtggcacaatctctgctcactgcagcctccacatcctgggttcaagcaattctcctgcctcagcttcccaagtagctgggattataggcgcatgccaccacacccagctaatttttgtatttttagtagagacagggttttgccgtgttggccaggctggtgtagaacccctgacctcaggtgatccatctgccttggcctcccaaagtgctgggatgacaggcatgagccaccacacccagcccactaatgatattttaaagttttttttttttttagttctttcttttagtggttgctctggagtttaccacaaataatcagaacctacttcaggtttgtgcgtaattccagtgagatggagatattatgcctatagagctgtattcacttttctcccttttggtgcgattgttgtaatacacattgttacaattgttgcttttgcttcactgtcatttccttagaccattacacttttgctcccacacacctcctttgtgcttttattggcaaatacattgcacatatattacatttctatatgatgcaagcttaatacgttatatacatcttatttttatacagttgctgttcaaatccgttaaaaaattcatttatagtgtcttttctaattacataattacctttactaacactttttgtgtcgatccagattatcatctgggttcacttgctttcagcctgaagaactttctttagtatttcttgtgaggcaggtctgctagcagtgaattctctctatttttgtttacctgggaaagtgtttattttttactttcatttttcagcagtaactttgctggatataggattcttgattggcagggtttttttcctttgagcactttggatgtgctatcccactgccttatggcttgcagtgtttctgctggtaagtcagccgtttatttgtgaacttcccttgtaagtgatcttcattttgctcttgctgcttcaatactttttccttgtctttgaccttcgttacttgtattatgatgtgtccacctgcgggcctctgtgtttatcctgctgggagttcattgagcttcctggatatgtaggttattgtttttaaaaaattgttttttttttcagcattatctctctgcatagtttttcttttcccttctctcctctccttgggtattcccattatgcatatattggtgcatataacggtgtcccacacttcctaaagcgctgtttggtttattctttttctctctattcttcagcataattcctgtcaaactcttcatgtttactaattcttttctctgccagttaaaatctacttttaagcttttctagtgatttttaaattattttatttcaattattgcacttttcaattccagaatttccgtttgggtatttttttaaatgtccatctctttaccaacagcctctatttgtggcatgttcatttatgcgtcctttagttttgtgaacatattgatagtggctgctttgaaatctcattcagttaaatttgacatttggtcactctcacagcagtttttgttgctttcttcctaatgtatgagtcatactttccttctttttctttttcttccttccctcctcctcctccacataccctgtcattctttgttagaaactggacattttagacaagatattctagcccttttggtagtccccatcctgggcctgttattcactggtttagtctttggtgactggctggcttactgttgtgatgcctgtgtgcccctcttcctccccagcaacagtctcggtgtcgaagcaccagtgtgccaccgtcaccctgggatgacagggcttggggagcaacctcttctctgtctcactgaccacacccagtagttaaactcctagcagccagctgaaagctctgttattcctttacaacctgctcatatcgcagctccttctcattgctttctgagagtgcctgacattgctctgaccccaggagggctcctgccagctgtcttctcccctcattccccggcaccttagccagcgtgcagtctaggctacgtggtcagcacacgcatgaatcctaattcccttcaccaccacctccaatagcgttgagagtgcccttcggtgtaaacttcttcatgttccattgcaaaggaagtcagttcctttgagaagagattacttccttcatctccctccaggcaggaatctctgagccagggatttgggggatggggacagctgcgagcctcagtgtgaatgacaccctccctctctaggagctgagagcttgatagcaccctgagaccccattggcctctcctggcctggaatcactgcagcaagggcagtcaggccctgccttctcagtgtgccacacccaaggccagcctcccacccacgagagtggggactgggcaggaggagggagccccacccctccaccggactccccaaggacgtagccccaggagctgagggcggaatgtgagatgctgatgtcagccctttctagggaagaagccctcctgactgggagctgtgggtggggtggaggtgggggtgggggtctgtgttcgtggctgcagccattccacgtggcgtctccccctggccaagctgagaaggaggatgcagtcttgacacagataccacaaatgctcacctttcttccagaattttcacatataaatagatgtttcttcgtttgctgtttgctcttaagaccatttcccaaggctttaaaaggtcaggggttttaacattattttcaccagtttcctgggtcagctaagcgcatccgctctcaagcccgaagtgatcaccatgaaatcttgctggttttctgggtttttccaacaggaactgggcctgtcaatatcccctgcacccgcttccgtgggttggggcgggaagggtggcctgggggacgcctctggtcctgggaaaggaagggcaaggcgcccccggccctccaagaggcctgcgcccccaaccccgtgtcccctctccccgcagggcgagtgctcccccaagtgccgcagcctgttcgtgctggagaccgtgtgcgtggcctggttctccttcgagttcctgctgcgctccctgcaggccgagagcaagtgcgccttcctgcgcgcgccactcaacatcattgacatcctggcgctcctgccgttctacgtgtcgctgctgctggggctggcggcaggcccgggcgggaccaagctcctggagcgcgcggggctggtgctgcggctgctgcgtgcgctgcgcgtgctctacgtgatgcgcctggcgcgccactcgctggggctgcgttcgctgggcctgaccatgcgccgctgcgcgcgcgagttcgggctgctgctgctgttcctctgcgtggccatggcgctcttcgcgccactggtgcacctggccgagcgcgagctgggcgcgcgccgcgacttctccagcgtgcccgccagctattggtgggccgtcatctccatgaccaccgtgggctacggcgacatggtcccgcgcagcctgcccgggcaggtggtggcgctcagcagcatcctcagcggcatcctgctcatggccttcccggtcacctccatcttccacaccttttcgcgctcctactccgagctcaaggagcagcagcagcgcgcggccagccccgagccggccctgcaggaggacagcacgcactcggccacagccaccgaggacagctcgcagggccccgacagcgcgggcctggccgacgactccgcggatgcgctgtgggtgcgggcagggcgctgacgcctgcgccgcccacacggagaccccctgccccctccagctgcagcgtcgggacccccgaggtgcgccaaggggtggggggcgtctggcctgggggagcggctcctgccggccgcgtcctcggccctcgtgcgtgagcagccccagaacttggcggggccctgcctgactccccgtggcagcgctgggcaaagtcactggcctttgtcctcctgccccacccctttccttggatttttaattttctacgcctagctaaaaataaatttagtaagtccgagagattccacgcctgctgtggatgacttcatccccctgcctccagccagggaggagggagcacggcccctgccaagcccccatggcatccggaatgggcaggtccctgcagaaggaggccctccgcatccacctctgcccaaggccacatcaccttcccagggatgggacagaggtttgagccaatgctcacagcacccccagtgccaccgcagtaaccgccctttcgggggtcggggaagagggttccagccctgacctctaacctccatcccctgacaccacctccctagggaatctttaaggcttgacctccgggagggtgacaagggcctcctgacactccctctgcacaag

SEQ ID NO: 7725 - DNA, 6000 bp, Homo sapiens
cagcctcccgagtagctgggattacaagcagccaccacaatgcctggctaatttttgtatttttagtagagatttttgtattttaatttttgtcttgttagtttcaccacgttggccaggctgctcttgaactcctgacttgaagtgatccgcccacctcagcctcccaaagtgctgggattacagacgtgagccactgcacctggcctcaacatcccacatgctaattttctaagcagaatgtatgtgtttgactaatattgaatcttcatgccttaatggcatcacagtgttattggccagagaaagatatagaaaggtcagatttataaacaagaccactagtactaacactctatataaaacacttggtttcaagtgttttgctaatcgcagttaatgctgtcattaccctctcagcacagcctagcaatttaagagctctgtcattcattcattcaaaaatatttattaaatgcctactatcactaggccccgagtagaggcaaaggataacaagatgatcagaaacatatatgattgctgctcttgcgctcccattgttcagtggtgagataaacattctcaaatcaatcacacaaatgaatgtcagtttactaccatggtaagggctgctgttgaactattctgggagctctgccctggttctctggcagtgaaatgtctgcaatcagggctgtccctttcttcattgggagaaatgatagcagaattcaactttccactggactagggccctatggagtctagggcatgcggaattggtatttcttagcactcccctatgcatctagtacctgagatcttctgtagtgtccttgatctcaaagtgtttatttcctgcctccctccatgcaatgcacccctcatactcatcctattagaagggtggctagcagagagtcagttctctccacagtgaatttaacaaagagactcaaccttaggtgagtctctttgaagatactaagagtgtagtgacccatgcaccttttgagccttctgctcataagtaaagttgatcccaaatgatcacttggctcaatacctacagaagagattagataatcgcatattgacttgagatgttcagcaaagcatgccctatgaagtaagactgggatgaggtctgaagaaaatctagacttaatcagacaatgagccaagggaatcatgcctccagtagagggaagagcgtttgcaaaggcagaaagaaacaaaagggtgagaaatgaatccagcacggctggatcaccaagatagtgctagataagtctggaaagatgcaggaccatgtcacagggccccagaggtcacgtttaacatttgaatctttatatccttgctagtgttggggggaggagcaaagaaagctaatatctactttgccctctgaaaacatccttttggatggagtggaaggagaaggacagtggaagaggagaatcggttagaagacaaatgtaatatccaggtgcaagaaaatggttactgggactaggatggtgacagtgatattggggtaagtgggtggtttccggagattccaaatcaatatctcttggtgatatggcaggagagggaagtgtccaaaaagagtacccaggtttctgacctgcgtagaagacagttgttccattcactgaagtacagaactctacaggagcccagtacttttactgctggggtggagatgggggcgggagagtttggttttgaaggtgctatgtatgcagcactttgaagtatctaagtgaagttggcaggtacctgactctcacatgggagttctggaacaaaaatataaatgcatgagtcatctgcatagaagaggttttgctggagttcaaatttctctttaccatgcgtcttctcccttttaaaatttgaagatcatgtcctctgatagagaaaatagtagaaaaataaaagtgtgagagtttgatatttgtccttctcctccctcctccctactgctcctcctcctcttcctcctctttcattatcatctgttcacattgtaccatctggaacaagccttgggattttcctcattctattcattctaagccatctcttttaaaaagtcttttttgtgtttactgtccttggctttttttttttttttttttttttttttttttgagacggggccttgctccatcatccaggctggagtgcaatggcacgatcatgactcactgcagcttcaaacacctgagctcaaaggatcctcccacctcagcttcctaatcagctgggactacttgcatgctaattttacctggttaatttttttattttctgtagagacagggtcccactctgttgcccagggaggtctcaaacatctcagcttcccaaaatgttgggattacagaagtgagacaccgtgcctggcccttgtctctttttaaaattcacaaacctcatttcattctgggctttagcccttttggggcactttgtgtaggcacttatcacttacctgtgttctttcttgattgtgaacccatctctcatgtttaaaacaggtttctttcattggaatacttcaaaaccctcattgtgcaattcttttggtttctttctaggcttcctttattctcgtctggatcatttggtaggatgttgctataattacgtttggtgatcctaccttcccctgaattgcctgccctttcatgctcttgatcaaacacagctctccccctcatcttattctcctctgtcttcctcttcctccttcttttattcctccccttcatctttattctcttcttcctcttcttcctagtcctcctctttttcctggtgctcttactcttgcagatttggagatttgttttcttgctgaaaattagccatgataaaacaccggcacaggtggttcttgagatacgtctgcagccttctagtcttcaagagcatcccacatttggggtcatcctttctcttccccaacctctccctatctgccttgtgtagaatgtgttatataaaactcattcatataattataaacatatgacaacgttcttttggcaaattaataattttataacatctctttttttcagaaacaggatttattttcttaggccaatgctatcctgataccaaaacaagaaaaagatattacaagaaaagaaatttactgacctagcttccttataaaatagacatgcaagccctttaacaaattgaatacatcaatatatttaaaagatcatatatcatgagcaagcaaatgttatcttagggatgtaaagttaatttaacattcacaaatcaatgtaatgcatcatgttaaaataaattttattgtgatattatttacccatttaaagtagacaatttaatgggtttaatgtgttcacaattgtgcaaccatcaccaagatctaagataaaaatattttcttcactccaataaggaatcctgtacctgttagcaatcacttcctggtccccctaccccaggtccagggcaaccactagtctacttttctgtccctatagattctgccttttctggacatttcatataaatagaatattgtaatatgtgatcttttgagactggcctctttcaattatcatactatttttaagatttatccatgttatagcaggtatcaatatttcatttcttttcattccaaataatgttttattgtatggatatactacacttttaatcctttcatcagttagtggatacaagggttgtttccactttttgactattgtgaataatggtgctgtgaacatttgtgtacaagtgtttgtgtggacatttgctttcatttctcctggtatatgcctaaaagcgtgattgctgggtcatatggtgacactatacttaacactttgaaacaaaccaatcatttaattataattttccttatcatttcttattaaatgcacctgtgcttttattaattcagtagaggaaagttttagggtttggttttgtatggtgacgaagaaaggaaaggtgtaagtctttgctctactgaaattgtattgtccttgtctattgataacctaaaagtgatcttgctgatgtggttgcagattgcactcagtaaagctggattttagtaaatgctgcccacttaaaacttataaagtgaaatacttggaagaggacgctgcaacagttcctttgccccatcccgaaatgagacacacacacacacacacacacacacacacacacacaccacactttcaataagattttctgggatgtttctctatggaagtcaattttttaaaaaatgaaaagtgtttgccaagaggtttctacaacacgtttaattcttttgaagaaaatgaatgaattgttgagaagtattacttaatttttctctaaaagagaatttgatatctcaaggatggaaatctattgttattttactccttaaaatctctctgtttgttagctgactgaatgttctatccaatttgtgcatgtgcacacttcaacattgtaaaaggcatctgtctttccatcactagtcagacaatcaggcatgcttcttttagcaagctgcaaggatcgttccctgatggggacttccatttgacagaatatacgttaccccctatatgggctgcaaagtgatcaatagcccagaatttactgagataatgaaagatagcaatatgattttgctgggacagtgagcatgccagactctgtaagtacaactgctatgcaaaattgcacaggctgaaaaatctgcactaagtattcacttaagtgttattcttcagctatagggttttatttcattaagtatctttatatgaatgaaaatgtaaagttgcaaatcttgagttgtgagccatgaccaaccactctccccccacccccaagtcctgtgtttactgcctcactcaaccacttagaatcggcaaatcatagagagaagctaaatgctctcagctgcactataccaaatcaaagctgagatgaataatgaacttaattttccataaagacattctgtttggcattccagctaataaggtaagctaatagcaattctgggctatggaaaggaaaataaatcgtttctttgtgcttgatttctgtgctaatctatcatctttcttttaacatactggagttaatttcatgtttcatgatgtctgtgaactggggatgaacaattttataaagagtagccccaacatacccttttcctctgatttggttgcttatggtacttgcagggctaagggagaaatccagctttttaataagaatgaaatgtgtatattaatatttttatcatctatagtatggagtgaatttagttaaacagcagaatatttagatgcagcaaagacaggctaaattacttaagcactgattgttgaatatatttactatgatatagtgtaaattgatgttgaatttgctctaagctgcaaagaaaagcagaatacgtacatcatgttgatttctgaatcatttcatttctaagtacatgttattctagagaaggtagtaattttcaattgctaaaattattccacagcttcagtttaggtgagttttattttgtaaaattggatttttaaaataacagcgtgctggtaatgtgaatttttgttattacttttttgattcaccatggcggcaatgattttggttcatgtggaaaatgtacttgtccactaagtttatggaattagaaaccatcagctctctctgagacttctattgctaccttggttactctatctcaaaaacaagaagtgatgaggcacttactaggatggcttcacttttttgtgatatagctttttggtgtttaatacggggattttgattttcatcagatggtagcagaaattcctgaaactagcaaaggcttagcaagctggggaagaaattatcatatttttcttttctagcaaaatgacaaaaatggaaattataactaagatttatgttttcaga

SEQ ID NO: 7726 - DNA, 6000 bp, Homo sapiens
gaaaacctgcctcatactctaggagttatacgcaccagatatatcagaactgggcagtgtggcaggggtgatcttactaacatcagtggaaatgggaatgttgtgtatggattattgatatagggattgggtcattgttttgttttgtttctgataatcattttgactacattaagaagacagtgagtgaaatcccagttttcagtattccagaatagtctgtgacttttcaagactgagaagtagttatttgattaggaaaaaaaattaaaatctcaattgcctatgttttgagacagcttttatcaaattagtttaaaagcatccccaccatctcccaaccattttgtgatattatattgttttaatttccatttgatttcctattttaaaaataatttgtagttcctctccaaccagtctggaatatacttccagagaccccagagcaagctgaatgcattgagggaattctggaggggaggggagagaggtgaagctgaggctcccaggacttgctaggctcccttaggataattgtgtttaaccattttctagccatcccgcctggacagggcaacatttaaggacaactagaagtgatggtgaccatatctctctgtttaattgcatgtcagcaaatagcagaatgtctgtaaagtcacagggctctggtgttgccctgtgtttgggaaggtattttaattgtcttgatttcccattccctctacctagtgatgcaatgcctattaataaccgtgctttatcctcagactttagtgctgggaattaagttggcactttctcatgaggccggtaggcaacgtgtgttccagcactgtgggaagcacacacacacccatccctctgcttctaggagggaagcctagggagaaagtagggatgtgtgtgggatgtctctgcaaggacgtcctctcacacattgtctatacgtagcaaaaaatgagaaatagcccagcggcccatgtcaggcacagggttaacagggaatccttgttccctgttctgtttccggctgagcagttgtccttgggggcagtgccgtccctacgggtgattttgacattggcgggaacttgttttccagtgttggcatgcacaagcatttatgtgttgaaattcataccattgtatataaagtgctttctttgtatttctcttttatattacagttaaggtttatattgatttcttttcaaaattgtatttcaagattgtaaaggtggcattatacagtcttgagggacaggcctgaaatgctgatgttgtttgtgtctgaatgttggggttatggatgtctttgctttctgtatgtgcatatcccaagtttttacagcgaatgtatattacctgcttactaaagacttcttgttttgagctttcagaaacagattttcagtgtcttgctgtgaatggagcagcagtattaatcactgtgcagtgctgcacacacacagcctttagccttacatcagttctactcttgactagtagatggcttaccttctctgtgacagtagagaagggcttaatgcttaaatgagatagggtgagtcagtcgtggttttcaaattttagtgtgcataaaaattgtctagaaagctattaaaacttgagtcctgggaccccatccccacagaggttcttatctagattgtgttctgagaatctgcatttctaacatgctgctgggtggcactatgctgctggtcctgggttcacactgcttctgtgatgggagccaggcgtttggcccattgcccagttgatagcaggggctgagttggggaatgttccatcctctgtggttaatctattctgagcaggttttggggctttgtaaccatgtgaattttgtatctttgttggtgaataatttaccaaatactgttatgttgttatataatataaaacttactcttcatcttttatttttagatacttggagagaaataccaaagtaatgttcctcactcagtaacactggttggaaggatatgcgatgacttgttgctctctatgaggttttgtttttttgtttgttttttgagactgagtctgactttgtcgcccaggctggagtgcagtggcgcgatcttggctcactgcaacttccgcctcccaggttcaagaagttctctgcctcagcctcccaagtagctgggattgctggtgcctgccaccatgcctggctaattttttgtatttttagtagagacggggtttcaccatcttgaccaggctcatcttgagctcctgaccttgtgatccacccgccttggcctcccaaagtgttggaattacaggcgtgagccactgcacccggccttgttttttattttgaaatggagtctcgctctgttgcccagactggaatgcagtggcacaatcttggctcactgcaacctgtgcctcccaggttcatgcctcccaagtagctgggcctataggtgggtgccaccatgcctagctaatttttgtagttttagtagagacagtttgagaccatggtggccaggggggtctcaaactcctcacctcaggtgatctgccacctgggcttcccaaagtgctgggattactggccactgtgcccagcctctctaatgagttttatatgatagacttactgttttgatttaaaaaatacttttctaaaaaaagatgattgcaggttagaggagaaacaaagtttttttgtactataaaatggagctaatacatgcacagtgcttgaaatggggtcttctagctagtaaactccataaatgtgagctgttaaaatcagtgtcctcatggttgtgtaaaggcagtgtgacattgtggttaggacactggttcaggagccagactgtctgggttcagatcccagcctcttatttcatgtgtgaccatgagcaagttttgtcatctgtagaatggaaacaggagtcagggctcatattcagtcagtagacacgagtacaataggaaataattatgtgctgattggtagaatagccttgacctggcccctgaggtgtccctgtgctgggccctctgggtctctgcagctctagagaataaagagggagtgcctggcacagcaaggcgcatctgttccagttgcacagtggggtgcggtgctcggattttgaacatcacccccagtgatggcacctgcttcttaggatggtcctcaggattgaatgaactaatgcatctgaagggcccagaacaatgcctggtacttagtacatgcccagtaaactttagctcttatccctgtttcacagtagttttaaatttgggaatagggagctaaaatacctaggaaatagaggaagagggaaataatgcatatttattttaaaaaggattacgttttcaaataggtttttcattctgttttttgagtttataattttagagccactgagatattgctgctaaagaaatgcttatttgccaagaattgccaagtgttctcaatgagtgacatttaatcaccaccattattaaagccagtcttttattattgtttattctttaatttataaattttcagtatttctggaaaattcttaaaaagttgaaccgtttagtgaattgaaccttttagtttcactacattcttaggatatttgtttttttgtttttatagcaatacgtttggtttaatattggcagtgtggacacctttgaacggaatctggaaactttacagcaggaattgggcatagaaggagaaaatcgggtgcctgttgtctacattgctgaaagtgatgggtaatctcaaatataatattttgtagactgttgactgtgctgcctgtggttcactgtgttctgtccctgggtgcagggctatacattatattctcaaacaggcctttatcagtttggccagatttttaaaaaactattagtaactcactagtttttgcatgactcattcattttcttttttttttgaggtggggtttcgctctgtcgcccaggctgtagtgcagtcgtatgatcttgactcactgcaacctttgtccccaccccagttcacgcgattctcctgcctcagtctccagagtagctgggattataggcttccaccaccatgcccagctaatttttgtatttctagtagaggcagggattcactatgttggccaggctggtcttgaactcctgacttcaggtaatccacctgcctccgcctcccaaagtgctgggattacagttgtgagccaccacacctggctttttatctttatttttatttttatttttatttttgattcattccttttgtacacatttatacttatcttgatgaagcagtggtttagggtattaacattcaatgcattgacctttggtaggattttagcataaagaacccctttgtatcaaagagtgccattcccatctttgaactatcatttatgtttacatttcacagttttccaggatttttaggtgattcttctctcatcagaacttcttctttgggggttgtctttaataagaccatgttagtaaccccacttaaagtctgggcagatgctccatttatttcgaagagttggttgccatggagcttatttgggaattctgttgcctttgaagaacacttgcaagttaccctcctttgtattaagtgcagaaggtataccttggtgtagctatatatatttatattgatatcttgcaccacatgtgaaagctggaggtgagcagccagtcctaacccgtgttgcgctgtgtgtccccagctcttttctgctgagcatgctgcctacggtgctcatcatcgccttcttgctctacaccatcagaagagggcctgctggcattggccggacaggccgagggatgggcggactcttcagtgtcggagaaaccactgccaaggtcttaaaggatgaaattgatgtgaagttcaaagatgtggctggctgtgaggaggccaagctagagatcatggaatttgtgaatttcttgaaaaacccaaagcagtatcaagacctaggagcaaaaatcccaaaggtaaaatgaaatttaagattaactttttgaaatgtttcttgatctctgaagttataattctgtgaagtttgattacttattatagatagctgtttttctgtccttcctctttctcagcttactaggctagcctctgcccaactcgaggatcgttttgggtcagttctgtgtgcatgtgtcttgtatagtgtatgtattcctgaaaatatctgtgtcacctcctcttggaagattttcttgattcgtcttccttttccctccaatctgatttagatgccctatctctcagcaactgtaggcccgctgtagctcactgacaatgtcacactctgctgtcacccagtgtcccttcgagggatgtatgtggacaggacacctgtgctggcgctgaggttcacggcacaggatccagtggagaggacacagcactcaccatcaccttcccctttccagcaaatatgctcttgcccactgtgctagtggtgggctgtaccctacagggcttggtgcccctagggctaggcgtggagcattaacttcatatttgttaaatggatcagctattaagtaaatgaataaaaaggtataattcttttaaaagtccatgaataaattttactttaaaggaatcctttgaaagataatcatttccttgatttttatgtcttacttctatagataaaaagtcatattttatgaatttataacttacttagtacccgtttgcattacacctaactgtctctacaacttaatataatagttgtgtagggccaggcgcagtggctcactcctgtaatcccagcactttgggaggctgaggtgggtggatcacctgaggtcaggagttcgagaccagcctggccaacatggtgaatccctgtctctactaaaaatacaaaaaattagctgggcatggtgttgtgcgcctgtaatcccagctgctcaagaggc

SEQ ID NO: 7727 - DNA, 6000 bp, Homo sapiens
acagctcccaccaccagaacccagagctcaggagcacagtcctacactggctctctctaaagcctggattacaggactgccctctagaaaagcctgaaagcccctggtaaacagtactcagccactcagtcctccttccccagctcttctccagaagagcaatccgagaaaacacccagcagcgcagaggaaagcggcacagtgttgctaacttatcttcagcaagatccacggaaccccaaaaacacagcccatgggccccaggacgcctgcagccctgctgctcaaaggctttctgtagcattaactcccttcctaaaccacaagtggtgtctacaggtcttgctgttctctaaatttcagagagatttttctctaaatgaaatttagagaacagaaagatttaaaaccatcctgatttggtcagatacagaggtttaagattgttaagttattttgtgttcatttttttactaaagccattaaaacttccttatcaaatgaatattcatggaagcgctaagattaatcatttttggagccaaacagatcttgatttaaatcccagctgtgcaacacaaagcctgtgggactttagaccggtctcttggtctctgggcctcaactcctcaggggtgagtcagatcaggggtgagtcagagagaataggactcccttgtattgtcaacaagaggattaaaatgagacccaccatgcacagcacaggacacaagaccagctggcacataacaagaatttaacacataatagagccttctccttacccttggagcctttaaaaaatataaaaactatatatattttttttggtcaaagatgatgatcaatataaaaatctcactttaggcccatgctccctggactttccaaagagcatctaacagagtgagccacatttggggccacatttgagttatccggggccatgttcttgtgccctgtgatgctgttaactcgatgatttgtgcgcccctcccagccaaaaaacaaaagtcggttttgcttttccttgcagtcccttgaacagttataactaccccaattgtctgctctgcctgccaagacctacgccttcaggcaaacgaatcaaccaagtttctttctgggtacagattataaagctatgaaaaacttgtctcttttctcctttctcatccaccaccccatctctgcctcctggggagcactgcagagttagagccttctaagaccttgtttactgcaagctcaaggtgatggagcttggtcttcgggccaggagttaactccagaggttccaataacataagaaagaatgagatttaaagatcactctgccaggtgggatggttcatatctgtaatccccagtgccttgggaagctaaagtgggaggatgccttgagcccaggagcttgagacaggtttcaatagggtatggacagaggaaagcagcatggaattgaagggtggacatttattgcccagcaaaccacaaaccctggaaggaggtggaagggctctagacctgtgttgtttgcagtgaagaaatcaagacacaaaaaagcaaatgggagaggacagcagacggctttgaatggatgagagccagacatatggcaggtgcagacccctatccaagttctttaagccaaagacattgttgaaatatttggatcattgacgccacctcacagcaggtccttgtgaagtttaaatggagtgagttttgcttcttctaattgtcatttagtgtgttctacaggcaatctctaagcaggaacaacaggagcatagcaatgcagcagaatttacaaatcctacttggcactgagaaaggccaagtcgagaggaaagtgactgctgtcaattttattgcagtttgtgttggagtagggggtgctgtgtctggtctcttgcatctgttgttattacccttgccacttgtgaaaggagtgtgacatggtggtcacaaggcgggctctgctgtatcctctccagactgtggctttgggcgtttgcccaacctttctggggtagcttcctctgggggttgagtgagtgaatgcatctggagaattaggtggtgcccatggcatgctgagcactcataaaggccaccaattcgtgtcactggcccttcaaccaagaatggggccacacaccacctgcagcccccaccaccagcttggcagcatccacaaacgtgcagtagcaatgcttgattggtggccttttgaagggaccccatgggcacactgtgtatctgtccaaattcagggctccccatggatttataggattggcagctgcaggtcagcaatgcacagcaactgaagctgggctcccaaaccacctgtttctaaaaaaatattacaaccactttcaacatgtctttttttttttatgaattttaccatcaaatgcatctgaaattggaaatatatactaattctgattacatttaatggactcatgagatgggagtatctgtcccagcagagtctccatacatggcccatgctggccacaggtgttggcccctgtattaaccaggattctgaagaggaaaataaacagcaggagatgggtagagacataaaagatttactataaggaattggcacacacagttatggggctgcgcagtcccaagctctacactcagcaagctggagacccaggagagtagatgatgtgttctggtctgaaagccagcagacgtgagacctaagaggagctcacacttctgtgctagtccgaaggcaggaagagaccagtgtctccatcaggcagtcaggcaggaggagccccccaggtcgtcgaggagctggtctgttatcctcaggctttctgctgattggacaaggccctcccccatcccagagggcctctgttttactcagtaacctgttcaaatgtgcatctcacccagaaacaccctcagacacacctagaacactgtctcaccacatacctggcaccctgaaactcagtcaggctgaaacatgaacaccaaccaccacaggccccctcccatcaccgatgcttccccagcaggtggggcacagcacacaggacccctcccatccctgaggcttccccagcaggtgggacacagcacacaggcttcccctgccatccccgaggcttccccagcaggtgggacacagcacacaggcttcccctgccatccctgaggctttcccagcaggtgggacacagcacacaggccccctcccatccctgaggcttccccagcaggtgggacacagcacacaggcttcccctcccatccccgaggcttccccagcaggtgggacacagcacacaggcttcccctcccatccccgaggcttccccagcaggtgggacacagcacacaggcttccccgggcctgggcaggaggcacgaaggtgactcatccctgtctgcccaggactgaggtggttcctgagatgcagaacttctggcttttaaaccctgtccatgtttcaggcaaacaaggtaaattggccattccaggcagaaccctcacagcagctacgccctgtcaaccccttccttccgcatccaccggacccacaaacctccttctgaacacttgacctctgacccaatcctttccaaggtaattagttcctttccagacaagtccctagagtgaggccgtgatgggctccccgtggacttcagatcataggctgtgctcccaaatttgtcctccctaggaagtgtcttcctcgccacgtggtgctggctttccccactggtgcactgccgcagtccgccttcaccccagagacacagaaaataagaagtctccagaaatgccagtcccaggagctccacctttgaaacagaagtgctgacgctcattgtatagtcatctttgggaatgatacatcagcacctttaccgttatcccacaggctgtggggtcaggcagtgacccagggagacgagcagtgagaaggaatggactaaacatctcccgagtccaccgagcccagccaccgcctcccagtcagagaaggcagctgtgggctctcctgctcccacatggacctttccttgctttacctcttttttcatcaagggcaccgctgctgttcatctgttcatcccacactcacgtgtgttcacgagaaggatgggagggaaagtggggcggcaaagaataatctttgctatcatctctcggctcaaaattccactaaagctttttctcacaaagtgcttaagatgagggcccagtatattattttacctaaattacaacactttatatatatttttataaatgtaaggggtacaaaagtgccattttgttacatggatataccgtgtagtggtgaagcctgggcttttagtgtatctgtcatcagaataacatacgtgttacccatagggtaatttctcatcacccgccccctcccacccttccgagtctccaatgtccattccacactctatatccacgtgtatgcattatttagctcccacatataagtgagaacatgtagtatttgacttcctctttctgagttatttcactttgataatggcctccacttccatccatgttgctgcaaaagacatgaccttattctttttgatagctggggagtactccattgtgtatatgtaccacattttctttatccattcacccattgatgaacactttagttgattccatatctttgctattgtcactagtgctgcaataaacatacatgtgcaggctccttctaatatactgatttctttatattttatggagggaatagagtttctttaagcgagtgtggctggtttttattttctagtgtactttgcaactaatatttctgtatactcccttttaggtgattgggagattttaacttagatctccagcaagtgctacaaggaagaaaagatcctgaagaatcaatcaagttttccgtgaagtcaagtccaagtaacatccccgccttaaccacaagcaggagaaatgaagcacattatcaactcgtatgaaaacatcaacaacacagcaagaaataattccgactgtcctcgtgtggttttgccggaggagatatttttcacaatttccattgttggagttttggagaatctgatcgtcctgctggctgtgttcaagaataagaatctccaggcacccatgtactttttcatctgtagcttggccatatctgatatgctgggcagcctatataagatcttggaaaatatcctgatcatattgagaaacatgggctatctcaagccacgtggcagttttgaaaccacagccgatgacatcatcgactccctgtttgtcctctccctgcttggctccatcttcagcctgtctgtgattgctgcggaccgctacatcaccatcttccacgcactgcggtaccacagcatcgtgaccatgcgccgcactgtggtggtgcttacggtcatctggacgttctgcacggggactggcatcaccatggtgatcttctcccatcatgtgcccacagtgatcaccttcacgtcgctgttcccgctgatgctggtcttcatcctgtgcctctatgtgcacatgttcctgctggctcgatcccacaccaggaagatctccaccctccccagagccaacatgaaaggggccatcacactgaccatcctgctcggggtcttcatcttctgctgggccccctttgtgcttcatgtcctcttgatgacattctgcccaagtaacccctactgcgcctgctacatgtctctcttccaggtgaacggcatgttgatcatgtgcaatgccgtcattgaccccttcatatatgccttccggagcccagagctcagggacgcattcaaaaagatgatcttctgcagcaggtactggtagaatggctgatccctggttttagaatccatgggaataacgttgccaagtgccagaatagtgtaacattccaacaaatgccagtgctcctcactggccttccttcccta

SEQ ID NO: 7728 - DNA, 6000 bp, Homo sapiens
gaacagtgtttcaaaagagaggttttcattttgtttgtttgtttttttcttttttttgagacagggtcttactctgttgcccaggctggagtagagtgtcacgatcatggctcactgcagccgagacctccctgggctcaagtgatcctcctatctcagcctcccaagtagctgggactacaggtgcacaccaccaagcccagctaatttttttttgtattttgtagagacagggtttcaccatgttgctcaggctgaatcgaactcctgggctcaagcaatccacccaccttggcctcttaaagtgctgggattacaggtgtgagccactgtgcccagcctcaaatgagaggtttgaagtcagacaggtctgaaatctcagctcaaccatttgataagcacaaaatcttaagcaagcttattaccctctcagagtgtcactcttcttttcataaaatgggaagaataataatatttatctcattggttattgttagaattaaatgagattatacaagaaaagtgccaagtacggctggcccggggacagtgctcaacaagcagggtttctgttgcccaagtgcgtctgttaaataaatgtctaatattctacagcacacatgtgctctaaagcaaatgtctgcacttcattcaaactcaaaactttattctaggggcatagctaatatgtaataataatttccggctgggcacggtggctcacacctgtaatcccagcactttgggaggctgaggcaggtggatcacgaggtcaggagattgagaccatcctggctaacacagtgaaaccccatctctactaaaaatacaaaaaattagccaggcgtggtggcgggcacctgtagtcccagctactcaggaggctgaggcaggagaatggcgtgaacccgggaggcagagcttgcagtgagtggcgatcgcccactgcactccagcctaggtgacagagcaagactccgtctcaaaattaataataataataataataataataatttccatttattgaaatcctatggaattgctacttctcaactagccataaactcatattttttcaccaagccatcgtgagaaccgcatagatgaaagctatctgcacagtaatgaacacgaggttttcatttaaatcaaatcaccaaattttggaagcctggaatggagcagattactacgagctaaaaactatcaagtactttacaagtattgttgcatttaatccttttaccccgtgaggtttgtattattataatccccactttacagatgaggaaattaagacttggaaagttacgtaactgatacaagcactcataactctgctaagtggtggagctgggttggttttgatcatgcttacctgaataacggaatccccaaaagataaaaactgtgttatgatcatgattgtgcaggaaaccagtgtaaaatggcaatattgagaaaataagagaaggactctccagaaattttttttttattttagttaaagaattcttagtgcgcttaatttgtagtaccaccaaagaggatctatctttacattaacgattatcataagatggaaagaacataattaatgaaaagaggataggagatgaaacagttctttttgttttctgttcaaatgcagtttaataatttatggatctctgatgaggctttggtgtgttttcttatttcctctccaattcccctctttttgatgcatgacacaaatacactcttaatttaacccagctagattctacattcatgagctgctcaatggaatagcttttctctacttacactctatcctcttccatcttttccttagatatattgggttgggcccatcataggagctgtcctcgctggtggcctttatgagtatgtcttctgtccagatgttgaattcaaacgtcgttttaaagaagccttcagcaaagctgcccagcaaacaaaaggaagctacatggaggtggaggacaacaggagtcaggtagagacggatgacctgattctaaaacctggagtggtgcatgtgattgacgttgaccggggagaggagaagaaggggaaagaccaatctggagaggtattgtcttcagtatgactagaagatcgcactgaaagcagacaagactccttagaactgtcctcagatttccttccacccattaaggaaacagatttgttataaattagaaatgtgcaggtttgttgtttcatgtcatattactcagtctaaacaataaatatttcataatttacaaaggaggaacggaagaaacctattgtgaattccaaatctaaaaaaagaaatatttttaaaatgttcttaagcaaatatatacctattttatctagttacctttcattaacaaccaattttaaccgtgtgtcaagatttggttaagtcttgcctgacagaactcaaagacacgtctatcagcttattccttctctactggaatattggtatagtcaattcttatttgaatatttattctattaaactgagtttaacaatggcaaaatacagtatgtcacagtcatgcacattcaagagagaaaatataacaagttcttttatgagcaatcccttatgcatagactaccttggcaaaagagcattagcaagtgtcactgctcatcagttacttccttccatttatatcacaaatacccaagtttcaattctaacttcatttcatggtatttcttcctcctcaatgcccaaggtaatgtgggactaaagcccagaaatttgaaaagaatattcagaaatccttcccaaatcataagggcacctattgagattcaagacaagcagactcgtaaaatcttgtagaggcagaggcaaagttatcatcatacaaaaatcacaaacaaaaaggagatctgtattcgggtatcaaacggttgatctgttttcagtgcacaccctcaaatgcaccacaccagttttacgatctaagcttttaacccctttaccactttgcttatttttaaaaaatttattggcaaaactggggattttgtttgtaactttggttatctatatttaaacattagctgagacatatttttgataacaagaacttagctagttgagtcctggctttttgttgattattaagctgtgttcactctagaaggtgtaaaggccctgtcccaatctctgctctctcacttctcgtgacatttgttgataatctttactgcaagtgtaatgatatttgagtgaattaaaatgcatgacagacaaggtacaacatggttgcagaataaaagggtgaggacatcagatcactctgtattcaaagcttactagacgaacaatctttcatttctggatatattgtagctaacccaacacatttttaaactatttttgttactgactcacttacttgtcaaaataattggtttttctgtcctgctttgccttttgtcactagaatgttctccagaaaccccagtttctgtcatcttaactgtctagtctagccgttaacttagacaaagaagtgcaaatgtcaatttcactaaacaaaagctattagaagtaaagcagaaacctatcactgcaaggagtgacttgtaaataactgatgatcaagggctgtcttctctcaagcatggttccaactctgtgtcactttttagcgttaatggcagttgtgtgtctgtggcagtgagataatggaccactattaaacctgattctcttcggtgctaggaaagagtgatgtgtgagattcccagagagtcgtcacaccagtgttatgcctgggagtgccactggcataccgcaggtgcctaaatcccaggcccctttctcagggggcgtggccacaccacacactgcgccagtgacacatagttacttcctggctgggacggcacctatagaaactagggtacaaatctcccaaagatggtttgcaccgtcatttcaaatgtttgcacaatataccacttagaggcttaaaatcagggtggttcagttcaaaaggtaatatcaaccgtcagcaaacatgtcagtttaaaaataagttcggttaacaaggaagtgttaagcagattttttgaatacacttacaatatactggcttataatcatttttattctgccatatggtttatttcatatacactcacttttacactcacttccaattatagcattcaataagttacggttaaagaaaagtgaatggtgtttttgtaatttgttttctagtagctagcagagagcctggcacatagtatgtattcaaaacaagtgtgttaattaataaaaatatataaatctcatttgagatttaagaatataaataattttcttttaatctttattttgctcaatatttaataggaagtatgatttcaaggactactaaaggaaggcaatatacatgtgaaaaccataaaatacattttttgcattctactatttttaggggcatgaaatgaatgaaagctttagcacttttttgcccctacatatgagacaacatattttgtatttcactcaaggctctgccagtaaaaagtaatgaaattgtacctttctaatgacatctatgcagcaggggtctatcgccttgtggatggcaccaaattatccaagtgtattaggagactggggcttttttctttaatcccttcttattaatgaagtgcatagtgctgctcccaggagaccactgctgacagatacacagagaagagatcagagaggaaaaactgggaagacataaatgaattatacccagccatgaaacaatgccaactgtctcttccctaaggaagagtacaagtaccctaaaattgaaaggtggtccctacactgaaaacgcacatagtttgtcaaaagtgtacaaaagggaaagagtcttattttaagctttcaggctttcttaaaaacttggggaccagaatttcaatgtatgtttccattgttgaagataacattttcttcaaagagccttaaccttttgtactggaaggaaatattttctggacttaagtagttgcctaaatttaagattcctacactttatttctgccattgatgcttttcctaaacccttatactatctttttattatctgagccttttcctaatgcagctcataggtgctagctagagctgctgctcagtattgaagactttacaaggagattagaaatctttggaaaacatatgtgatgaaattgagctatatgatttatcagagatctgattccaaagagcacagaatactgttctcagaccatgaaaccagacaacacatgtattggtttaaactcgataatgacaggaaaattccaaactagagcagtaaattcaaatggtaagatgaatcctagaaggcctctgattgcagcatgttgacaccaacctcacgttacgaacaattcacagagaatttgcctttgtggcaactgaagatggaagtctggggggcacagacaaccttatcaaacaatataaaagccaatataaattctcataagcactatagaatttgcaaattcagaacattttatacctaaaagtaattctgtctttcctaaagtgtttttaacatgaaaattagtaggaagatgtggttactatttggaaagtgtaatgtaacaaaactctcttttgttaccacaaattttgtgagtttagtactctacagattgccccataagagcagtagcttttgaaactcataattctctgaaataaatgaaagacatttaattcaaggatcaaaaattgtggccatctttgcaaatgactacctatagcctgtgaaaatacatttcaaaaaatgttatgtgcaatgaacactaaatttaagagcagttacagtgtgactcactcatgtttaaaaaaaatcgaagagctaaaaaatacgtctaatttatgtaacccattggaatgtatttctaggttctcttcaggattaattaaataaacatgcaatttatgaa

SEQ ID NO: 7729 - DNA, 6000 bp, Homo sapiens
acctaatacactatagataaaatgctaaggccctactgtgctctattgtgttcccatcagactttataaagaaatactgcattttcgagataaaagagccttagacatgttaagaaatttactcaaggtcatagagctaggtctacttgaatttatagccatatctgtttattatactatacccctctacattccagagtcagaatgggattctttttctgtttgtttgtttggtggggttccttgtaattcagggcctgcttatgaattactcgcctctgttgagttgctcatctggcaactttataactcacttatgtgaccatacatacttcaagttacttctttggttatattttccatgaaaatgttgattttgattttcaaatactgaaaaacaataggtaaataatatcttcaaacaagagtagatttttttaaaataaccaggtttttcttctaatattggatcagatcactacttctctgagcaccagatgaatggctatcttgtgtttagcagccaggttgtatcaaatatatggatctttaaatgccaaaatcataataaataacacaagataatcacactaagaaaagcatatgaaaactgagagcagtgaagagttatgtcctcaatttcacacatactttgaagaacaaaaaacttgagaaaaatagtagactaatccctagcatcattatattttcttctttaaaaagaaaaatctccctttcatcccatatagttgaatttttcaatgttaaaggaacttcccagaataagatagagagcataggtaagagtgggagtaaggggacctgggtcccattctgcattccctactttccagctggtggccttgtgtacctttttaagtctcagggtgtcccatctgtaaaatgaaggggttgcagagaccatctttaatgtttcatttagaacattctatgactctatgaaagggatattacccagggaaagtcagctttaatgtacactaaagctaattatggagaaaatgtaatttgaggggtactttctaagggagagggacaatcctagtttgctctgaagatggggagaggaggaagagtggagaagggggtcttcattcaacattgggaaggacactgcgctaggtgtcagagacaaagacaagtgtagggcctgtctttgcggtgtgtatctatagggggtagggaaggggaggtgggggagaggaggctctagattagactactactgctgagcatttatgtccaaagcaagaacccttgtacacaaacacccacatggtgaatttgtacatttagcatctcctgcctgacaaaacacaccagaacaaaaattattacgattttcgaaatgaatgcttagaaacaaatcatgatctctacacacatataaaaactacacatatataaaaatgaatgcttagaaatgaatcatcgtgacctctacatatatataaaaacgggccatgtgttcagagcacatcatttaatcaggtttccataacggtttgcagacctcttatagtcaacaggcatcactccataggtcagaaatgaaggattaggttgatttttgatgtgtgaatgcagtcatgttttatattattctatatttttttcttgtctccatccatccaacccctaataacacctggttgtttctctgggtcactgacaatcccctacatccctggagttctacaggctgatggaaaaccagtcttcagacaagtaatgctttgagcaggggctaaaaatctgcgagtttggtcatcagttgcccaggacagtgaatggccccgttagctaatcttaggtatggtattactgaggtaaagctgtgtttggatatcatagtcaacaccagatctactttcattaacatcaaatggatgcacaaagtctccaacagcatgattttagactagactattccttcttgtaatcagaggcctattatttattattagcaagatttggctgaccaggtgatcaacttaaagtgaggcaagatgctaaaacaattcacaaccactgaagagtgagaggcatgcaaattggacttttaaaacatgctgcaagtgcttacttaaaggatcaaaaactgttggaatcagagaattccttgactgacagccattccaaaggagattttgaaatcataagtgcttaatttataaaggacatgtttaaagcttcaagtaaatactactaacaagaaatagagttattcatgttgaaatttgttccacctttaaattaatcagaatggcaataaacatcaatgggtactgctaggagtgatgaggatacagtcgaaaccccacgacgagggtcgaagcttaaatcttagccatggagatgagatctctacatctcactctggaatacaacaaacatatccccatatctcaactgaatttttactattattttgcatgactcccagaaagcataatttataaatactctattgcaaagataacttttaggcggactagcaatagtgtgacaataatatctagcaaaaaaagaagagaaagggtaagaacaagcacttctgattactatattaagtgtttcatctcatcttttaaatttaattaacataacctttcttattcttttgaaaagaaagaaaatccaggaaaaattttgtttcataaaaaacttacaatattatgttttaattaaaattgaataagcctccctatgaatattaaatttttaaaagcctagccagcaacagtacattattaaaagctgtatcagttatgtcaagaaattagtagctggtttttaaaggttcatcatcagattcttaaatgatcggtatcttgaaactcaaataaagttaatatttcagtcacccaaagcagaaaagcaagcaataaaggcagaaaatattcattaactgcaatgaagttcaccgatctcccaagtgttgaaaagcttacataaaacggatatttctatttacttgtaaacctttcttaaaaaaggttccggaaaatttattacctcaccagaattagaaaaaacaaaaactgctccccatcccccgctccattccacaaatgcttgtgactcaaacttgtaaagtctctcactgtgttgcacttgaagttcatgccttaaaggaagccagcagaaatcctttacgtggtgagaattctgtatcagtcattttatcttttatataatcctattttctcaagttccggcttttagtttctctcttttttaaaaattgttgttaggggtggtaggagagggtaaaagtaccctgaaactgttggccccaaatgtgaacagtaccactaacaggtagtaatagaaatagaaaacgggagatttcaaataaaataacaaacatgcactctcaaactcccagaggggacaaaagaaaacaaaacaagaacacaaaaacttgggctgttccagtacatcctcaagggtgggagctgaaggtgcgagctccagagaggagccgcggcctccgccctcccccgcccgcaggtggctcccggcgagcgcctcagacaacaatagctaggatgagcttggcctgcgtccttagtttgctgtgtctgcccctgccaggaaagattacccatctccaaagaatgacaaaataaagaagcgtacgttaggctcccaaggagacaccgcccccccttccccaccattcttcatctccattagattccctaccgcggaccaaagatgaacctgctaccaatcaagttcctgcccaagttattttatttcccgcagcccctccacctgccggggcggtgctcggcgcactctaggcttccctccggcgaccccccgcgggctgcagcaaaatacggggcgcttcggcggggcgggggcgggcggctgccgcggatccggccggctacagccgcagcttggtggcctccgattggccacgacgcgggcggggaggctcggcggaggagggaggcgggggcgagggcggcggcggcggcgggaggaataggagaggggagcgggccgcgcagccaggcagcgcgtggggcgagcgcggggagagcggcggcggctcgcccaggtcgcgcagcggaggccgagcggggtgcgcggtcggcgacggagggcggcgcgcgcgagtgagcggcgcagggcgaggaccggcgggcgggtgccggtgcgcgggcagcaggggcggctgcggcagcagctgcgcgggacggagccgcggcgggagagaccgcgccggcccctcgcctcacccccttgcggccgaggccggagaacagtctccaactcgccgggggaccggaaagaggagccgagaagcgcccctcggcccccacgcagcggaggcgcggagtggcgggactgctgctctttgtgggtgcagcacgcacgacccggagcgccctccccgcggcgctgtccccggcgtcttcgtcgcgccgagcggccctggagcggggacccggaggaagcaaaaccacgagcccgaaacctcgcgtggcggagctcttggggagcgccatccgctccacttccacctccacatcctccaccggccaaggtccccgccgctgcatccctcgcggcttccgctgcgctccgggccggagccgagccgcctgcgctgccacagcagccgcctccacacactcgcagacgctcacacgctctccctccctgttcccccgccccctccccagctccttgatctctgggtctgttttattactcctggtgcgagtcccgcggactccgcggcccgctatttgtcatcagctcgctctccattggcggggagcggagagcagcgaagaagggggtggggaggggaggggaagggaagggggtggaaactgcctggagccgtttctccgcgccgctgttggtgctgccgctgcctcctcctcctccgccgccgccgccgccgccgccgcctcctccggctcttcgctcggcccctctccgcctccatgtgccggatagcgggagcgctgcggaccctgctgccgctgctggcggccctgcttcaggtacgcggcggtccccgcgggccgggccacgggcggggtggggcgggcggcgccgggtccctttgttccccgcgccgctgcggggccgggctgcgcacccgggaagggaggtgccacgccgcgccgcgccgcgccgcgcggccggtagctgcgcaggcatcgggctccgtccgggcgccggggcagggttgccggggccagtaggtctctcgcgcctttcctggcggggctctaggggctggattgcgggtcccctctgctccttcttcggggccgagcaagctcgcggggggtgtccccaggcagcaggagggtgaggcaggataactcccaggttttgcagttttctgtgcctttcgcccctcgcatagtactttgctccaatttttttgtttatttctgcagggatgggtcgcgagtttacagtaggaattctcactctggtgtcttagttacgggacttgcctccaccttaccccaccctgcacccgtgcgcctcccggtgctcaagggctctactgtcctattgtctttatcccagtctggagttgcctccttttcttcttctcttgccctcacaatattctgtgttcgtcccacctggaaagaaaatctggccctcttgcccggaggagtctctgccggtcagcgcctgcctgtagaacgagtctggcctctcacgcctagtatctcccccgggcgagaagttccgttacgcggctgctcctttctctgtccggctgcctgtgccctatatgcgccccgggggcgcctttgcctggagccttccgtacttttcataccctcgggagagagccagcgagccttttcatttaatctctactaagaggctcctccgcggcaggaagcacctgctccagtccgggcgcaggttccctcgccactgcacgctgcgggttcccagcccgggggcagcccaact

SEQ ID NO: 7730 - DNA, 6000 bp, Homo sapiens
taagtatcatcccttaccatggaaggcactgggcaccatgttctgtgactggactctatcaatctttcatctttgcttctccttgtctgccctcccaccttccacccccatagttttctgaacaaattctcatttctgttgggctggcttctttttccagtcggcctaggatttgctggccttgagtccagtcagtggctattgtttggcagctcaggttccctgtaaggcaaaaccagcaatctactgaataaacctagcattaagctgagaaaaagaatgaataaagctaacaccatccattaattttctcgttttgacttaccaactgatgacaagcaaggactagatagtagtcgggccttcactttatgtaccagtttttcccctgtcagtgtaccatgtagtacactttatatagtttcttggcacagatgtttaaggcaaaattggtaaagaaagtttggaagatggattacatatatttatttctaaaaaatgaaaaaaatacatgaagaaaacacttaccctgataggcaaaataatgtgtgtgaagataagagctggtgtggtttgtagtaagggcactgaagtaggctgataacatctgggctttcttcccagctctgctacctttatactgtgtgacctcaggcccggtattttacctcccgagctttggcttcctcatctcagaaggacataataatacttgccataccaaccccaaagggatgttgtgaaaatgatatcaaagtggttggaatgcttgaaaatgctaggacatttgcatgatgtgaaagaatgatcttggatctaagatcaaagagttcaggcactttgagattagtaagaaatttgggtcaaatgctgaagtagggctgctaccactacagtggttttcttttaaaattttaactacaatacagaattatcatacagttctatattatttcatatatatagaattattaaaatttggctttaaagtgatcatatttgttctgaaatgtaagacatttaaaatttcttttatataatctaaataagatacagggaccaatatcttttttctcaccagagatctgatcatattcacaatacaaatttttgagaagtatctgtaccacaacattttggaattacatatgtgtgtgtgtatatatatatatgtatatatatatacactcaattatatgtatataaatattccattttatgaatcatgccaatgtcttttatatgatctacaattatataaatacaaattcaattgtctaagcataattcatcaacccaataattttctttagctgagtctcagatgctgagactatgcatttaaacagatataattactatttttaatcagtgattgtaacatgaagatctgaatctttagctaccataaaagagattctatacactattttctttcatttcttccccccaattcactgaaaaaaattagatatttttattttaccatgctcacaagcaaattcaaaacacagtgtatattgttcatcctcactcagtcagcacagactaagtaaaatatcatccatctcattaacaagtacatttttcttttttcagttgcaatctgtgtatacttcttattaatacaactagaaaaccattaattatgatttaatttattcagtttgatacccaaatatttaagagcacggtgtccctagtggacagaaaataataaaaggaatacttggtggtaataaacttagaacaaagccattaaataaaatttatttctgtcttactgttgtaagttatgtctcactattacaggattaagatctttttaatggcattaaaaaatagacttttagatttctgcaaggtcattcctctgttatggggcttacttggctcctgaggaaatatcagttgatattgtgggtttggaaaggctcagttagcatttcctgtgcactgagtatttaatctatctctgttttaaacatgagctgagaccctgaggcatccctcagactatgagagacagacttaatgggtgacccactaggaaatttggtgtttaagcagaaagagacaaccatcatttgttactgtggacagagagtgactgcaaggagagatttctaaaaatatattttacaaatactcgaatggtgcttaccatgtaccagcctctcccatgctctttacaggcattaattcatttaatttaatcctcacaacaatggctgcaccgactaggcttgttttctggtacaacagataaaagtctactcctggggagagctaatcagtcttaacaagtaccgtgggggacacttgccgaacaagagaaatcaagagatagggttaaaattaggggagaaaccgatggcagtcatctatgccagctaggttcatctgtacagtcttcagatttcttatagatgaatcatcaaattctataatgttactacttctctctcagtttatagtaaactttcctttgaaaaagccaaccttgcctgagaagaatggtctaccactaggtcagcaaaggtatggaactctcttttgactagtggtatggtggtattagctttgtaaacaaccagtctaactgatgcaaataaagataaatgaacagtgggattggagaggggaaaatcacaatttttgcttcctcagcattcatgacttctttggcttgcatagattttgtttttctttattttacaaatgagtttccttttaatgttgttccactttgcatttcaaatttcccttaagcatctaaaaatgttacaaaatagtgtcattacctttcaaattaaacatcaaattagccagagaagttgagttgtgagtactccaacaagcaaaatattaaaaaatgaatttcaacttggtgatcccacctagtgaactaatgggatataaggaacctcttacgtcccagacaccatgcttagcattatgcacagttatccatttaatctcacagccttgcaagggggtattatatccactgtttgagggcggagaaaacaggctcacacaaagtagtagcttccaggggtctcacagttaatattaatgaaaggcttgggcttatacataggtgtttcaggttccacattgcaaagcattatctcagggacgatctatggcatgcgcatcccgataaaaacgtaccaaatttattggctatcaactacagttccatctggaaatactcagcaaataatggcagtaaggcatcccgccacttcctgcatgattagttgaaaaagaaacacctgcgcacacacatttgaacaatgtgatacagctaaggacctggacagtcagctagcaggaagaaacatttgaacgaagggtagaccacggcctaggaggtggatgaagacacccgtccgtttgcctactgaagcaagatggggctgaggcgctcaagggcctattggctgcccagaagcctttgcagcgccgcctgaatacagcgaggatgacccagggttcaccttcagcgttgaaggcaagtcctggtataagggacgcacataggtccgcgccacatcctgacactgtttccacaggaagtgcgggataggaggggggattcattaatccaggtcggaaatacaccttgttcctcgaggattttggaaggaaattccacccgcgaagtccccttttggagatgcccttttcctttcaggtacagcatccttcattatgtacccccagggtacaatgtatccggggctcgcaacgcgtccctcaacccccagcagcgcggtcaccgcggggtccccgggcgggcgggggcggcggtgacgcaggaggcggtggggccccggtgcggcgggcgcggggagggggctgctgggcgcgggcctatcaggacgcgcggtgtttcgggcgcggggagggcggggacctccaggtttcctcggggcccggcgcagcgccgcctgccgagttccgagcgagcgcgcgaagcgcgcaggggtctcgagacgttcccgccggtcccggttttcctccgcggctcccccgccccttcacgtccgcctctttctccaaccagacgcggctccgacggcgctcggcctctgctcttccggctccccggctctgcccgcagcgcgcgtcgcccggttgctcttcgcctggtgtccgcgggcccggcgggggcgcctcaccccgggcgcgcggcggtaatgccgctgccgcccttgcggccaggcaggcagctggcggcggccggagtcggagcgcgttcgtcgctggccgggacgccgccctggcctgtgctcagctcccgcggcggccgcggggcgccggggcccggcgcggcatgaggaggcggctcggtgcaggcgagcgcccagctcctcggccccgagggcccccgcgggcccccgcgcgtggcgcgcgctggttgcggccccggcgcccacgctagccccgcgcaggcaggagacgccgcggcccggagtaggaggcggcgcagggcctgccgagcggacgcgggcggcccggaccttaagcacggggcttcgcggcgggaccccgccgggcgcgggcagcggagccgggcgtgctgcagttagctgcccctctccgcaggggcgccgcggcgcgcagcctgcgcctcctcccacctgcagcccctcctcccgccgctgcttggcggagaaaacgctcctcctcgcccttccccggctttcttccgtcctgccgtccccgggcccctagcccccagtcccctctcccccctccacctcttgtccctcggcctccgcgcctcccctcccccgactctctggcctcccattcattccgtccgctccctcccatttcctcttttccgctcgggccctctccccagagcctccccgcgcggaccccgctgcagtctcggggttctcagcacatttatggaagtttagggcctggacagtggccccgagtccggcctgagagcgcagcctgggctgctggcagggaagaggaagatgtctgtgctcaggcggatgatgcgggtttccaatcgctctctcctcgccttcatcttcttcttctccctctcttcgtcctgtctgtacttcatctatgtggccccaggcatcggtaagcaccgagacacaccctcgcttcccctggtcacaccacagccagcgcaggctgttatccgatgttacttctgggatttggaagctgttcaaacaggggcccgcagaaaagcgttttgttttaaatgttatttcagacgtgtcaaactgcttcagggcatggctttggtatgtgagttttgttaatgcatgcattttgttaatgcatgtttgttaataacgtaaaagattgcattaaatagacgtagcaaaattagtgtgatggcccgggatgccctagtcgctttcttgagtgttcatgacagctttatccatttaatgttaagtctttaagcctaaactgagtgcttaatcgtagttttattcaaacactctcgggtataataactggttgtaaaaatatggaggagccagcagcagggaatgtgattgagtccaacaatgtgtgttttctagggtcctaggtcgcttttttagaatggggtcagtggaccccattctttttgtgccatacttggggaattttaaggcgatgagttgtcttgtaaaaacaatgctccattattttagtctgcttgggtgttattttcaagggtacgttgcctttgctacctgttaggatgacttctgagaaaatagtgattaaaataaccgttatctaagggaacttgtagtttaaaatgttaaccggtttatcattttttggcctttggtgcaaaatacacttttgtaaaactgcttgaattaacttctttattaaatatccgaattcctcgtcccccatttgttgaaaaggagccaatgcggcgttaattctagtgaatgagaattatgaacttcacatgcatattaaaatatgtcatatttccaaaacttt

SEQ ID NO: 7731 - DNA, 6000 bp, Homo sapiens
ttcttaattcaatttgttttagaagtgagtcaagaatttttttttcctgtcttttctaggaaggcgcaatggcgaggaagttatctgtaatcttgatcctgacctttgccctctctgtcacaaatccccttcatgaactaaaagcagctgctttcccccagaccactgagaaaattagtccgaattgggaatctggcattaatgttgacttggcaatttccacacggcaatatcatctacaacagcttttctaccgctatggagaaaataattctttgtcagttgaagggttcagaaaattacttcaaaatataggcatagataagattaaaagaatccatatacaccatgaccacgaccatcactcagaccacgagcatcactcagaccatgagcgtcactcagaccatgagcatcactcagagcacgagcatcactctgaccatgatcatcactctcaccataatcatgctgcttctggtaaaaataagcgaaaagctctttgcccagaccatgactcagatagttcaggtaaagatcctagaaacagccaggggaaaggagctcaccgaccagaacatgccagtggtagaaggaatgtcaaggacagtgttagtgctagtgaagtgacctcaactgtgtacaacactgtctctgaaggaactcactttctagagacaatagagactccaagacctggaaaactcttccccaaagatgtaagcagctccactccacccagtgtcacatcaaagagccgggtgagccggctggctggtaggaaaacaaatgaatctgtgagtgagccccgaaaaggctttatgtattccagaaacacaaatgaaaatcctcaggaggtaagatgagtgctgttcattattttaatatacctgtgtgtctgtcctgtctctgctactctatctctagttatgaggagtttaaagtaaaagtaaaatgttgaagttattgaaaagggaatttccaccttctcagcaaggcacttgccacaaagcatgcctgctatgttgtaaacattcccaattcagaacttagggaacagttcttttggtgagcgtagtgctgcctcctacaattttttctaatacagaatataaaatatgtagagaaagatatcaaggctatctttagagaaagtctataaaggtgaacattattaataaaaaatagaaaatgaggggttgaaagcaggagttagaatccatattgtagggaaaggtgtgactgaaggggctgaagactactgagaataccactgctgcctccttgacagaaggtccaccatgacttgaggaatgattgaaattggagcagtttccatgaatgtcatgctggacaagggaaaagttgggacagtgaggttctgagttcatgtggtttttctagagtagacttccagactgtacgtaattcaccttggctgagagatgtcaagaacagggaattatgtcaaaaaaaaaaggaacaaggaattagttgatacagtttaataagcaaaactttagtacttcattcaaaccagcatgtgactgtactaattctggactaatcctagtagtggccatagccatagcagccctggtgataaagtttgctctgagttgtaccaactgagaattgtggtgggagttgaaaatgtctttacagaagatgagaaactggtactaaagccagtttggggtttttttgttgtttttttttttttttcttttttggctgggggagagattgcacagaggagtatcttcaaactaagtttgtcatctaattaaatagttgaaaacatctgcctgccggtacaggtttgttttattaaccagccttgccctccacaagaataatctgcataatttaatatcctctcattgcagagcattactttgccaggtatgtagacagaactgagtttttgcaagtagagtcattactagaagagaggcatgtcttggacttgtttaggccaagtaggatagcgttagtactgaagcaacatatttctcaatctctgatgagccccattttgaaattaaagctcatttccttaatacgtttatacagtgagttaacaggcttgtgaatctccatttatcctcatgcttgttccacctgaggctttctccctaggtgactcgtgatgtactgcttctctgatgaggtagaagaggtgggataccactgtggtgacatagtatcgccaggtagctggaggcaagttccaaagtgctcaaaacagaagttgattttaattttcattaactcgagaaaacgaagtagcattagtaaaaaagggtattgtgtcatcagactactctaatggggatggcttttggtgattttcactgctttgtttctttcagtgtttcaatgcatcaaagctactgacatctcatggcatgggcatccaggttccgctgaatgcaacagagttcaactatctctgtccagccatcatcaaccaaattgatgctagatcttgtctgattcatacaagtgaaaagaaggctgaaatccctccaaagacctattcattacaaataggtaaaattgccttttttatgtaaaaacaatttcagtagattcatttatattgtgcttttccttagatttgcatcagcctatttgttttccagtacaattctgaatatgtcatcttagttgttctttgccttgaatgtgaagaaagcaaggaagggtgttagccctgccctttaaaaaaaaatcccagaaaataaaatttcaattatgacttctctgggttcatcctacaagaaggtgtcaggatcacctgaaatttgggatttttatatcatgtcacactgcttgggaagaggtcttgggttcatttatgctgcttagaaacctaatactgatgcattcttattgataagtgaagctaggataggctctgctatagcgtagggtctcattgctcaaaagtaatgaggaaggaatcactgctttgttttctgaggacattattgaattcctggtttcttcctcttcttttctttcttttccttttttcttaaaaaaaaaaaattcttttatcatttagctcttatgggagtctgaaagctcagttcctaagtgagctacagttcatccttggtaaccatttttttttcctctttcaccccgacctgaagaatttcccattagagctatgctccttacctggagagttcttaagtaccagtcaggttgttcatttgagccaacaacagatttcttggttattgtgctattgccacagtaggtcctatttgcattgaatttgtgtgtttttagcttctctccttttacgtgttgctttatgctactctccaaaagtctttcttgtagagtttattagttgtataatttttctttgctctgttttgttttgtttgacagcctgggttggtggttttatagccatttccatcatcagtttcctgtctctgctgggggttatcttagtgcctctcatgaatcgggtgtttttcaaatttctcctgagtttccttgtggcactggccgttgggactttgagtggtgatgcttttttacaccttcttccacatgtaagtatagtaatttgtcctgttagtgtttgattattcaacattgaaaaaaaaatgttttggtttatgctagaattttttgtataaaatgttagaaatttggtttagaaaagcttattttaaaatatatttggtaagtgaaagctgtatttttctgctcgatcttaatacatttgtgaattttgctttccttttacaaaacacagactaatttaactttttgaaacccacttaataaaaagagacaaattctgcctggctattagtactgtgatagactgcagcaatgtgagttatctgctttatctgttagtgtaattgccaagaaataaaatatgtgaccctttatgtacccaagaaacttggaggttttcttcagagttgaatgtttatgtatgtatttaaagatttacacttcatgacacataaaacaagtttggtaaagtgaatttacttttccatcagatatttggaatagatgctcagttaaaaaatatgcgtgtttcattctttaaattcccattaaaggttttcaagtatgtgggaaaaggaaatcacaccatacctagagcactacaaatctcatgttccattcagtagttaaagaaaactatgttgctctgacaagctctcggaccaccagatggcagacattcgggaatacctactgatagaaagtggcgtgtgtatggggtgtactctgtgatcccccagtatcttagtgtgttccacacccgattccctaatgtgcaatagcagtagttactactccactcagttacaggctgctagggcagtgcacctggatctcgggtacatgccaggacccaacacacacacacactaggcttcttacaatgctagtgtgatgacattggtatgggcttttcagttgggaaaataagcagtagaaactgtgcacattaagtctagtattcctgttatttgtggccatggtaattcgtcaagcattgaaaatgctcactatttatatattatgggggtcactgggaatgtatctgaagtacatgacatgcattaagttctagatagctagctgctcattggtcattttatttttaatgtcctaaacttcacctcatctctgaagtatctgaataattgcataactgaatgatttcaattttgaccttacctagccaactttctgactcggtgtgtgaaactgatgaatttataaataacaaattattttgccttcagtctcatgcaagtcaccaccatagtcatagccatgaagaaccagcaatggaaatgaaaagaggaccacttttcagtcatctgtcttctcaaaacatagaagaaagtgcctattttgattccacgtggaagggtctaacagctctaggaggcctgtatttcatgtttcttgttgaacatgtcctcacattgatcaaacaatttaaagataagaagaaaaaggtaagaaaaagtataccgagtacttactatgcttcagatatttatttatagtagtactctaactagattgttagaatagcatgcccaggttgtatgagctttatttgagagggagttcagtacccttgaagtactttttggtcccagagatatttatgaggagcatttctatatcttaatagctctgaagttttctgtctttgctattcttttgaaactcatgacaggataagaaaagcaaggatgaacatctgtataagtgaccagacaaggtaccagcagggccttgaagaccagaagcatcgtgtatacatggatacactatcaatatttattagtagttacgattaactaatgtcattaatttccagtcacccagtagctaaatgttctgttttcttttaaagggtatgtgacttttacagacttgccctttgcaaattggatcagaaatggtatgaagtcaaacaataggctctttctttctggccaaaaaaaacccttttgagtcgcctatggtaatttgccactttttatttgatgtgatcaggcaagtcattcagaagactgtcaggagactcttaaaaatgatgtgggtcaggtggggtggttcatgcctgtaatcccagcactttgggaggccaaggcaggcagatcacttaaggccaggagttcgagaccagcctggccaacatggtgaaaccccatctgtactacaaatacaaaaattaatcaggtgagatggcgcatgcctgtaatctcagctacttgggaggctgaggcacaagaattgtttgaacttgggaggcggatgctgcagtgagctgagattataccactgcactccagcctgggcaatagtgagactctgtctcaaaaaataaaaaaaaaaaaagaaaagaaaagtgatgtgttcatatctcaacattttagtctaacctaatacatctgtacactcatattctggtcacttgat

SEQ ID NO: 7732 - DNA, 6000 bp, Homo sapiens
ctacaattgagtgaaccactgagtccctaaatgtttgctgcttgaattctgagtaaagaactacttagaattccagtaaaaagtgatgctctggaaagcctcaaaatgacaataaaaaataatgaagttagtactgatccatcatattgtagctgtctcatgttatctgagaaaacaaagataggtcagagtcattaagcattcccccatatctgattcaggaccattttcatctttttatttcattaatgaaaaaccactgaaatgaaggaatttctagcacactttatgtttttcctgtggggatgtatttgtacccgaagttagtgtgaaatatacacttaactcatacccagaacagttggaaagtaattcaatctatccaacctatagcaattgctagctctattaggcttttcaaaaggctcatatctccagctctgcttctttaatgtatattattggtcatttgatttttcagatgaaatccccacagtggtggggatcttcagtgcatttggcctggtcttcacagtctctctctttgcatggatctgctgtcagagaaaatcatccaagtctaacaagactcctccatacaagtttgtgcatgtgcttaagggagttgatatttaccctgaaaacctaaatagcaaaaagaagtttggagcagatgataaaaatgaagtaaagaataagccagctgtgccaaagaattcattgcatctggatcttgaaaagagagatctcaatggcaattttcccaaaaccaacctcaaacctggcagtccttctgatctggagaatgcaaccccgaagctctttttagaaggggaaaaagagtcagtttcccctgagagtttaaagtccagcacttcccttacttcagaagagaaacaagagaagctgggaactctcttcttctccttagaatacaacttcgagagaaaagcatttgtggtcaatatcaaggaagcccgtggcttgccagccatggatgagcagtcgatgacctctgacccatatatcaaaatgacgatcctcccagagaagaagcataaagtgaaaactagagtgctgagaaaaaccttggatccagcttttgatgagacctttacattctatgggataccctacacccaaatccaagaattggccttgcacttcacaattttgagttttgacaggttttcaagagatgatatcattggggaagttctaattcctctctcgggaattgaattatctgaaggaaaaatgttaatgaatagagagatcatcaagagaaatgttagggtaatttattttcagtgcttaaagtatttataaacaatcttttatgtagcattttggtgtctaaggaatttttattaatatgataagcttgtacatatcatccttaccatgtttaattattattaattataatctaatggagatcaagggaatagaacagatgaaataaaatttaatccataactgaaatactcaaagtgttttaatgatgtaaaataaataggcattctttatggatatttagatatcacctatataaatacttttgttaatctctatcataaatattttgacagacactgctactttaaaatacaggtgaatatttcttattcataagcaagttaacaaagagatttcaaggtcaacataattgaatttaaaattgaaatttaaaattaaatcaattcttcctgaagatttggaaattgtattgactttccatggaattgcctttcaaggaagaggcatcacgtcattttcaattataaatgctcatctctaaattgtatagtaggaaatgagtcccgctatttttgtagttacactactctggtagttctgggtttattagaaaatagtaagacatcaatgaaacaaatttaaccccattttcactttaaatttgaaactcgatttcaacagtggtatatcagaataacttctctctataatacaatgatttataaaaatcaatagacatactaatttgtgttttttaaacaacatagtgtttcagagctgaaaacctgagagctcattttgactgtctcctctcctattgaaattaatgacggtcaaggttcagatacattccacagcttgtttgagacacccggctggttaagtgatacagtgggaataaggatctttcttctactcttattctccttagagtgcctacttatacagctgtcccatattagtttttgtataaatatattgcagttttagttttgtgtcagccatcactctcagttgcaaacaaacaccaagttaatatattgttactttcagtcaaaacttttactttgaattattgtatatcttatctattgtctttaaagtacaaatgaaatctaagtagcacgcaaagaaggacgctatgacactgtccaaaaacaatgctctccaatgcttaagatcaattcattccttggcttaaatggaaacttgctgttgtgaaagaggcagagaattttaactccattatccctctgggccaggaatgtagttgggatcagaataattctcactgggtctgagttcaaatttcaatatgtcggtgctaaagaatttgaaatcaaatcaaacttatctaattttttgcatgagtatgtgtagtcatttgacccaacacatactcatgcaaagaattagataagctttattactattaataactttgaaaagtagagatgttattaaaaaccaaaagccaaaaataatcctgtgtaggatataatttaaatatcctttaaacatttctaagtaatgggtgtggccaatttattgccaattttaacttcctgtagtaccaaacaagaccacaagatggcaggcagtggtttttcaagcagcgatggtactgctcaaaagcttttagttactcttcaattccttagaatattaaaataaaaataagtaagattatatttaaatgacgatgttatttaaactttaatgaaagtacacacttcaaagttaaaaagatagaaatacttatatcacatttctctttctgcagaagtcttcaggacggggtgagttactgatctctctctgctatcagtccaccacaaacactctaactgtggttgtcttaaaagctcgacatctgcctaaatctgatgtgtccggactttcaggtaagaatgcttctgaaatattcagattcactgtatgattggaatgtatttgactgcaaatgagcccacctactcttactcttctatcttttctctaataccttatgtatctgctataaaagttagcttttagttttatgactagctttacaaaaaatgaaacaaaacgccaattttatgttgtatagcacaatgagaaacaaaataagctacagtttaaaattacctgagttcaaatcctaacccttccattcactagcaaaatatgattgggtatgtttcttaaactgtacaaactggacataatgctactcatcctgaggggccttgtgagaactagaaatacatacttcttcagatatcatctaataatattattattatttaatgatgggagttgaaaacatggtcttaaaagattagattgtgaagctaaaattaactcatatggtgccaccagaaaaaggcaaaagtaattgtgataaagtagcatgaacttaaaatctacatactaacaatgacacagagaagctcaacactaggaaacagaaagcaaatccagcctgtgactaaagaaattcataaaagttaaaactaaaaagaatattgccattgtggactctaaatcctcattcgatggaaaacacagccaaaagtcagggaaatagactcacccaaagtcatacaagtcagtaaagctacatgttgtctaatatatttttttccttctatcctattctctggagtaagttaatagtaatcagaatgggtccatagaacattctattttctttccttttgtgttacttcttttcctatcattaattttttcccttattctctaatttagaacttttttctcttattttccatattcttccttattttcaattctgttgacaagagaaatgccaagttttatccatatttttctgttgttttgacttattttcctggtaaccacatgtcattggcatgccatgatctctaagggcactgttatcttgatatcagctctccagcccagttatgccattgtaatgcctgttatgttccactgcagatccctatgtcaaagtgaacctgtaccatgccaaaaagagaatctccaagaagaagactcatgtgaagaaatgcacccccaatgcagtgttcaatgagctgtttgtctttgatattccttgtgagggccttgaagatataagtgttgaatttttggttttggattctgaaagggggtcccgaaatgaggtaatcgggcagttagtcttgggtgcagcagcagaaggaactggtggagagcactggaaagagatctgtgactaccccaggagacaaattgccaagtggcacgtgctctgtgatggttagcatcctagccgtgagttggaacttaaaggtttttactaggcaaggagaaattttctttctttctatattggattgcaagcttgggaaatcaagctacctttttgttgttgttgttgttgctagaaatggattgaattagtagaccagaaagtaacttcaaatgtgtattatgataatttccctatttattagaagagttggataaattttcataagatattcaatatctccttcagattaccagtgatataactaggaatagtcagacattttatgaatactgtgccagaatcccaaattataaatgtgacaatctcattggaacatgtcacaaaaagttaatgtgattaagatttaaaaacgaaaagtatgccttgccttgtgaaaatttatccatttatcttcaggttggggaaatcaatttttctttaaatccaaagatactaaaaaaatgtcctccagtttgtatttattaattctgtcatgtgcaaatggttgtcctgcatataaaagtatctggtcatttcagtttggtttgtaattatttgatgcaattttatcataagagtaactcagattcatttcaaaaggacagtgaacaagctgagaaattattttatcaaagggctgagttgagaacactgtggctgaaatataatttttctcccccctaaggttacatgtgagtcaaaattttgtaaaatataacctcacataagaaccatggccttggattattcactgcctgtcacaagcctcagtgtggcctgagaaatccctatgtacctttgtgaaattgttgaattagttagtgaataaagaaataaacttcaactagaaatccagttagaagtgcaattttcttataggaaataggtatagtgtgcaagtgtacttttaaggccatcgtttgtacccagagtcggcatggccacctaagtcttcatttaatttattgtcccccagaaaagattaagatgctacttgaaaagactgtgaagattttttacattgccagataaaaagtgttacttaaccaacaaacaaatgtaagactacaaaatcgttcaagagcaattctaatataatttacatatgttcacgcaaaatatgcttaggctgtcaaattagcacaacaaagaatgtgtttcactatcttttctaggctaatttgtcttgagctgttgtctatagagcagtttacagacttgtgtcttgtatcattttccagtgccagggttctgaaattcattcagaacctgttagattaaagctgcaccctgtgattatttgaaaagaattagcttgagagtaatgtcactatatttgagttcttagagaagtatgagtggaacttgagtacagttgaattattaaatatgcaagttagaaattaagtctactgaaaaatttacattttgagtcaggttttgtgtcagtactttagcagtttttgagaatgtgt

SEQ ID NO: 7733 - DNA, 6000 bp, Homo sapiens
tttgagacagaatcttgctctgtcgccaggctggagtgcagtggcaagatctcggctcactgcaacctctgtctcctgagttcaagcaattctactgcctcagtctcctgactagctgggattacaggcatgcaccaccatgcccggctaattttttgtattttagtagagacaaggtttcaccatgttggccaggatggtctcgatctcctgaccttgtgatatgcctgcctcggcctcccaaagtgctgggattaaaggcgtgagccactgcaccggtccactgataggttttattttttcaaaggcagtagctactagatatttggcaatctgtgaacttgcacattacagatgcagtagagaagtggggaggcaagcataggaagacactataagttggggaatttctttggagatgagtatttggacttttaaaataaaggttaaatatatatgtgtgtgagagtgtgtgtgtatatgtgtgtgtgtgtgtgtgtgtgtatgtgtacacacacccccacgttcagcatatatgtttttcttttttcttttttttttgagatggagttttgctcttgttgcccaggctggagtgcagtggcatgatctgggctcactgcagcctctgcctcacgggttcaagtgattctcctgcctcagcctcccgagtaggtgggattacaggtgcccaccaccacacccagctaatttttgtattttttgtagagacaaggtttcaccatgttagccaggctggtctcgaactcctgacctcaggtgatccacctgccttggcctcccaaagtggtgggattacagacatgaggcactgtgcgtggcctccttttttttgagactctgttgcccaagctggagtgcagttgcgccatctcagctcactgcaacctccacctcccaggttcaagtgattctcctgagtcagcttccctagtggctaggattacaggcacgcaccaccacacctggctaatttttgtatttttagtagagatagagtttcgccatgttggcctggctgatctcaaagccctgaccccaggggatccgtctaccttggcctcccaaagtgctgggatgtttttttattttgttttgttttgttttttgagacagagtttcgctctgttgcccaagctggggtgcagtagcgtagtcttggctcactggaccctccacctcctgggtttgagtgattctctcctgcctcagcctcccgagtagctggtattacaagcatgcaccaccacagctggctaattttttttttttttttccttagtagagatgggattttgctgtgttggccaggctggtccaaactcttggcctcaagtggtccgcccgcctcccaaagtgctggtattactggcgtgagccactgcacccaacccctgtatgctaagatgaagaataccacctatactaccctgtgtgccttgaaagagaaagacacactttgttaacagttgatttttattttttattttttatttttttgagatagagtcttgctctgtctccaggctggagtgcagtggggctatctcagctcactgcaacctccttctcccaggttcaagtgattctcgtgcctcagccacccaagtagctgggattacaggcatgcaccaccatgcccggcaaacttttgtgtttttagtagagatgggggtttcaccatgttgcccaggctggtctcgaactcctggcctcaagtgatccaccccctttggcatcccaaagtgctggttttacaggcatgatctaccgtgcctggccaacagttggtttttaaaatatgtttttattgaatttagccaaaaattcaggttttaacatagttacagatttcttagaaattaaaggagaacatttattttaagggttttacttaatttgattagcttcttgtctggtttacatttgttttgtgtggacttttttttccttaatcacttggttttattttcatagcttttaaaaatagaatctcgtgttacagtgtagaatatatatatatatatataatttttgtgtgtgtgatagtctcactttgtcacctatgctggagtgcagtgacacaatcttggcttactgtgacttccacctcccaggttcaagcagttcttctgtctcagcctcctgagtagctgggactacaggcatgcccgtgcccagctaattttttttttatttttagtggagacggggtttcacaatgttggccaggctggtctcgaactccttacctcaagtgatctgcctgcctcagcctcctaaagtgctagcattaccactgtggctagcgtgagccactgtgctgggtctgtagaatatatttggattattatgatcacaaaactagttttttgttgttgagaaatgggctttgaaaagatccgaggaccagatttttattattattattattattattattattattattattattattattattttgagatggagtttttgcccttgttacccaggcttgagtgcaatggtgtgatttcagctcaccgcaacctccgcctcctgggttcaagcgattcttctgcctcagcctccgcctcccgagtagctgggattacaggcatgtgccaccatgcccagctaattttgtatttttagtagagacagggttctccatgttggtcaggctggtctcaaactcctgcccttaggtgatctgcctgcctcagcctccaaaagtgctgggattacagctgtgagccactgtgcctggcccagattatttttttaattgaattgaattgtcttccatagggactgctgagatgtcctctattcttgaagagcgtattcttggagctgatacctctgttgatcttgaagaaactgggcgtgtcttaagtattggtgatggtattgcccgcgtacatgggctgaggaatgttcaagcagaagaaatggtagagttttcttcaggcttaaaggtaaattataaaataagattttggtgttttaggatctaagtcttctcagttattcatttagcgattcaaagattgtatcagatttttaaaaaactttgtcttaatttgcctcagatttttttcttgttattatcatagattgtaaagagaataaacttaagggtttgaattagccaagtttttttactctagggactgatttatacataacttgtagccactggctccaaaatataaaattgaataaactttcaccccaaatccaagaagtttaagtctgttctgtcttgctgttaagattattttatacaaaagcaaagcatttgataacttcaacaaaatttttctggtggaaattggaagtccgtgactttgtatttctagtgagtagacatattgttcaaaggcgagttttggtgtagctatcagaagctctctaatgtaagtctactttgtattgggttgagcctcatctgtcagggtatgagaaataagttgtaggagttagggaaagcagaggatgacatctggataaactagagagagtggaactgtctagtaggcatgcagatatgggaaaagatagtcttgatactcttggtaatgtctactacggaaaaagagccacttgatgtggaagaataattacagagcccaaagttatcattagctgtaagacattggccaatttagcatcttcagtgtacagtatttatctttgaaaggtgaggtcgaaacagattaattctgagttccccttttagcttttgaaatccaagtgtctagaacagtactgtccagtagtattggaaatatgtagtattctgcagtgatgagaatacatctgtgctgtttaatatggtacctactatactatcactattaatcatgtaaaatgtggctagtgtgacaggaactgaatttttaatcttttaaatttgacaaatttaaatagccacatgtggttagtggatgctgtattgaacatcagagatgtaggttaaagtttttggatgtgtaatgatattccatgatactccaagtacttctccagagttttcattattgaccagactattcctggaatagcctttttgcttcagacatgatttaaagatctaaaatatagttttaatgatgagagatgatttggtgctgttatgttatgaaaatttgtatttgattggttacagttaggtagcttttaatttcactttctactaactcgaagagtacaggttttgattaatttttgaaactgtttatggagcttctcacacataaataagatgataatcaaatttgtcttaagatttccatttggccttcatcactttatttcatactgatcacccagcccaagaatcattgccaaagaaaatacagtggaaaaaagcttattaacctgtccaatttctttgcttctgtaatagttatttgaggatatgatagtgagcatattaggcttatcaatgtgctgtcctaagattattcaaaatagcaattttaaaagtcttaatcagagagggttgtttgttagttggaaaagtactcaagaataaaccaggtgaaaaggacaatactgcttccccccccaccccccgactattttcttatgtagtattggtgtatggggaggagtgcccattcagcttcattgatgttcaattgtgtcttttgtgcagggtatgtccttgaacttggaacctgacaatgttggtgttgtcgtgtttggaaatgataaactaattaaggaaggagatatagtgaagaggacaggagccattgtggacgttccagttggtgaggagctgttgggtcgtgtagttgatgcccttggtaatgctattgatggaaaggtaggtttaatgttcgttagatatagttgcagcttctaacaaacatcaaaactgattatgcttagggtttttctttttattttttaacagggtccaattggttccaagacgcgtaggcgagttggtctgaaagcccccggtatcattcctcgaatttcagtgcgggaaccaatgcagactggcattaaggctgtggatagcttggtgccaattggtcgtggtcagcgtgaactgattattggtgaccgacagactgggtaaagactcaaaagcatattaaaagttctaactaaaatttgctcaatggaaggattatattttagtcttggaatggtaaatggtaatggggacattagaatctaatacgaggattaatagtaaaatttcagctgggaagtgaagggggccagcccctccacacctgtgggtatttctcatcaggtgggacgagctagctcagtcggtagagcatgggactcttaatcccagggtcgtgggtttgagccccatgttgggcaccagatgaagggggccagcccctccacacctgtgagtatttctcgtcaggtgggttgagagactgagaaaataaataagacacagatacaaagtatagagaaagaacagtgggcccaggggaacggcgctcagcatatggaggacccatgccgccactggtctctgagttccctcagtatttattgatcactatctctactatctcggtgtgggggatgtggcaggactgtagggttaatggtggggagagggtcagcaggaaaacgtgagcaaaggtctctgtgtcataaataagtttaaggaaaggtgctgtgccttgatgtgcatgtaggccagatttatgtttgactttacacaaacatctcagtgcagtaaagagcagtattgctgccagcatatctcacctccagccatagggtggttttctcctatctcagtaaatagaatgtacgattgggttttacaccaagacattccattccccgggacaagcaggagacagatgccttcatcttatctcaactgcaaagaggctttcctctttcactaatcctcctcagcacagaccctttacgagtatcgggctgggggatggtcaggtctttcccttcccacgaggccatatctcaggctgt

SEQ ID NO: 7734 - DNA, 6000 bp, Homo sapiens
ctggtattccatctgattttgtgctgcatttgccgagtatctgggcaaaggaaggccaaacctccctcccctcactcctccaacctgccaactccccattcttcctcagcagatcaaaggatcaatacttcctaagaccaccattgccatttcttggaaataaaccacaccccacaacccccaaaagaaggtttaaaggaagcaagaattcccaagtgctttctcttccttccatgttaggctgggtttttgtcctccttctaatccaagttcattttagggggttctctttccacccagcagtgcctgcagagccaatatccccacatctatgtgcccctacccccacccggtgcacttctgctggtgaggtgctattctgcaggtccaatctcaggcccctcttagttcaggttggttaattggttcattcatcattcatgcagaaagcatccattgtgtgccctttgtgtactagccctgcactgtccactagccactagccccatgtgactactgagcactggaagtgttgcgtctgagttgagacatgctgtctgtacatatacaatacacgttggatttcgaagacataatacaaaaaagggatgtgacgtatctccttaatttttttatattgtttgtgtgttgaaatgataatatttgaatatattaggttagaataagtatattattgaaatgaattttacctgtttctttttactttaaaaaaatctttttgagaattgtagattcatacgcagctgtaacaacacagagagaacctgtatccacttcccctaatttcctccaaagataacatctttcaaaacaatatagtacaatatcatgtccagacatggtggctcatgtctgtaatcctagcactttgggaggccaaagtgggaggatcacttgaccccgggaatttgagactagcctgggcagcagagtgataccctgtctgtacgaaaaaaaaaaaaattatccaggtgtggtggtgcatgcctgtagtcctggctactcaggaggctgaggtgggaggattgcttggacccaggaagttgatgctgcagtcagctatgacagcactgctacattccagcctgggcaacagggcaagaccctgtctcaaaaactaaaacaccccaaacaatatagtacaatatcagaaccaggaaattcacattgatacaatccatcaattctcatttcaccaattttgcatgcacttatttataagtctgtgtatttagttctaagcaattttattacatgaatttttacttttttataatgtggctaccagaaaatttaaaattatatatgtgactcctggtatatttctattggtgctgctatagacgttggttactgtattagtcagggttctctagaggcacagaactaataggatagatgtatatataaagggcagtttattaaggagtattgactcacatgatcacaaagcgaagtcccacaataggccatctacaagctgaggagcaaggaagccagtccaagtccccaaacctcaaaagtagggaagccagcagagcagtcctcagtctgtggccgaaggcctgagagctcgtggcaaacactggtgttaagtccaagagtccaaaagttgaagaacttggagtccgattttccagggcaggaagcatccagcatggagaaagatgaaggccaggagactcagtaagtctgctttattctagccacattggcagttgattagatggtgcctacccacattaagggtgggtctgcctctcccagtccactgactgaaatgttaatctcctttggcaacactctcacagacacactcaggaacagtattttgcatccttcaatctaatcaagttgacacttaaagttaaccatcacatttaccaagatggatgaaacagggtgctctcttggggtagggcagggaaggctcaaacacacatgaagagtttacaactatcttatatactaagtgccaagtggatagtgcaaactcttgttcattgctgctggagtcagaaggcagagagacccctctggctaagggctgtgtaggagcccatgctcaccttagaaggaaggatgctctgcttgaaacaggatgggggctccagtcctgcctacctagttcccttgtcctaaaccctacctccaccattttccctcctctcctctgcagaggctcaaagggtgacccagtgttccacggagtcaatttgggaaccactggacaagatttaggctttgagtggagcctggaaaaggaagagtgaaatttctgcccaaaagattagagaggcaaccccaggtgtactgccagggtggagagcaggggtggggggaggtggggaacggcctaggggttgggggtctctccgttcctctcctccctccagatactcctgccctgcagcatcttttcttttgcctccaatgaaaggccccccaggtggaccctggtgaatgaaaccccttcctttttctgatgagggaattgttatcctctggagcttcgtaggaaagtaacgtaagtcacagagtgagtcaggagcatggacaggcaagggagcgcagaacctggtcattgcgcccgttcatcctgctgagaatgcggcgcaaccagaagcatctccgctctaatctgggtgggaaggtcctggcaccttctctgaggggcccatctccttacctggacctggggatggtggagggcttcgggaggtaggtgggggaagggcggtcagagccccctagggacggggagaagcctacattctgggcccagcccacagagactcctggctgagttcttggctcctccagagatgaaattggactcaccttcctctcacatggctttgagggaccccagaaaggcagtgttcctttcttccatgaactgatgccccatcactggccaccctgcccctggctcacttggccccagtgaaagctcatcctcccctcacctctgcctctgcaggggacagtcctcacctagcgcatccacctgggctggcccctcatcacccacttcctgtcctgctcacatgtccccttcccagagaggcctccctgactgccctgtgtggaataacattcctcccccaccccaagccccttatccccctttcctccctttatttctcccacaacacctttcaccctttagcgtatgacgcattttgtcgcctgttagtttattgtcgtcatatctgtctccctctggtagaaattaagagtcactggggcaaggctttggtggcttgctcgctgttgagcctcagtatgtggcctgggatggctgttggaccaatatagaataatatcataaaataaatattatgcatatataacaagatgaaaatagaatgaatgggaaaaggaaaggtaccctcgatacactgtgaggtccaatgcaagtgatttgctgattaacaatagaaaagcaattatacattttatttcacaagcttggcttggtgtgaaagaaatggctcatttttaaactttctttcattaaaaacatgactaaaccttacccaccaatttgtgggaagttgaatccaccagtgttgagccgccttcggggtcttccccctcccagggttgtgtgaagaccctgggggtcttgtgtgggacagaacagtgccgtggaccccctgggctgtgctggccctgctgatctgctcactgctttctggaggcttctggagccctgggtccagcctcccgagctgcccctttctgaggtcctgctatcccttgtgagggatgtggacagagcgatctcaagctgctagcatgggcttcctggtttgggccatggtctcaccacttccaccagccctcccgagacccagaggcactggccccccacctcccccaggactctctcacacagtttcttcacagcacaatttcttgagcattgaagcctttcgcccccacaacccagttggccctgggttgaagataagaaaaccgagctacctttctggaatggaggagggaaaatacaaatgaataattcaatagattatcctcccacaaaagttaaatagcaacgtttgtgaatgattttcttcttttattgtttttttacgaatagagcctactcaaggttatccctctaatgatagggagtacagtcattctcattcctgttgtatgcctgtcaagagggagggggtggtgacaggcagggccctggaatgcgctcacctgggccagtgtgaggatagcagtaaaggtgaacaggtgtgttgtgcatgaggccagaaggctgaggtcactgacccagcaccccaatatgggaagaccccaatgtgtgctgggtgcaactgactcccgggacaggatccagaccttgggtgctgagaggcctgaactgggagtcaggactcctgggttccaggcctatctttgcccccaggtggcttgagctaacttcccactctatgcctgtttcctcagctgtgatggctgatggtgcactctacctctctccctcacaggactggggtcaggatggagcaagatgctgcaactcaggggctgccaatgggtggtctgcagcctacagcgtgtcgtatttggtctgcacagtgtttcaagtttggattcattggcaacctttaagaactgggaaatgaaaaataaaagcctggacttcctgcccctcttggacaaatgagcaaagtggcaacccgaggcctgtcttcccacaacttgggcagcacagacaccctcccctgttcttgttgccttcgctctgctcgttctctgtctgggcccctcatgcccaggtttgaatttgctccctggtagaagtgaagcactttgtagaaatataaatgattaatgtgcggttgtacttttattggctgttttacccagggtgcgtgatgctctaaaaggtccaagaagagcatagaggagctctctaaggagagcttcttgagcgaaagtgtgcatgttatggtgccatccctaactttagagatgatggtcataggatgagcagggccctcccctggccaggatgggatccgtcaggaaggtaagggcgtctgttctggggtggctgctggcttaagattgagttgttttaaggagaagaagtggatttggctttgttcttggtcaagacttgggtcaggaaggactttcagatcagtggctgcagccactctggctactgatccttggagtcctcgccctccacaggggcctgggctctcctgctggggcgagagggaggtgaaggggccctgagcccggtgctcagtgacctctagttccccgaggggtatgggtagtagcagttactcaggagaaagacatgacattctcagcatgaaacaactgcccttgttttgttttccttatttttcatttttgtgttaataccagccatcatcgtcgctaccatccctcctgtttgtgcaacgccaaaagagttaccaaaaggcctttttctttttcttttggtagagaaataaaatgtttttactattgaataagcattaaatcagaacgtagtgctcatcacaggcaatctgctaagagactgcaaagacagaaagaaatctcccccttgacataaccaggcagctacagcccgctacctgcatcttctccggataaacaactagcgctcacgtagttgacagagccatttgtcacacatagttcatcttcacttcacctggtagttggggtgaccatctgtgttgttgtttcttttttcttttttagacgcagggtgttgttgctctgtcatccaggctgtagtgcagtagcacaatcatagctcagtgcagcctttaactctgggtctcaggcaatcctcccacttcagcctcccaaagcactggaattacaggtattagctcctgtgcccagcctacttttgcttatttcctttatttttattttttgagacagcatcttgccctgtcacccaggctagagtgc

SEQ ID NO: 7735 - DNA, 6000 bp, Homo sapiens
aaaataaagcagagtaaggggatggggtgtaacccatgaagctgcattgtttgctcccagagaggctgtgtttatttcctctgttgcttatatagatcctatagatgcttgttgaatctgctgttattttagtttgagagcaagttgatatagtttcccaacctaatttatagagcccaagaaggttttatttgtccaagtttcttagtttaaatgggaccttcattatcctcacttcttggctttggggtatgagggaatttggaagttcccagattgaacatctgtatcagtgtctttctacctctccctccaccgtatgctgctgtgttgtccaggccgaatatgtatctctaaataaggattcttaaaaaaaaataccactatcttattaaaaaaacaacttttaatatcacaaaatattcagtgttcaaatttgtaattgtctcattttgtttgaattgggggccaaataagttcacacattatttttggttatgtctttacatttcttttcaaagcaagtttcccttttcatctgtctttttcttcttttccctctctcagtgtatttattgaagaaaatgggtggtggagtttcccacaacgtagattttgttcattgtatccttgcgtggggtcatcttgtcctctctcctctgtattttctctacattggttgttggattttagagctcatgagtctttcggtgagatcttagaaaagtttgtttcagggtctagaagcaaatttaatctctcatctcaaacagaaatcctgtctacaatacccttatctgaatgttacccaaactttgcttgaattcttgtagggatgggggcattcccttctttacacaagcatcactagttaacagactgctacaagttcaagctctagcatcaggtaagttagctctttattaagcattcttgttatcttaattttacagatgaggaaactgaggcaggggccagttaggtaagttgccaagtgttctacagctggtcagtggtggaactgagatttgaacttcgtcagagtctataatctagtcccattacacttttctgctttcctgtcggacctcctgtgttgttactctggctcccgaagctcattcagcttcaacatagcattttatttgcaccaattaactgtgatcatgtaaaatttcttttcttctaccattgagatattttggaatcttgaatctaccatggagtattgtttaaaatcattgagtgtatttaattttattaacttattgccctaatcttcatcttatccaaaagagtatcatggaaactttttaactgtcttggtaggtaagctccatgaagacagggagttctctttacaagtatctccttagtatctgaaacagtgtgggcacatatgagtagctcaataaatacacgctgattgagtgaatcagtgaagaaggtacacggcgctttaattacatcaatcaagtagtcgggttactctttccaaaaacacaagatgttttgttttgtttttttaaatagctaatcatttatacattcaacaattacaaggccattcagtaataaagggggctgttgaatgaacaaagatttcaaagttgggattctgagtggtgattgtagtcatgttaccctcagcttagtttgtttcagcattttgtttggatttacaatagctagataatattaagtcccacagagatgcgtttgcaaaccttaactattctttttttttttttcttaaaaagtttaccctgaggtctctgggtattctttcattaaccctaaagctttaaagaggaataggacatttttgtttcaaagtgaaactcttaacattatctactatctgatcacatatctattcttgattgtgaaggctggataaaaactccgctgattgacaacaaatgttgcaccttgctactcacagtgggattctccagccagcagcagcagtagtggatgtcactggggaacggtagagatgcagaatctcagtgcacatttcacacatgtgcagtccatttgcatttaaataagaatgacttgtgatttaaatgcacattaaactttgagaagtactgtcagcttcagttaggagtatggtggacctgggattctgaacttccaccaagctctcagataatgctgttgtggccggtccatgagccacgcttggaatagcaaagtgcttgacattttatcacagttagaaagttaggcagttacttgaatagactcttaagtcatgacaaaaatatatatgcagcagggagtgagcttggcagttagtaagcacaatgcaggtatgctgtaatgctgtacttattcccatgtataatattttaaaatatatatgtatgggcctgaattttaaaaaaatattctggaaaacttcatttttttcaaatcttgacacatttcagtaagttcaaatataccagcttgggcaacatagggcaaaaccatctctacaaaaaatacaattagctgggcatggtggtgcatgcctgtagcactaactacttgggaggctgaggcagaaggatcacttgaacccaggagctcaaggttgcagagagctatgattgcaccactgctgtccagcctgggtggtagaccgagaccctgtttctatgttaaaaaaaaaagaagttcaaatatatgcgaaattcccagatctgcataagaatgaactttcctggcagcctaagtcagtgtgtttgagtgtttgcatttccagttttcaaactagttaaaaatacttcagaagagaaacaattatccaggactctggaatctcacattttgaaaaccattggtcaaggaaaaagactgtgtttgctactaacatattgttgactttaagctcagcgcttagcctttctgagcctgtctcttcatcagtcaaatggaaggttctacaaaatagtctctcccttctgatgaattcttagcttctgtgacttgctgtgcagcccaatagagctttatagtttccttaagtccaatttcttgattatagaggttgcttcaacctagcagtttaaagtcaaagatttgagccagttgataaggatgtttccttgagcaagtaacaacctccaggtgaggatcggtgaaatgcaagtgatactagtgcttttcctggagggttggtgtgaggattaaatgagttaatgcatgtaaagcacctactctatgttgttcagcatatgttagctgttgtttcttttacagatgagaaaactgaggttggagaagtacagtgatttgtctgagattcagtattcagttaattatagacctggatctagaaactaaatcttctgattcctgatacagttgctgaaatgcccatcgtttaaagttaaaaaaaaattctttaaagttttgtctggtcaaatagctccccttctagccacactgctttgttgatatgttttcttaatttttcattcaaatgatttgtaatctgaagagtgttttagatttaataaacttttatagtttattatattctatatactggagacatagataatcaatttttgagtttttaaaaatctcctttctagagaaagatttagtgtgtaagttgaatgtgtctattaactattttttcctttatgattttggattctgagataagatggctacttgtactgtttctatcattttcattttgcaaatcagtttttgatgttcagaattaagaccaagagcagcagtttctctcattgcttagttctctaattaggtatgaaattaacagtaaagttggtcactgagcaattttaatatgacatttggttttataaatgttatgataagctcactttgattttagttcttaaatttaactttttaaaaccttttcttctcttgcagttgaaaacaatcctcgaacaggaaatcttggtgcactaattaaggtcttcctttctagaaccaaagaactaaaactttcagcagaatgtcagaagtaagctggctaattaaaccatgtttgctttatatttaacaatgtgaattttagttttcatttattgatggaaatggactgtggtcttttgaaaatctctgtgaaggaattattctcattattaagaaaaaaaggtagagaggttttaggttagtgtctaagtcactggggtgagattatagattcgggaatctgatttcagctttttagacaatctttagattatattctttaagaaggtgaataatgatgtaattatcgttaagaaggtaattcccctcccccccattatcactgctgctgctatctagtttaaatgatgacttagtctgagttttatttcattctacatctgttgcagttatttccgttatattctttacatcaatggaaggttaactttttatgcactgaagcatttttcaaaaccatgtttggatgtcagtctctgaaaagattaaaatattttgcattgtcttgcttataaacaaattacattgaatccaataaagtttttcttgggagttcatggtcattaatacaaataaaaagtattttaccgtgctgctggcaatgcctcgtcgaaaattttggttacatatttgcatatattctttttatgttaccacaattttttaaattttttggtagctttcttctcttttaatcgcatgtacgtggtatacctattaagaacaaagaacagtcattcctacagtcatcagtaaagatttttattaagtagattcactatgtaaagtacatggaatgaactatgaagtaaaacataatatcactggtacaatgaaataaatcatgagccattaaaagatatggacattatcctaatattaccaataggatggacaaaacggttgtcaaatcaggaagaaatcatgaactagaaataaactatggtgcttatgtttaaatattgattcttgtatgattttggtctttctagccacatcttcatttggcagacacacaatgctttgtttattatttgctgtttgctgaaagtgttcatctgtcagatgtcagaggaggaattacaacttcattttacttatgaagaaaaatctcctggcaattacagtaagtattgtttttaaagatgttctggatatatcatgtgtaacatttaaggataaaatttcaggaataaaagtatgattttgaaaattccagttatccttataattttcattttaaaatgaacttatactgtcattttttctttttctgtgttaatttaaatgagtcaagactcaagcgttttttgtttttgtttttcgttttaaataagaaagctggtggggttgaagctttcatttattttgactttcatgcatgtggatgaagaagaaagtaatataaaaaataaaactcacacaaatatgtatttctttcagaaaacagaggtgtcagttttaaatatcattgccaagtcaatatattattaagggagccaactagtcagattttatggtaaaggttactttcatagcgtgcagcaatagcttctgggtctgagtgtctttgggactacgacactttatcagaagtaacattttcaaggacagttttatgatgccaaagtgtctcatctttttctgaagatacagggaaagattacccttcacacaatctttcctttctgagggcaaggcagtgttgccccatagttttccgagttctgttttcaaaatagatctctgccctcatcaggctgacagcgtcacctgtgtgattcaaggtcatatgttaacatctcttgtgggaacaggtattgggagagaactttgagatgtgtatacttttaatggaggtctgtgtgctatgtggatttcatgcatatgtataataacactttcatatacctaggagtaatttttcactgtggtttcaactgtgttgctaaatacgtgtttttaaatgtcaaagtcaaatattgacaaagggaaacaaacgtataaaagagttactgttcatccagg

SEQ ID NO: 7736 - DNA, 6000 bp, Homo sapiens
attcactcctggtattctttggcctctgcttccatttagttatcttcacttgctctccttccatcgtcccttaaaaggtattcttttcaagcgttctgtccagccctcttttcacttgacctgtttcctaaaccaactatgacctccttcaaccacaattctatccccataggctcctcttcattttttgacactcagctaaatgcatctttctttgtagagctctagtcgtgcttctgtcacgttgctttcctgctagacaattcatctccacagggcagatatttcattcttcttgcaaagtttatatccctaatattccctggctcacagcacttatgaaataaatgttagcagaatgaacaggcaaatgaatgaatgactgagtaggagcaaattaagtgactcaatctttggtatattaaaaagacatttatacctaagcaagttcatgcttctgggaagcagaatttcttaaatacaaatatgtgacaacgttacatactctgtgaggttttggtcttggtattattttagttatattaaaatgttatgcttaatttgagtttaagtggaaaagcttagccccacaggaattttcttgagcatatgtgccattgaaagaaattttaatcaacacgtgacattgattcaaaagcacttgagatattttgtaactacttttaagtcttcactgctcatgtaactcaaacataattttttaaatgttatacttaacattctgtctgacatatagtgttatttttaagtaatttgagtctcttttttttttttcttttggtaaagctcttactttttaaactacatttgactccagtgaaataacttatttatttattcctccaaattgaaccataactgttgaatgcactcgtaggaaatcagaattgtgacccctgtcctcagggtcacaaagccattagcctcctactatatgctgtatgagtgaaatcatctatatgtgcagctacaaagcggacaagtctgtgtgtgtgtgagtgtgcctataggaaatgattgcgtttggcactagtcctttactgtacagctgaacacctagaaagatttattataacttcattaaaaatatcatccattatattcaatatccacttatactattggttttaacacagattacctagtagtattttctacatggtatttttagatgacctttagtaaaatataaaggcataatgtcgttttataaattattttccaattttgaacacaactcgatttttaaagatactttacctgtttttttttttaaatgatgtaatatattagacttgaaaagtaaaagtattggagatctgtgactgaaaaaaaaaaactttatagtgattttattgtatcaagagactttctgtttcagaaattccatgagtgaaaccgtcagactggtcagtggaatgcagcaccctggctctgctggaggcgtctatgagacaacacagcacttcattgacatcaaagagcacctgcacatagtaaagagggacatagataacttagtgcagcgaaatatggtaactttgtttccttttccttttataattataatctttaggaaaggaagaactcatactctactgcaagtattttaaccctttagttaatgctaatgcttatttttaatgtttaaggtagaattgtcccatttattgcagatctccatgtgtcctggttttctagttattgaaggtggaagaacagttcccatagcagtcatggttttttaatatgtaatatttatattatcatttcgtgaaaatattttctgatttccatgttaatgtcttctctgacccatggattgcttaaagtgtatttctttggcctatttttccgtcaaggttctaatctggtaatttcttgctatcttgttagcttcatttaccttcacccaggtttcgtgtgcttggattggattagatatgtttttgactctgctggttgtcttctataagacatatttgggatatggttggcccatatttcctagtctgctttaccagaagcagaaatcccaatcccttatattttatatcgcgttttatctttttaaaagctttttaaaacgtttgatgacctttagaaaatatactaatagattaataataatgttacattaaactgactctcccaaggtcagtagctagtaagtaggaaagggagaaaacttaggtcttcagcttctaatcttgtctcctttatattttttgataactctcttaactatattcctgtatatatgccttgaatatacatttttttcaaagatggcttaatagttttcttattgatcatgacctctcatccaaagcattattatctgtccccttagttctgtttgaggttatttttctcgtacattgtctttgttgcaatgaccaaattgatactgtgtgtatcaatttactgaagaactttgtcccacaaatataactatattgggaacaactaatcttagaagccattctctctgggtacttggatgaagtctttgttcctggtatttaattgcctccttataatagaaggaatactcagggaaatagggaaagaaatatttttcagaacaccagtgaataatgttgaatgatatgagattgtagagaatgaggactgagaaaaagccagtctgtttgtcaagtagttcattggtagggtaaccatgtaatttattgtctgacctgggacacttttgagaatgaaggggtgctaataatcacaccactacagcaagcgtgaactgggagtatccagaggagttgtctgtggtgacgctagtctcagtgacctcagggacagcaacatcatcatatactgtaatgcagacaggagccaggaggcagtgagttagtgactgggtagtaaaaaggtggaggccttccagtgtcaactactccttcaaaaacagttgtcagtaaaagttaaggggatagaaggttttctgggggatgaaaaaatgaaaatacttgtttatatagcaaacagttttataaagatttcacatttatttctttttccaaactgctattttgactaactgtaatagaaagtcatttgccttacagccatcaaatgaaaagccgaaatgcccagaactaccaccatttccatcatgtttgtctacggtccacttcattatatttgttgtggtgcaaactgtattattcattggttatatcatgtataggtaagtctcttgataaaatgtgacccaatatttttctgcatctgtttaattagaaatattcaactaagttatctatgttcataatacaattttcaccacctataaaattaagtttattgtgatttctgttcatttcagttcacataaagtgcacgtgtagaatatatgtttatcttaatgcgttgtatacttcaaaaggcattgatattttaattttaaatagtcctgtttctttccaaagttaagcgtatagaacttctttaagtgtttgtttctttttttcattaggtctcagcaagaagcagctgccaaaaaattcttttgactaccattttcctgtgtacttcatctatttgtgtacaaaatgatgtcgttttgagggaatttaagtatttaaattgcttcatagtctaaattattaattttcttaataaaataactgtttaaacattgatttgcagttaagaataaaccttaaagcaaagacaaccacattttaatttgttcacagtatgtaaatctgtctaaatttcagtgaatttctggtcagtatgatgcagcctctgagcagaatattgaccagtaagagggtaaataaagtgggggcaacccctggatatgaatgttaccccctaagtctccaatattgcaggtttccctgtataacgtaaacacacttgccctcatgcctcccagaatatgaggtctaattaagaagtcccatcaggtttattttgtaaccaaagtcttttttagaggtcagacttcctaatcaaaggcctgggcctgcagtcctttcatcttaatgcaacttcctttgaaatcaaagaatattttgtctgagagctttaaggatctggtaatagacttcaaaatgttaagtgaaatttttttttcctctatttatcaatgatatatttcacttttaaaggaaattttagaggaaaattaatagctgctttttgcctaaaaaaccttgtgggtggaaacattcctctgagaatggcttttataggtattttgcctggtaatgtattcattcatgattgcccatattcttgaatgtcttcattccaatggggtcaggtcaatattatgaaaataatttttatatttatatttgtaacttaaggaatttatttctccctttactacagcatgtaaattcagctcaaattgcatgatctgaggatttaaattcacaaaacctgccactacattctggtttacattagttacttcatgctggctggggttagtgaccatttgcatactcttttaaatcaaggaggctgtagtagaagcagttttaagattcttgaaggcaaaatttgaaaaacagtgaatacttctaattgtttccttttagtgccagaactaaggacattgtgaagcacttgttagtaaacttaaccttgaaatgtcagactggaaggagtttttatagtctttgtgcatacttctaggtattacagaaacagtctgtaaatgacattttaagatgcaaatttaattctgttcacagctgatttatactgatttttgctgccttcaaaatactcttttacttcttttagctaaaatggttgtctttcatttgccatagaattccaaacaatactatcttataaaatagtactgttgaattattccaagcctccctaggtttgctctcaaatgtcatttacagattgggctaacgacctaaaatctatatataaagactttctgaagaactctgtattatagcaataccaaacgagtgctgtgtgtgcaaacagtctggcgttgctttttatgttgatatttatcctagaacactgaaagagaatatgccagtgataactcactttacttcagtcatttcaacacagaaaatgcttctctagcatttttcttttgtagtgttaacattttgaaattcatgtttcagaggcttcatcatcacagaatttactcttgctccatgaaaaaaaattaaataccttcagaggaatatttaagttgtaaactatgaaacttgagaaatcctcttgagataaaaggctgccaaatccagtattataaagtccatggtcatatgtgcctgtgcattaaaggaataccagatctatgcagtatacatttttcaggctgaaattcaaggggaatcattctgattattcttactacaaatggagatggctattatgaaacagcatgagcatgagccttttatcttttatacttagtgatatactttgcttgaaaatcactcagcaaagtagttcacatgatgtgtatcatatttgaagtgtggtttttctcaaaatcattgactttaaggagctcatttctgaacaaaaaggtttgctctgtggaaaaatcaatcactgccaggattctttcatttctgtactattttgtataattgaatttgttcacttctctcacaccagcaagtgttttacaggtgccttggattaaaacaaaattgattttaaaatttttatgtaagtcattgtgtctatgatgccacttttaaaaggaaaatgcaattgcgtaatggcttatatccttatttaatgtacctatttgtgttctaataattgtttgaatgttttattcagcttaaaactttaccatgaagtcataaacagtaaacaatgttttgttatgtattaaggggatatcagtgtttctcaaagtatgatccatggaccatctgggtcatggcgcctggtttcagacaacctgaatcaaatcttaggggtggggctttgggatgtcat

SEQ ID NO: 7737 - DNA, 6000 bp, Homo sapiens; identical to SEQ ID NO: 2007

SEQ ID NO: 7738 - DNA, 6000 bp, Homo sapiens
atacaggcgtggacaaaaggttaggaccctttcaccttccttatgagttccttcctaatttcctgtgtcccataaaaggactacttgtttagcaacgtagccccttccttggcaggttacaaaatcccagtgtcctgggaaactgttctgggcaaagaggacagaagagggcaggtgaatgagagcatttatggtaaaaccaagttttctctgccttcaaactgtgattgagaaatgcagtaactttctacaaataattttaaatgttgccactttctttgtagaactgtgtcatcttcacgaataacgcatattttggatgtaaagaaagtgccatccaaccataagaaagattccaacattcaactgtcaactcttgcgactggtccttttgcaagacctccaccctctcctctatagatgacccggatccccaaaagcgttttccaagcattctgtcatctgcatatccctctgttgagcagcctcactgatctttgaactcttttgcttccttaaggctggagaatttcttcctcaactccacgacgaacattgcccaccacctcccaccccgcgctggcacgagcacctcacgtgggtcacaggactcccgcgggaccttctgcgtgtttccccttgatctttttacaagtaggtgcgtgggcggatactcaccaatctcccttcatccgctcacctctctccctttgctcaagcttgcagctcctctcacaggcctccagctctgctggacttggcgtattcagaggcgcgcagcctctctgtcctcttccctctcccccatttcttctgtcctccgccttctcgtctccctactctcttctgtcccctcattctctctcctgcctctcttttctctccccgctcctcttttccctttcttctctctctcctttctctctctcttaccctgtccatgtcttcccccttctctcagctttctctctttaggtctccatctcgctctactcccgggttgacccatgacccaactttcattacacggatgcacaacacgcgcgcgcgtatatgcgcgcgcacacacaaacacaccatcccctttgctcggtcactttaccccaccctggaaatcgaggaaccagcactttggtgtggtggtaggaggcttgggggcgcgtgtgagactctgaatcccttccagacttgggggtcacctcatcgtccctcatcccaacttactggcaggagacctccacccactcacagccgctgcgctaggcgtgggcaggactgcgacgagcacccaacgccccgcgcagccccgcgcgcacgtgggcgccccagcagcaggtgccgggaagcggaggccgggccagagccgggaggcagccccccggcctcgagcgctcgccagactcttctcatggccctttctcctttcctcggcctttcggggccaccctagtcttcacagctcagcgtctgctgctgaccccccgccccccggcgaccccgccattgccattagctcttcctaccccggcttcttcgccgccacagtccccaacccaagccccagccgcggcgcgggtgtgggtggccggacgggatggcttccgtagtcccggggtccggcgggctcggctgtggtctgcgtgggtcgcgtccgcagaggccgagggagggcgggacggagccgggaaagggaggaggtgccgttgcggcgcccagggagggactccctgcacccccgcgcgctccagcccttcccggcgctgcctcgcggttgcccttatttcgtattcattgattcgcattttacaagcccgggctcttccggtgctgtttccccgcaactcgtgtctcccagactttaacgcgccgcgcgagcctgtaggaggaagtggcgcgggggaacgggggtccgtgtgtgccttggggtggttttaaatacctcgaggtggggggctcaattgcaagaagcccgcgtctttgcaggagtaatttggtggggggactggacatcaggcccagtgctcaaccgcgaaacttttacggccgcctttccctggggcgcgcccctgccgtgtctcccaagctgagcgcggagtccgcggcgaaacctgcgccccagggagggagggagagggggcgcccagttcctttacgcggatggaaaagaaggggtgggaggcagagagcccgcaaggtctaacctttaaaaagtgaaacaccaaaccccacaagggattttcacacgaaggcccctcccgcttccacgccttccgtccggcacgaggatccggctcgggatttgcggctgcatcctctctctgcgccctggcgggccgagccgcggatcccagccgggtcctcaccccctccccgcccctcccccagatccgcgcggctgggatgtccttgctgccgccgccgcggccccattctgccgcgcaccagccccggggcgccggccgcgcgcagcctcgctatcccacccaggctccgggcttccaggagggtcgtggagccccaagccatgactaaggagcccatttggtaactctgccctcttccggctcctttctcctccctcccttccccgccccccggccccccccccggccgccccgctcccctgcaccgccctccagcccgcctcccagacgcccacccacccgctcctctttccgcaagatagcagaggtggcgcgcagcccggcgagccgatgacggaccccttcttcctgccttcaatgcctcagcggaagatccccaagggctggagcgaggagcgctgccgctggacatcctcccggggaggctgctccgacctgctgcgcggcgcgtctgagactggggactgagccaccccgccgccgccggcgccgccgccgccgcccgctccgtcgctgccgtcggtctggactggcccccacctcgctgcgccctctccccggccccggccccggctcggggcgtcccggggctcgccctgcgaccgccgcctcccgcgcgccgcgtcctcccgaccccgcggcggcgacgatgcccgggaggagggtcctgacggcggcggcgcggatggtggcggccggcgcccgggtgtgatgcgagcgtcacggtggggatgctgctggctgcgcggcgctgagggccagcgagagcgagagcccgcccggggcggaggacggactcatccggatctggctgcagcgtgggctcggagctcccccttcctctcggtctccctctcggcccccctttatttccttcttgctttgcgtctttaacacctctcgaccctgtcctccccccgccactggaagtcttcccgtctctaaatggaattagtggagcccggagcctctggtgtaacgcacagacatgatccatgggcgcagcgtgcttcacagtgagtaccctccccgccgcgcccgtgcgctcccggagccagccctcccgcccctttcccggggccgaacgcgcaggaaaagcctctgcgccgcgctccggcggaccctgcagtcccgcgcgggtcggggccgacgtaaactttctgtattgcagcatcgtggaaccgggcgtgggggcggcgcgcggtcagccgtcgccggatcccaaaacctgccggagaacggtctttcagtgcgcaggaaccccccgggggtggaggatagcgtgcagttcagggatggacacgtgcggcagagattggcccaagcgagggcgcaggtggaaagcgggagagcgcggatgatacctagtggggccagaggagtcttcctcttctaggggctcccggagctcggcgggcccctgttcgcagtacaggaggtagcagaaggcacacctgaagccagcgctggagggaagggcgagggtcagcttccacccctttccgccctggagaccgctgatgtcgctttatgggtgtgtggtaacgcgggcagtgtagaggtgggaaggaatgagaggaaaatagtatcacgagtcatcgagtaaaaggcagtataagaaaatgtgtggtggaaatgtatcattactaagcaaagatgagagtgttgatcgcgggccacgcagttgagaggggtttgctgctgagttaaacacagtacgtggtctataatgtgatttcatcaaaacaggaagagcggagtaaacaaatacacatcctgatgctgaaggatgtgcatacctgtgtgttctgggtgtgagcagaatcatgacaaattaaattgattttttttttcctgtggaaacacacagtaacaacagcagccagtgccttaatttaaaatgcaaatgaactggctagagcataaagtaacacacaattgacaatattttaaatattaatatcaagacctagatacgtttcttagagtgatgtttaagtataaatgtataagcctgtggtgagctttaattcaggaaatatttgtgaattgttctctcccccgaattcattttaagtgaaaatgtgaaaacatagaccttttatgtcgttggatgacaaaatgaataagaaaaaatagaagaaaaatcaaattatgaagactagcttacttactattttgctagtgttttgtcttgtaaaaatgttgattagatcaagaatacggaagtaaaacaagtttagattataatggcattgcagatttactgttaagttacagatcacagtctctttgacactggaaacctgacccaatataatgctttcggaaatcacgtttctcaaattaataatcaatttctatatattgatttggtattaaatcaagttaaggttagaagagattaatttcacagcttagaaagtgctgagggacggggttacttggaggttcagaacatttttgtaggcaacattccaataatggtgcttaatgcccacaatccacattaatctgtttcttgcttattctcctcctccacagtctgtaggatttgtctaagtatttattttctaaaatacagccacactgcagtatgtcaggaacagtcatggagctgttctcattgtttgcctctccttttcctcctttttaccttctggcccctctcttcattcagagatgctggcagagccattccctaagggtagtttagatacagtgtgactcctgtagtcccactgtactgtgtgtgacatgagtaaattgacatgttgcctttagagtgaatgatgtatttgccttaggagtttgggtctcatccattcttaacttgcattagttccttaagggagtcccaaggtttcctgatttgtacatttcaaattggtttttgcaagttctgaatcgacttctaacagttaacaatgaaaaaattaatctgctttgatattattttatcttgaaattatgttatgtttttatgggatttgatcatttcagtgtattttatctctaatttttcttttctgtttcagttgtagcaagtttaatcatcctccatttgtctggggcaaccaagaaaggaacaggtgtgtttacttagaaaaatgctagtggaagacctcgaattattttgtattttcctattttcctcctactgttaatattccagaatatctgaacctgttataatatgtataattgattggtttggctaagacaacatttaaaaattaatttactaatggatattataagaatgtcctctatttttagtacaatagaaaattggatgatggctctttttaaaacttttttttttttttaacagaaaagcaaaccacctcagaaacacagaagtcagtgcagtgtggaacttggacaaaacatgcagagggaggtatctttacctctcccaactatcccagcaagtatccccctgaccgggaatgcatctacatcatagaaggtaaggggagacagtgccagagttaagaaagcactaagccaaaaccttgccatctctgtgctttggatgaagaatatgcgtataggcattacaaaattgatctggagatcatgcgcaaaaatatctcttgagtgaatcaataac

SEQ ID NO: 7739 - DNA, 6000 bp, Homo sapiens
acagccagcaattcggcccaccgactggcaggatgggctcctgccctgggcatcacacacctataaaaataaatttgttaaggaacatacagccacttctgtcagtagaggtctggtgctcagtgttaaagactgcataaaactttaccctaaacttttgctttcaaaaccaacaccgttcgggccccagagaaacacttctcccctatagtcccttgtccttgaaacaaaggtgagtgcatcccacaacctgaagatttgcagggtgtgctgctgctgacatggaagatggacactcctaaacgtgtggatgatgtatagtggaggcgcttgattcaaagaaaagtcaaatgaattaaactgtcaaaaccttccttttagatagcaagcatatcatacagtcttaaataatgagggtttcctagcaatgccaaacattcattttcttgcttctctttttgttacaattcatggttctggcagaagtcatacagcagtatagcatttgcatgcggttgaacgtggtgattggccaatattttgaaaaattaactaattaatgttactgttaaaatggtagatatgaagttataacacatgaaacataatactgattatttatgttagcaaccaggtggacaatgaatgctagaattgctaagtttatgttttatttacacattaataaggtgtaattaaatttccaaatattaaataaaatgtttatgctttaaaaaaataacttttcagtgtttatattcattgtcataatttgtattttgcattttaattctaatagataactttaaatcatttgaaagaaaacttttaacaactatagaaaaataattctaattttctgaaataaaaaaaggaatttacatttgtggtgtaagtacaaacattttgtatgatttgactacattaatcctttatttatttattttttagaattgggatttcattctttacccagacggagtgtagagtgcacagctcattgcaacctcaaactcctaggctcaaatgatcctccagcctcagcctcctgagtaggtgggactacagggataaaccaccatgtttgactatttaaaaaactgttttgtagtgacaggatcttgccatgttgtccaagctggtctagaaatcctggcctcaagtgatcctctggcctctgcctcttgagtcgctgggattacaggtgtgagccaccacatggggcctgaatagatgaatcttttagatcaatgttgttcaatagtgctttctatgatgatggacttgttttctctccatgttgtacaatacattagctctagccacatgaagctactgagcatttgaaatgtagctagtgtcactgaggaacagaacacctgaaatgctgttaggtgctaccatacagaacagcaaagctttcaatcaccgctgtcaatggaacacaaattaagtgaaaatctcaattataacaacacagtgattttactaaagagaaatatcaattttatagaataaatatatatgaatcatgtatattacttatccatatagcctatcaaagaaaatctagatatgtataatgtctagcagatatgcataattcagttgctgatattttgctttttgtcatataaaatctgtaggttttatatttcaattttattgttatatgtgtcaaggtaggaatatacatagtagtttgctagcttaattaataactttgaaatattaggcatatggtaagtggctatgcatttgtactcttgcccaagcctaccaatgtcaggggctggcctgacagcacccctaactctgagcagccattctgcaaatgtcactattgtcctcagtgagtcaggagtgaaatgtggttaaaactaaatctctactgctgaaaaaacaagtcaaagcaaatgtcccactgggaggattcctacagcatcccttccttagaggaagtccaatccattcatttcagcagaggacttccatttaggctcaaaggctgctctgaccagttacctgtaagagggagtaaactaacagtagttgtcatgaattgagagggcagaagctgctggcaaaaatcccaccaccctttgaaatgtggatggaaggctgcaaagggtagagtcaacttaacagtgtaaagatagagaacaggggtaatagaaatttacagaccctcccactaagctttaagtaacaggcagaagggacagggtttgtagaggttaccaagaggagtcctgtggcagcagcagttggagtactggcagggatttctgtctaatgcctcagtggcaggtccgtagagtggccctttcctcttccatccagctcctcatcgtccccccgcagggggattgagtttcccttgcccatagtggtaacctgcttattgacacatctcatatcgatgtctgcttttttttttcttctctgtcttgctgtctcaccttccttatagtgctttctgggatcacttccccaattcaaaaccacttatagttaaatcctaacctccaggtctgtttctgagggagcccagcctaagacaacctccagtacttagcacagtgcctgacatatggtattgactcagtagatatttgctgaaagaataaaatactttgcaaatgaaatcctaccctaatattaacttcacctaatttaaagaagttactctgaagcaaagtgattagatcaacttttgtctccctagcttccacctctgtcctcccactagcagaaaaactccattggaaagcctattactaattttttttaaagcaaatttgaactgcagtatagaacacaagtacatcaaaatggaaagcccaggttgcagatttgaccatcctcacttgctgatcttgaagacattgcttcctttctgagatttcaatgttcatttcacaattaaagataaggttccataagcacatagttgggagaagtggcaggacaatgtaagctcatattaacaagcaaatgattaatatagagacttctaaagagcaggtctggtaagtatctagtaagtggacttcctgaagtaagaggagtgttggttgccacactaaaggcaagtcttctagtccccaaatttgccttgggaggatgacagctgtatctttcttggttctggtgtacagtggagaacagggtcaagatgagtgtggaatccatttatttttttacgtgtttataagcactagaaagcagtgagcactaagcagaggacccctcttgcggaaaaagtgcaggagagctcctgggtgcctctgtatcaccggtttgccttctagccagaatcattgctagaaccctgtcactcagttactttggttcctaatttaacctcttcccaagccttctattgcgttcagttagctaggccaggagcttacagctgtctggttggtgctggctcaatgtgcttattccctggaagatagaaggatcacttacaaaaaaatttacaattaaaataaaaaaattattttttgctgaagcattgtaaggtttttttaattcactcagacccaaaatcgtaaaactaaaatatttcaagacattacttgattcaccccccacttctctttctcccctgtttctcagcactttgcaccagatacagaaaccacgggttatgtccaaaccctggttttggtgtgaccaccgccttccgtgtactgcctgcggctcgcttcgggcccacacgggacaccgaggcatgatgaggacgcagaacagcagaagcgcgccctgcttcccgggcgccagtgctcggggccagcggcgtgtacccggcgggcccggccgggagcgggctggcgatcgcggggctcggcgctcccggctcccgcgccatctcccggcgcccgccaacttcgctccgcccgcggcgtagagaagctcgcagccctccggagcctcagcgatctcctggctcgcttttcccgcagccgccgagcagcgcaggcccggcgactccgggtgcagctggccctgtgcggtgacatcgccgtccggcgccaggctcgaagccgcctggccgcgcccgcggggtcgcaggccgctggtcccgcccggccgcgctcacaaactactcgcggctcgtgacccgggacaaacttctggcggcggcgcagcctcttccacagtcaccctccccagagccagctaccaaaatagaagacgcggccggggcgaggaggtgggcggggggagcccggtggccgctcctccccgcgcggctgacgcccgcttcggcggcggtagtggctgtggccgcggggccgcccccagccgagctcccggaggcgctcgggcgcgggccggcggggcacgggcgctcacgccctctagcgggccgcggcggcgccgggcggccgtgacgtgagcgctcccttcagccggcctgcggggcaccgccagtcagtcggggagcaagagccccgcgcgcagccggcgcgggctcggtcatcggcgcgccgccgcccggggctgggcttggggctgcctgtggagaggcggcgggcggaacgcgcgcggccacggccacggccaccgccacggccacggccggcagctcgggtcccgggtcccgggcaggggaaggggagaggcggcgagctcagcaaccggaaccgagggaagattttggctccgcgggctcgccctccgctccctctgccagcggcgccagacgccgagtggggccagggacaggggaggaggacccaggaccctgtgcccgcgcccctggagccgctggagttcggacttctgcaactgttggcactttgggggcttggcttagcgctctgctgtttacccgtctctcctcgctgcctcggaaccaaagctcccggccccctccgccctcgcgcgcccacccaccgccgccggggagcggcccggcccgcactcagcaccatgaggggacttgggacttgcctggcgactttggccggacttttgctaactgcggcgggcgagacgttctcaggtaagcgggaccgcctctgccgcccccgaggcgcgcgggccggcgcgggacgcccgggacgccgacagctccctggtggtagagccctaaggctggcgtcggggccgggcggggggcgcggcgggccggacaccgcttctgcctgtgagccgggcgctgggcgaggggccgtggggctggcaggcacccagtcctcgggcgggcggagcggacggaccccgagggcgagctccccagccgggactgccagctcggccgccgtccttccgcggcctgggctagtgctcaaggttgggcggcttgcactcttgagtccctggccggctgcaaaaggaacagcagaaaactttgcttgaagttcccagttgcagccgccgggccgcctggcgtaggcgctgcgcggtccccgccgaccccgagcagcggccgggcccaggccgctggtgttcggctgcgcccgcagcgatcgccgggaactggcggccgctccggcggcggcgatctcccggtgccctgccctccctgtcgccccctgcccggcgcggctggcgaccccgggaggtccccgcggtcgtgcagcgtctgcggagaggctggggggagttcctcgccggtcccagcggtagggcttggcggccgcggagggaagcgggcaggtccccaggccctggccacggccctgcgccccgctgggctccccctccccaccctcgtccccctagcggagcgccgcggccagctgcaacttgttcatccagcccggctgcccgggggtcccaggtgggaaggagaggcactggcggtgtgcgagcaagcgtgtgagtgtgtgcgcgtgtgtgcctgcacgcgcgcgcgggggcgttctaagcccagaggaacccctcacggagaggatctgtggatcggagtcgggggtccggcgtgggggcgaacccggcacgctgtcacaggggtttacaaccaggatgacctttattacc

SEQ ID NO: 7740 - DNA, 6000 bp, Homo sapiens
attgtatagttatttcacttttgtctctcactcttgaatgtaagcctataagggtagggaccatgtctatcagctcatgactaatcaccagtacctgccacagtgctgggcacacagcagtaatttaacatttaatattaataaggtaacagtgctggaatcaggcactattataagctcttcatgtgtaggaactcattgaatcctggtaacaaacccagaatgtaggtattcttcttcttctcattttacagatgtaaaacaggcacagagaggtggagtgagctgcaaagatcacacagtggaaaatggaacttgaacctagcagtctagattcaaagcctgtattttactttactgcctcaatatttatggaaagcatgcctgtttaaatgttcactgaagtcaataactcagagaattgctcataaacaaattcataattatagagcacctctactgtaaagtttaacatgtttaactatggagaagtagaggggtataagtactttgatactatccgtactgaaaacaaaaaaaaatctttgccaagtccataagagagaacttgtccaaaggtgaatactattagtgattcaaataggttgaaataatattcaaagcctttgtacttcttagactcatgaaaatttggttgcttgatatgctggagtgtatatatttgctaatactttaaggcctttctgtgctgcattagccaatctaaaaagagcaaacaaaatgaacataggtcacatggttcattattcctagcttaaatgttaaacaatagagaagtcaatgacattttaaattgtgggttgtcattttattgcggctttgggaagagcaaaaatgcacagaatagaacattgggcaatgtcccctgcccatagctgagctctattactaagatgagatgctgtcatctgtgttttcatttccacatttaacaacaaaagcggcacttgccaactgtcatgaagttgttctgagtagggtgtgatgatgtttgtaaagtttgtagtgctggaagaaaagtactaataaataccaaagcacaaaccacttaaatagtgcacaattcgatgtgaagtagaagattcaaaatgactcagtgattattaatctaatgctctaaaatacgaataggggattaatcccaagatgtttcacatattcttagaatattagaattttaaattcttatatgttttaagactatacctacatgatttttgaagcaatattgagaagtgaaaaaacagttgattccaacgacagatgactcaaatgggcagagatttcttaataatatagactgggaaactagaatacatccaattcaggcttcccattaaatctatagtgaatgggcgatcattcatcctcccataggggagttactgggaatttcctccgcatgctattctgctagttgactatttgcacatgggggcttcccaaatggtttccggtaagagaagtgtgcttcctgctatggagggactggatcagcctaggctagctggcccatggaagagagttcttaggccggcaaaaaactggagtttgtgagggcctttagggttgtcaattcacaactaaacctatgtgggacactatcctttggactgattgtcacttttagctttttttttttcttaaacaaaaacaaaacttgaacccccattttaataaacaattttttttgtattctaccttaatgataattgacatctcaaaataaattttgtgaataggaagaaatcacagtaaaggtaaatttagaatatgcttcaaactacttaagcactctatcctcctgcatccggagttgattccttccagtgggttcctggtcttgctgacttcaaaaatgaagccccggaccttcacggtgaatgttacagctcttaaagatggcacaaacccaggccaggcgtggtggctcatgcctgtaatcccaacactttgggaggccaaggcgggtggatcactaggtcagtcctgtaatcccagcactttgggaggccaaggcgggtgaatcatgaggtcaggagatcgagaccatcctggttaacacggtgaaaccccacctctactaaaaatataaaaaaattagctgggcatggagacaggcgcctgtagtcccagctactcaggtggctgaggcaggagaatggcgtgaacctgggaggcggagcttgcagtgagctgagatcacgccactgcactctagcctgggggacagagcgagactccctctcaaaaaaaaaaaaaaaaaaaaagaaagaaagaaatgatggcacaaacccaaagactgagcagcagcaagatttattgtgaagagcaaaagaacaaagcttccacaatgtggaaaaggacccaagcaggctgcccctgcaggctggggtggccagtttttattggcttatttgtccctgcccatgccctgctgattggtccattttacagagtgctgattggtccattttacaaacctctagctacctacagagtgctgataggtgcgtttttacagagcactgattggtgcattttacaaaactctagctagctacagagtgctgattggtgcattttacaatcctcttgtaagaaaagttctccaagtccccacccaacccagaaatccagctggcttcacctctcactcccaggaatttcagggctgaaaacacattcctcgtgggtggcacaatcttctgtgaatgccaggctagcaattccagcaggctgttcctggatggaccctaatacctggatcgcacatgaaaacttggatttggtgcctacttctagactgctgtttcgtctcgtttattttctagacaaactgtgctgctccatggcagtagcatcaatatgtcttttgtttcgtggcgctacctagggatttaaattcaaaccgtatcacaaaatacaataaaggtttatttacagcacattggtttcatttgacgttcctgtaccggactaccctggcaatcggctaaagttttgtcagcaagtttgctgctgggatttttcttatttggttcagtttactacagcctatcgtaagtgatgcagatggagttagtttctaacatgtgaacgtgagaactgttttggtttgggtccatcattaaaactgaagaagattatttgggttcgatggtgtagatttttgacttttatttctagtttctgtgtgctttgtcatatttccccttgcttcctagacgaggtgtgtttccttatctgattttgcatcactggagagaactcaggaagcaggagaggctgaattggataccacggggaatgcagccctgccaacagaggactggatagaattagagcaaacggacacatccccccacgcctgttctccacagggcagattttattaatatatttctaacattggggcctcgtttcagtcttcaagttttttcttttttagcgcaaactagacgcgctctgagagccaaaattagcgtccgcgaaccccaccccattgcctccaacagacctagctctcctttccaccctcaaacagccgttactacagttcccagcaagcaccgcgcagggccgcaaagggccaggccctcggcgaaggccccgccccgcagggggcatgccgggagttgtagtgagtgggcgcttccctactactacttgtcccttccactgggcattcccacttggaagagtgtgatgcgctgccagagcagtttctctagttccgtactcggagctcaaggtgacagaggactgcgcttccagccctgcgctgcgcatcgcgtcggtcccgcggacctttgccccgcctccttccacacccgttcccttgacagctgggctgcgctccgggccgcggcaagccgcgagcgcgcaggcgcagcagccccgcgccgcgctaggccggcctggagggcgggacaagcgctagaagctcccggccgggggcgcgcacgtaggcacgcagaggccgtcacgtgggtcgccgaggctcgcaagtgcgcgtggccgtggcggctggtgtggggttgagtcagttgtgggacccggagctgctgacccagcgggtggcccaccgaaccggtgacacagcggcaggcgttagggctcgggagccgcgagcctggcctcgtcctagagctcggccgagccgtcgccgccgtcgtcccccgcccccagtcagcaaaccgccgccgcgggcgcgcccccgctctgcgctgtctctccgatggcgtccgcctcaggggccatggcgaagcacgagcagatcctggtcctcgatccgcccacagacctcaaattcaaaggtaggcagaacggggacacccccgggtggggtggggcgcgcggaccgctggctgtcggcgggggggcgcggagggcacgtccgcggccctggcccgagggagcgccccctcccccacgccccggcgccttccctttcccggctgctttcttgccgccacctcggccggcctgccccttgctccggcccgcttcatcccctcccgcccgccctcgctgcggtgcgcgcgccggccggggcgaggcggaggggagcccggccctggcgccgccgccgccgccatcttgcggtcccgcgggggcgcctcctgggcgtccggtcccgcccgcgccgcggtccgcctgggcccgcgtccttggccccagaggccgacggcgtgcttcggcggggcgtgggcggctgggcacccgagggcgtgcgctctgggctgcggcggggagtgggctctggaggtggcgcaagctgcgtctgtcgcccgctcccggctgtcagcggcgcggggaggctagggcacggcgcgggaccccttgggagtgagagccgccccccgacccctgccccggcccggggagagctcgctgcagccggccctcgggttccgcggagggcgtcgcttgtcacctttccgccaggtttagaactcggccgtcaggtgtaggacgcgccggggaggtggagagtccttggaggtgcctggcgagggctgcccggtgctgttggcacggacccaggtgcgtgcgggcaggagcgatgcgtcagccgcaaacggagagttgtaggttcatagtagcggggcttcctgccttctacgacatttcagtgtgccacccgcgtgcttttatttagccctttagttgagctcctctgctgagaaaccttcagtgcgtgtgacttttttgcttttacgtttgcggtttccgacagatcctgagaaggctgataaggtgtcacccagctctggaactttgtaggtttttgtagtactgcctgtgataagttttttagtctgacttggtgatcctggaagaatcccaggggcttttggtcggtttccttgtcaatatgtagtgtactttaggaaagagagttaaaatgtacagatttttattttttttctttgtttttaaggaatactgaaagagtgtgaacatctaatagaaagtaggttccttcctatctttagttaagtgtaaagtgagtcccgttttggaagtctatgtcttgtatttcaattgttgaatgagaacaatttttgtgaggtgtatagcaattctagtgctaaaagaaaaaattaaatcctttattgttgtgtaaggctgagtccaagagaaagccaactacattgttttccataggaaaaacttcaggtttaggaatttaaaatatattctggaattatgagattaatattgcataactacattgcaagctttttagtgcgtttacaaatttctttgaatagaagtgtaagtgagctacttgttgggtaaggatttggttttaaggtgcagtgaatgtattttattgcaagtttatgtaagttgtgtgatttttacgtagttgtagctgggggaaaacctttgaggaattatgaagagtcctgactcagccattatcttgagataatttaatgtaaatctgtatggtgtgtttttttttaa

SEQ ID NO: 7741 - DNA, 6000 bp, Homo sapiens
ttgcctcccctctgctgcccttttaggcacctcagagcttgctagggccactggggcagcagcggagtatgtgatggagggacacagtcgggggaaggcaccgagtgccttgggtgtctggatgttctttcagtcgggaggaaagaaatcttgggtgatttaatcgaagatcgtctcaagtacgtatcacgaagaagtcgtgacactcgctattggacagtccttactaagcttaaaactccccgtttgacctaacccatccttgagttcttttgctttttctgtcagcgtgcagcctgaaagtggggagtcagacatttgaaaggtaagccagatgagcagagcatgtggaaacctgggtcctggggcagctgctaataatacctgtcctcctggtgtctctacaatctatgatgtcaagtacatttcacaggggacctctgctatagatcatttagacctgctttttttacatttctgtgttttgttttaggtttgatgaggcggcactctctattcagaaagaaaaaaatatttataaggaaattgagaattatccaacttgttataaggtattctttgaaagtgtttgtttttggtattacattagatgattttttatactggtatgaataagtacttaagaaaggattctatgggtatttctatgtttttgtaaaataatacttcatgggcctctatttttgaccaagatagagtaagcccactacagcttgtttctctgctgattacagctaaactactggataaaatacaaaagcaaccacccttgaactctgaaaagtaaataaaaagagactaaggagaggagcaaacacgtggagaaacaaccaccatgggaatgagtttctcgggtttttttccatttcctcttgcagcattcattgccctgccctgagagaagcccacagttgtggagctgggcagcaaaggctgcaacaatgaaaactccaaaagaaaccccgcctttctaaccagcaatgggagaagaggtcccattgttttcctctcctttggctttgctccaagcttgtcccaggcatggagctacactgtgatgatggctcaggttgataaaactccacaaggaccccagtctcttttgccagaggaactaggaaaatgagctagagagcaaggagaaaattccggaaaggagagagctggaaacggagtcccctgagtgtggatgtggcccacacaagtcttgggtttactcttcagctgtgctgagacaggcctcaaagtagcagtgcagcgcaaagcttggagagctaagatttcatcactgtcgaagtgttgcactgccctctgaagggcttatgcatggaacaggcccaaagccacatagcaaaggatttgaattaagtgtagaacttccatccaccaaaaacaaggcaccacatgtagtctgaacctaactggggtgattacctgctgaaaacatctgtactctcctgaaaattaagcagaggctgtgcagcatcacattcacagtacaatccagaattactcaacatgcaagaacctggaaatatgaccagttttcaggagaaaagacaactgatggcaacccggcagtgaccagggttgttggcattatcacataaagactgaagcaactataagttgctccatgaggtaaagataaacacaattaaaatgaatagaaaagaggacctgttgttttttataggaaaaattatttttatagaaactataaaaatgaactaattgggaattttaggactggcaaatacattattgaagtaaaataattggataagcttaatctcagagatgacagaaggaagactttgtgaacttaaagatagatcagtaaaagttacctaaacaatagagacaccaaaagatggaaaaatacttcatgaagacctatttttccagtaatttatcagtcatatccttgatcttattactacttttattgttgacttatcaatactatcattgtttctgttatctgaagttttcactcatacatctttttcctagtttctttttaaggattctaagtatcattgtggtgttacgggtcccccccacttcttttttattcacttttcaagattgaatctgtgtagatatttgaaagagatctctttaaaacgtggttgtgatctaaggcttgtgtcaaagtgcggtccccagaccagcagcaggagtgccccctggaatttgttagaaatgggtgaatcccaggcttgcccctagcagccaaattccaggacatgagaattggaaaagtactgttctaggatatttcccctcaggtgtcccgtggaagttactatagcatttataaatctctgtttatacaaacaaagactctgaaagttaaactccaggtgttttcaatactgccaggttattgactttattaaacagatgtaaatttgaccatgatcctctcttttgttttagaaaacaattgctcaagtcttagttcatctacacagaaatgactatgtagctgcagaaagatgtgtccgggagagctataggtaagacgttgtctgggccctcttgacttgcagtggcgacacctctgtgtctacaactaagattgctgctaggacacatgttcctggccatgaaactgtcatttctaaatcttaggagtgctcatctaccatttcatcttttacagtgggtgttttacaccttttttttttttccctttcctgtatttttctctaggggacctccatggaagtgaatgactttagtcattttagtcattttatttgccttctaagaaaaaaagaacaagaaaaagggggaaaaaattatcagatttatgttacagaaatcaaaatgaggaattttctcggtgtttaacatgagcagtcttaatctcaacactgttaacatttgggctggataattctttgtggtcgggcctgtcctgtgcactgtaggctggttagcgggatccccggtctctgccctctagatgccactagcattcccacacttttaagtaccaaaatgtctccagacagtgtcacatgccaggggcagaatcatccctgcctgagatgtgttcttttaaggagaaggtgaagacgtgtgatttgtgcttactgcagcatccctgggttcaatggcagtgaagactgtgctgccctggaacagcttcttgaaggttatgaccagcaagaccaagatcaggtgtcagatgtctgcaactcaccgcttttcaagtacatggacaatgatgtaagtggacccatttgcatagctttcatcttttctcttgaaagaaagaggtttctagtgagattattttttacccatgtacttaagagattttttcctacctctttttttcttctcaagctactactcataaggaaactgaccacttgcattgaatttcaccatagatttagataaaatagatgttagttgtgtggtgtatagccatttactcacccatctaactctgttgaccatatacatattttaaaattgaggctcatttctccacttttcctctatctgttgtcctctgtaggttgcttttattcatttcttttagacggactctctgaaagaggtccattctgtagtggcctttgtaattcagtagacctatgaaaatctgtgaggactagctgtgtgttgcaggtcattaattatctctaagcctcagttaattcatttgtaaaaatgaagccactagtacctgtcttgctggactgttgtgaagaatacattagtcagtgtgtgagaaatatcctcacatgatgtcttgcacataaagtgaaccatgactataagtttttattttttctcatttgtctttttcagtagatttgtaagtacctgtttggccttaggcctttagagtatcatcatagtatcagatcaacttaaggccttcagttgtttattataatgatatatgtagataattttttttctaaataacgtcttacataggttttgaaaatatatatatttctaaagttttaattaaaaaaaatttataattgaaacttttactagttgtgtacctgtcccaccatggtcatgaggcatctggggagcagcattgttgggctttgtttttccatctgaatggtagaattggtgttcctgagggtggggagccaggctgtgtctttttagagctgagtaaaacatgttaggattctagttatccagcttttaagaacatgttctgttgttgacagtatgctaagctgggcctgagtttggtggttccaggagggggaatcaagaagaaatcacctgcaacaccacaggccaagcctgatggtgtcactgccacggctgctgatgaagaggaagatgaatactcaggaggactatgctagtattttgcttgctgaaaagaaaagggaaacaaaggtaaaatcctgacatgccatttcaaggacttgggaatagattagggatatccgtacttcattacagtcatgattttggatcctaataaagactagtttttagttaccatcttcccaaatcactcattgtatccattacctgtgaagcatatctttttctttccataagagcttttctaagacaccagcaggaattaacagaaaatgtactgtcatgttttaatacattgattaaaaaatttgcaagccaaattatacataaattatgttctaaacaaaaggggtaataagcataggtattctctcttggacacttgtaagttactgttagtgaattgttttttacgtttcatttaataattgctgctaaaggtgatgtttactgataaatcattttaaaatttttttgttttgaaaagtaaatttatcccccatgatgttagatacatttaaattattaagtcttttcagagatgagatggggacaggaagttattttgagccttacaatattatttagcccaataaaagatgcattgaagctcttatatattatgagtttgaaaaattttgaaggtagcatattgaagtgatctataaatatcttcagtcctctctgaagtgtgggtatttcttctatctaaaaaatacatacagtgactgtcttcaaatctacttggttcttgaccaaataggagctaatgggtaatgaatacctttttgtttgtttgtttgtttgttttgttttttgtttttttttttaagggtctcactcttttgcccaggctggagtgcagtggcacaatcacggctcccaggctaatgtttttatttttaatttgtaattttttttttattttttttgttgagatggagttgctccatgttgcacaggctgttctcaaactcctaagctcaagccatctgcctgccttggcctcccaaagtgctgggattgtagacataagccacctcacccagcctatgaatatctttctaacattgtaagaatgaggtaatgtttccatcagtctaatacagatatatttcttccctccaaaacagtttattttgattgtttattttattttgattgtaactccgtcataacttgacatggaaaatgctatatactatgaaaacttagctgaaagggaagaattgttttagaaagacaatatttaaaacaccgcactgccaatatattgatcctttatagttatttcctaaaatgctgttttcgaaacattcctttttcaccctgttgtgtggcttagacccatctcgtaatctgttaattggaaagaggctacagacaccagcagtgtgcgttctgcaggtacacgctgccaaagtaattcctgctcatccatgccctgtctctgtctcttttagagtcataccttatttgagtataggttgcttaattttgctagacttcctgaaaacactaaggtggagtatcagaagtgattttagtcacagttctgcgggagagcttagaataacatcctcctttgggaggtggtctcgggtgcgtggatgttggtatacagtctttattgtaagtctgatacaa

SEQ ID NO: 7742 - DNA, 6000 bp, Homo sapiens
ccactggcatcctttggttagtttcagtggttgctacatttgttgactgttggctaattaattctgagcttgctaccactgagcaaaacaatgagtgggtggccggatgggagtgtcagagtcagactatcccggctccaactcctagctggcctctcaccagcagtttgcccttggacaaaagactcaccctctctgagcctcagtttccccatctgtaaagtggtaacaagaaaaatgtgcctcacagggttggcatgaatataagagatatatagtgcttgaaagtgctttgcatatagcagtaaacctttatgaatgtttacaaatgctaactttatgctgcagaaccattgaaaaggtatttctaattctttttttcttattattttattttactttaagttctgggatacatgtgctgtatgtgcaggtttgttacataggtatacatgtgtcatagtggtttgctgcacctctcaacccattatctaggttttaagccctgtatgcattagttatttgtcctattgcccttcctccccttgcctcccccagcccccaacaggccccactgtgtgatgttcccctccttgtgtccatgtgttctcattgttcaactcccacttatgagtgagaacatgtggtgtttggttttctgttcctgtgttagtttgctgaggatgatggtttccagcttcatccatgtctgtgcaaaggacatgaactcattcttttttatggctgcatagtattccatggtgtatatgtgccacattttctttacctggtctatcactgatgggtgttcgggttctttccaagtctttgctattgtaaataatgttgcaataaacatacgtgtgcatgtgtctttatagtagaatgatttataatcctttgggtatatacccagtaatgggactgctgggccaaatggtatttttggttctagatccttgaggaattgccacactgtcttccacagtggttgaactaatttacactcccaccaacagtgtaaaagaaaaaacaaccccatcaaaaagtggatgaagaatatgaacagacacttctcaaaagaagacatttatgcagccaacaaacatatgaaaaaaaaaaaaagctcatcatcactcatcattagagaaatgcaaatcaaaaccacaatgagataccatctcacgccagttagaacggcgatcactatttctaattcttcaagtgatctttatctgcgagaatttctgttgtgagtgaagcacccgcggtggggcaggctgtggagggggaggcaactggagggggaggcagcggggcataccgagaagccctgggggtgagagctggggctgggacctgggctgggtgagatgctaactgggcttagagatgacagttacagattctgggcgagcagagcctccctttaccactcagaaatttttttctgaagctaatgagctctgagtagccgctgagctactaacttaccatacttggagtggctggatgagagctgaaatctcagctgatcacctccaatcaaatccctggcttaggctgcctctttttggccattcaggacagcaaggttccagccaccttagcttctcctatgcaggtctcaactggtagccgatccttaaagcccgtttggttccttaaataagcaactacctgcagatggaacctgagacgagctcagccacacagaaacgcttatctgtaggacttcactgaaggtccagtgcgtttcctcctaaggactgtaaacgctcaggtaaatatttgtcagatggattaatgaactgaagacctttatagaggaaaccttgaagagatatcgttagaatctcaagtccttgttgctaccaacaactcttgtgaaagtctttggtgtccctgccttgctccattttcaaggcccctgctgcacacacagatgcctcctaagctctgagatgcgttggtgactgcacaaaactcatattagacgtgatagccatcagagtacttacgtgaaagatgcgatgtaaagatgatgagggaggagagagtgccgaatgcaaatgtttttacactttcatatttgtgtgttccacagacttccctctcccatgcccttctgctatgtgtgctgccattttctctgaatgaagggaaaagaaatattggcagctctcagctaaaattcccagtgatggacgtgctgtcatgcagccagggtgagctgtgtatcagggcatgaaccctgagtcacgacttgacctcggaacttcctttctgaagcaccatcttcaagtggtgcttaaaaggaataaaaacaaaactcaagagcactatctagtacatccgcccagacagcccctcagaggcgctgggagaggccctgtgcctgtgtttaagccacacatcccaagacagactctacaccatgtccccagacacccacaggagcgctcattatgcgtgtgtgtgtgcgtgtgtgtgtgtgtgtgtgtgtgtgtgttaggtgtgggcaatgttttcaaagtaaacttgtattcataaagtcaaaagttttgaaagtggtttttaaacaggttgaactgtgagaacattaaactgagtgggcaaggagcttaattaagatcggctccatggccgggcgtggtggctcacacctgtaatcccagaactctgagaagccgaagctggtgggtcgcttgaagtcaggagttccaggacagcctggccaacatggtgaaaccccatctctactaaaaatacaaaaattacaaaaattagcccggcatgttggcgcacgcctgtaatcccagctactcgggaagctgaggtgggagaatcacttgaaccggggagacagaggttgcagtaatcagaaatttcgccactgcactctagcctgggcgacacagcaagactgcatccaaaaaaagaaaaaagaaaagaaaaagattggctcccatggccaagatgcccagtgacagggaagctagccaaacacagtaagtgtgttgagacactggggaatagctgatggccgttaaatgaaagaaaaaaatgttgattttctttttttatatatgaaatattcattttacaccatgttaaatcccagagcgggctatttataaccatttcaaaatgcaaatatgttcattagcaaaggagagaagaacttttccagttccatgaagttcaccaaagccctaattttttttttttttttttttttttttttttttttttttttgagacggagtctcactctgtcgcccaggctggagtgaagtggccctatcttggctcatggcaacttctacctcccagttgcaagcaattctcctgcctcagcctcctgagtagctgggatcacaggcgtgtgccaccacacctggctaatttttgtatttttagtagagacgggtttcgccatgttgaccaggctggtcttgaactcctgacctcaggtgatccgcccacctcggcctccgaaagtgctaggattacaggcttgagccaccgtgcctgccccacaaagccctaattttaagaaacagacaggtacagtggcctacagcgctcctcactaaggccctggcttgagggcaagcctatcatgtgactgagcctgaccaggaagtgctggcccaggtggcaaggagcctcggggctccagggacaaggggcgctggtagccagggaggggcggcttgaagtggctgcagcttctaattctttctgaagctgcctctttctgagggtgactccctcttcattcacccagcagggtgactctgagaagtcagggaaagtctggcacagggaggggagttccatttttaattcggaaattgctcaggaagaatcataccatccggatttccctcgcggctgtatattaataaatggtcactttccttgctgaaattctctggtttccttttatccacgtgaagcttctggaaactcttctgggtggttcttctgttgcttttctgcccctgcccccaaaaatgagaacatgagaaagtgatgtcttctagccacctggaggaccctgcggtgacatcagggcccagtccctgctgtcatgccccaggtgacgtgctgggctgacagcagggctggccgctaacgtcactgtcctggcttctaacgctggtagtaaccaacagagtttagttttgctttgacaactcctcctacagccaaaactattgttatggcccacatgtcattcctatttaccctaaataaggaaaaacaaaggctattctgggctcccggcagtgcttgtggtgggggttatttgcagcgttaccatggcaggctgccctttccaccacggccaccccgtgattttctctgaaaactgcgacagactcgcagcctgccctgaattttcttcacacagcctgggggcatccgaatgcacgggagatgttttacactcagatgaaacaaactgtttagacctcggggaaaagagactgtgcttgaacaaaatgaaccaggagaaagcgccctcctgagacatgtctctgctttcatgtttgaattgcctgggattctgttctctaatttctgatccttataaactaaaactgcctaggaacattgagcatcctgactttgaaggagtctctgtggtgtttttgtgctaccatacatggggaataatgatgtgaggcagagggagagggaatgaatgggagagccaagagggaagagcgagccggggggaaaggagcgcgcagtgtttcctgctgcggttaggacctcacgccttgccagtacagagctcggtggcaagagccgctgggagctgctcccatcagttagaggatgtggagagggagcaccagaagaggacagcccgcagcctggctcgcagcctgagggacgctgtgggtgctcccagccgggcgagcacgctctgggagcggatctgcaggggagaagcacgcgagcctaacgtgagcgtcccgcctgtcgcgtgtcctgccttggtaagcgccctctccggtccttccacactgaaagcttccagcagagatcaagggaaggagtattgtgtgagacttgcagatttcctcctttctgtctggactggtttgatatttgcctgttgaaaagattactgaacgcagtgtgacaagatgagccgtctagctgcgttctgcttgcctgtgtgtgtgacacgtccaggtgtgaggccaaacctgagaagtgcagactgctcactgatagacgttgctgtaaacagtagtgccctgggtgtacagctggtctcaggatcggagaccccggacttattctctgctcggtgacacggccggcttcctgccgcagagctcctggtttctgttgatggcagttgataattggtagccacagtctgcggtcggagccacagcatttgagtctagcacctggggtgggccctgctgatacagtagagagagagtgaacgaggcagacagaaacacaccccccccccctccacgctcacacactctcccacaccccatgccagctataactgcagctctgagctgcctggagaggagattgccggaagctgaagggatgctttgaacgtgggggggctgcgtcacagttggactcccacttgcagaggacctgattatgtccagtgaccacctgaacaacagcacactgaaggaggctcagttcaaagacctgttcttaaaaaaaggtacatttcccaagaactgctatggatgatgcatgctctttcgggtttgctgtggttcttcttggagtttggtctgaggacagagctgagaagaggagaagctctttctcaagaagtttctttctacctaagaggggtctgtcaactcagaacatttccgggtgggactccctttaggaagatgcatgtcaggctttttcatcttctttcaagcctggaattagtttgttcctgttggaggtgttatgcatgagtacacagtttgttgcttt

SEQ ID NO: 7743 - DNA, 6000 bp, Homo sapiens
gctgtgagccactgcacccggctaaaatctggcaacctttataagcaatggacaaaaggtatgtgcactggcaactccagagcttataagactcagtccttgagtttcaaccacattgtttttatttatttatttttatttatttatttttttgagacagagtctcgctctgtcgcccaggctggagtgcagtggtgccatcttggctcactgcaacctctgcctcccaggttcaagcaattctcctgcctcagcctcccgaataactgggattacaagcatgtgccaccacacctgtctaatttttttgtatttttagtagaaacagggtttcaccatgttggtcaggctggtctcgaactcctgaccttgtgatctgtccgccttgacctcccaaagtgctgggattacaggcgtgagccactgtacctggcccaaatttttttgtttttattttttttgagacggagttttgctcttattgcccaggctggagtgcaatggcacaatcttggctcactgcaccctctgcctcccaggttcaagcaattctcctgcctcagcctcctgagtagctgggattacaggtgcccaccatcacacctggctaatttttgtattttttagtagagacgaggtttcaccatgttggccaagttggtcttgaactcctgacctcaagtgatccacctgcctcggcctcccaaagtgctgttattacaggcgtcagccactgcacctggcccacgttgtttttaaaagcagttctaagtcttgagagacagctcaggccaaatctagaagcagtaatttaaatatgtacaaaaggcattatgatcttctgtactttctgagcatgactaagttttagccaaaaaaaaaaaaaaaaaaaaaatggaaccaggctgggagcattaactcacgcctgtaagagactgcagtgaaccatgatcatgccactgcgctccatgctgggcaacagagccagatttggcctcaaaaaaaaaaaaaaaaaaaaaaaggaaccaagcctcacatctaactgtatggtgcttaaacatggaataatgatgaattcctgctactgctaagcaaatttcttgaatataattcttgaacatcatagttcttgagagaatgttacttcatggacaaaataggctattatttataaaagatcagaattaacttgttaaaattaagttagctatcatggaattttcccctttacatcaaacatcaaaatgttcttctttccttttttttttttttctttttgcccaaggtgtcactctgtcatccaggctggagtccagtggcacgatcatggttcactacagtctctacctcccgggctcaactgatcgtcctacctcagccttgtcagtagctggaactataggtgcatgccaccatgccctgctaatttttgtagactaggtctcaccatgttgcccaggctggtctcgaactcctgggctcaagcaatccaccggctttacgccttccaaagtgctgggattacaggcatgagccactgtgaccagcctaaaattatttttttaaggtaaacttaccatcagcttttcacacaagtgtttcaagtttaacaaaagatacaactctactttaaatacaactcacagagtgttccattacaataattatcagctaaaaaaaaaagctgaggcacaaaaaagcagtaccttttataatgactctaagattctagagctgaacttgaaactcaaagttgctaatcacttgcaaaaaattaaattgtacctggtgactgagcttaataatggttactcagaaaagctgtggcatcaacaactggagactagccaagtgcacctgcaaactcaggtggtcagaagaggcagagatcacctttgataaatagggacaacctacaagctgattctgaatattttttgcacttgggagctgagccagggcgacaagattagtgaatccaggccccagaatgtggcatgacggccactgtgtactctctcaggggtctgtaattgctgttctccctccataacacactctccattggggtggggatggggggaagggctcagtcaatgctcagatgattctaatttcattcattaactcagcctaaatctgcagagtgtctactatgctaagtgacatttcttgtgagatgattcagttatgcatcttcctgaaaagaaagaggaaaaaaagaatgcagagaaaaataataatttaagggactgcttttctatgcaagaagtactaagtatttctgaaacaaacatgtagatatatttgtacttcatttggaatggatcaagtgaaaaaaaagaaatcttttactggtacctgtatcctaattcttcactaagatggatcatatgaaggatatatgactccttgcttgttcccgtgaggccaggcaacaataagatagtaggtctggtgctggcatccatataacacgtactgttatcattatcaaaccagtccagtgaaatctgtcctccatctgcagttttaataagttcactgaaaggaataattcagaagacattactatttacatgttttaagtcatgtcttaattttaattctaaacacatgacattatttgctcatcaaaaaataacatttttccagcattcacgaacacacacccatatctcgatctacatatcattttctttcattagaaggattttatgaagattagtaccatcaagtatttccagcaacctccgtacaaggtcgtatataaaaatgaactgctaattattaagataaatgaatacttactcattactccaaaacatccagcatttaacccttgtttgattgaggtcactcaactaatgcgacagggaagtctgagtaagtaaaatgctgatctaatctctgaccactgctctagctctttggactcaataatgcagtctccttgtatagtatacttcaagattttcttctgaaataatttaaattatttctcacatagtattcatgaacttacagaattttcccaaacaaacagtgcaagttccaggcaacaaaataaactccagaaggatagatgactaagggaaattaataacaggcaccatttaaatctggttcctgataaatcctggaccgtatctttaacacatcaagagctattatcatcaagatcccatttgcctgtcaataggaagtcattttacaccaataaatcgcccaaaacccaaattaagtggcatccttctcaccccacccccccccccagtatctgctacttatcaatgaatgaatgcagatcatcaaaagatctgggtctttctgacagatgtatgacaaactgcgagacagtaatccccaaacacttctctcatcctaaaaataaaccatttacatcaggttggcggttagggcggggaccaggaggcaaatacctgcagctggggtattttcctgcagctgggggtggagccggggacgtaccttccattttcattccctctttctgttctatatacttcctaaagcagattctattaaccaagaactgggaataagcaagcaagcaaacaaacaacctgtgattttgcagaaatgactgaaaacggaaattcacttacttcctgtactgcaccgggggcttcgaagtgatgaaaggtctaagcagggtctgtcctcgaccctcccagcaccagaccgtcgggtagtacgtttctgtaaccacgggacagtggtcttgaaggaagcggctgaaactctcacccccggtcactaactggggtttctgaagggaaaagcagtatcagagaagggcccagagcaaagtttctgccaaccgtaaaccagaaaccggcaaagacttgtcgctcgcgcgcgcgcttcctccgattacaactctttctggagggctgacgcaaaaaattcacagtcacagaggactgaaacgggggtttcgccaatgccccgaggggaaggcgagaatcgcgataagggagtttgtttgtttttaactccgcctcccgggttcaggggattctcctgcctcagcctcccgagtagctgggattgcaggcgtccgccaccacgcccggctaattttttgtaattgtaacggggtttcaccattttggtcaggctggtctcgaactcttgacctcaggtgatccacccgcctcgggctcccaaagtgctgagattacaggcgtgagccaccgtgccctgcccggagtcattttcaaaagcgccacggcgttcccgagtgcgccgccggcttcgcgatcggtgaccgggcagcgccgcagcgcagaagtcagccgggttcaggctgcgctccgaggaccacccggccgggacccccagggggcgggcgaacgggcggggcctgttggctttcccgcgcgcgctgggggctgccgctcgggagcagctcgccgcctatccccggggctgccgaccgcccctggccgcgcagcctcgcgccgcgcctgctaccctagctcctggcccagcagcccgcggccctgcgccacccccggctcaccttggcaatgctgctcaggtagtagaaggcataagcgacgctgaagcccaggataagggataagcccacccccgagccgaagaaccccacccggacttggtgttccaggtagagggagagctcccgggacaacatccgcaggtccatggccaggcgctgcatggcccccgagcgcggcgcgcgggtcctgcggcgggaggagagccggctggcgagcgggcgagagcgggcgagagcggacgcggcgccgctgcctactcccgaccacagtgtctcctgcctggcggagcgcggcttccgacaacgggcggggcggagcggcccagggaggcgtagcccgagactccaacgccgcccgctccgccccggcttcctggagccgcccccactgccagccactcaggaaccttccagaagcgcggttccaagaccggccaccgggagggcgggcggactgggttctcccagctaggtcgcagtgggcgatggggatccccaagggtgggccgagagctgacggatcggcagcgctggttaaggccccgcacctgcagccccagtgaccttgaacgattccgctctgcggcgggtgtccctaaactagcagtttagggtgtcaggtaagcgtgccttgcattcaaagatttggggagttaatgccaaagatatgttagcaggtaagaatcccacatcctctagacgtttgcgttggtcctcaagactatggaaagagaaaaaatattctatgagcattcaacagtgaggacatcatactcgactctgaatcactctgtgaatctttttagttgctaagtgtcacttaaatgagaagtggtctctgaaaataaatgaaaaggtcaagaatagcaaccgggattcaattgttaaaagcctatttgtggttcattaatgctttgaatttagagacttatggaaattcacaccgattacctaatgtacagacaagaaaccatttatgaagtagggtctcctaggcttatttatggcaatatgataaatcaggatacttatggttatctgaaatggttagaatttaatagcctattcctactcttatgaactccttcctcagagaggtaggaagaatggcaagacttaaacagacgaaagaagggaaagtgctgtctagattatgaaaaatgccaaaggattgtaaattaatgatgtaatttagatggggacatgagacggaccagaagtgagcaatttatttggctccgatttggtcattgcaacttggtggttggctgcagcacccaaaataattcaattacctttactgagcctgtttttttcttgttttaataatctgtagcgtaacaatttctactttatagagttcccgagaggacaagatagtgtatatactggactccccgtgagcagaagtaattttcacgctctggctctcacacctgagcacacatagc

SEQ ID NO: 7744 - DNA, 6000 bp, Homo sapiens
cttaatctgaaaatccaaaatccaaaatgccccaaaacgcaaactattttgagcaccaacatgacactcaaaggaaatgctcactggagcatttcagctttcagattttcagattagaaattctcagtgggtaaatacaatgcaaatgttccaaaatagaaaaaaaattctgaaacttggatcacttctggtcacaaacatttcagagatacccaacttgtatagattcaaaacatgaattatataaaatgtggagtgtttgatgcccatgtggctttcttggtaccatctgtccagcctttttacactttctctcccatttcacaattaattatccatatcttaaaaaccccatgagtcagcctgggcaagatggcaaaactctgtctgcacaaaagcaaaattcaataggcatggtggggtgtgcctgtaatcccagctacttgggaagctgagatgggaggatcgtttgagcccaggaggtcgaagctgcagtgagccatggtcacgctactgcactccagcctgggcaacagagtgagaccctgtctcaaacaaacaaacaaacaaaaaacctgtgagcttataaatgctatgacatagctctctgtcatcctcaggtctccctcagtgcctgagacctggttaatgttcaacatatgcttaggatgaatgaatagaaaagctatgaaaatgttttacatccaaagaaataagagtaatactagcaaaataaaggaaagctcatcagatcataaaacttttgttatacttatttggttacaactattccttaaaaatagtgttccatttatattattaaatatgaccagtacctctaggtgaaactttttgagtactttgaacttgcagacatattttaatgtttctgaaaaggtacatctatacaatggaatactatctggcaataaaagaaacaaaatattgatacttgctataagacacaaaaaaagtatcatattgtatgattctatttatgtgagacaggtgatatcagtaaaatgatagagaatctctaaaaattctgtccttcataaaagcaatgagagaactggcaaacagggaaaaaaagttcagaatcaacgttttcagaactctggaaattactcaaagccttgcagccatctggaaatggcacacaatgtataaagatgcaatttatatgatagtaacataccagagaagaggagggaatgatactaatagaaacaaagtttttgtatactgttgaaattaagctggcatttatataaatcgtccagcatggacacatgcatagagacagaatgtagattagtggttgcctgggtttgagggtggtaatgggtagtgactacaaattgacacaagggttcttcttaaggtaatagaaatgttctaaaattacattatgatgatgtttgcatgcttccgtaaatttattacaaattgtatgcttaaaatgagggaatattattgtatgtaaattattccttaagctgctaaaatataaattaaaattatataagcatcatatttgtatgttagtaatagctaccatttgttaagaatggtgctgaacactttatatatattgtatcatttaatttaccttaattataatgatagcacaagacattaggtattactgtgcctatttaagagatgtaaaaactgagttcaacaagggcaacaaaatataaaggttaaaaaggcaggcttttggaggccaggcgcaatggctcacgcctgtaattccagcactttgggaggctgaggtgggtggatcacgaggtcaggagattgagaccatcctggctaacaccatgaaaccctgtctctactaaaaatacaaaaaattagccaggcgtggtggcacacacctgcagtcaggagtttgagaccagcctggctaacatggcaaaacctcgtctctaccaaaaatacattaaaaaaaaaattaggtcaggtgcagtggctcacacctgtaattgcagcactctgggaggctgaggtgggcagatcatgaggtcaggagttcgagaccagcctggccaacatggcgaaaccctgtctctactaaaaatacaaaaattagccaggtgtagtggcacgtgcctataatcccagttacttgggaggctgaggcaggagaatcacttgaacccgggaggcagaggttgtagtgagctgagatcacaccactgcactccagcctgggtgacagagcaagactttgtctcaaaaaaaaaacaaaaattaccaaacagaacatagcaagtgttgacaagagtgtggtgaaattgggacccttcagccctcttggtgggaatgtgaaatggtgcatccactgtggaaacactgtggaaatatctcagaaaattaaaagtaggattaccatatgctccagcagtcccacttctggatatctatctaaaataactgaaaacagaatcttcacaagatatttgcacattcatgttcattgcagcattattcacaatagccaagaagcaaccaaatgtccatcaacagatgaatagacaaagaaaatgtggtatatatagatatatgcaatggaatattattcccccttaaaaatgaaggaaattctgtcataggctataatatagatgaaccttgagaaccttatgctaagtgaaacaagccagtcacaaaaggacgaatacttcatgattccacttatatgaattatctgaaatagtcaattcttagcaacagaaattagaatagtggtgccaggggctggggagggaaaaagggaattgttcaatgggtatggagtttcccttttgcaagctggtaagttctagagatctgttgtgcaatgttgtgcttatagttaacaagactgtacagttaaaaatggttaagatggtaaatttcatgttgtgtgttttttaccacaataacaattaaaataaaataatataaacgtttgtgcaagaaaagattgtattttctgtcaccgatgtgtacgtttaatgaatgacctgagctgcatgactcagtcagtttccatatgccttccttccctctttctcactcaccttatgtttgcacaaacaaaagcacatttaaaagataagttggacactgggaattttatttcattttattgccccttattccctgccttcattttttttccttccttcatgggaataacccaggacacctgacttctaaatgtaaatactccaggaggcaggtatttccccgtcttatttcatttctccctatgcattttaagtgtcttgtttttgattcattcggggtgtctgcctctaaggaacccctggaagtgagcctgcctaaggaagaccctgactttctgtttccatgtgtagggaaacttcagacatgccagcagccgtgccccagtgtctagggaggagctgatgacagtgctgtctagactggcagatgtgcgcatccaaggcctctacttcacagagactcaaaggctcaccctgagcgaggtggggctagaggaagcctctgacacaggaagtgggcgcatagcacttgctgtggaaatctgtgcctgcccccctgcctacgctggtgactcttgtcaggtaggaagttttcccatccgcaacatttccctagggagctcctgtggccgtttttggctgctgtccagcactgtgggatggtttggggccctctgtctattgtttctctgttcaagtttctgcagggcttatcttatatcttacttagactcccttcaggaattaagtgtgaaaaagacatcatcagtgtctcagaattcataggaaagccacagagattcaatagatgctgagggttagagaaatccagggtaggaaaataatgtactatagtttcaaatagctagaaggaggatattgactattcccaacacaaagaaatgatcaatgtttgagatgatggatatgttattaccttatctgatcactaaacgttgtatgtgtcacaacatcactatggactccataagtatttatcattattatttatcagtttttaaaataacatattttttaaatgaaggagctcaccagccagcatcttagtatttgagcccctgctttcccaataactgaccttatacctttctctaatccggagcctccctctacccactctcaactccccagtagagttgaattccagagaatatcctggatttcttagaggacattatgttctagcttgcagcaggactctcgttgtttgaggtccagtcaaccagagctgtcttcagatgattaaaatgtgccataaaatgaaactgtttaatttctctggctataagtatgtcttttcttaaagatcagggcaaaagcacaacgttagcatgattaataaaagtagcaaacactcattctgtgtattccatacatccataagtacgtaggcttagcaaaacctttcactttctttcctggccccctggtagccgaaaaccccaaggtgatctgcgcatacgagttcccactttttaaacctgcaaaaacaaatctgacctgctgtggtcttctggggactccaaagttgtaatatttagcccacaggttgcctacattcttccccttcctccatctcttttctagcctgattaaaattgatagcccgagggaaagagagggactctggatttccaccctcctacccagggcgtgttccctgcccgtgactcagcctgtgatttagggcgtctgcagggtgaggtgggtggaaggtgatgcccgccccacctcacaggaattacagagcggtgcgcttacctgcgggactgttatgtgcgctctggcacaggctgactcatgtgtgaagtttaaaggtggggcccctgccgcagacagccttcctcacctgagtcaggcaggcccgggcactgagcaggaagggcaggtataagaggaagaggcagaggttcctgcgcagccagcggacgtccaggaaccgggatgcctccagcagtgaggcggtcagcctgcagcatgggatggctgtggatctttggggcagccctggggcagtgtctgggctacagttcacagcagcaaagggtgccatttcttcagcctcccggtcaaagtcaactgcaagcgagttatgtggagtttagacccagccaggtaacgtccttttaagttttggtttgtgatagggaagagtttccagctttgtgacattttaagttacagttacggtgattaatgagtaaatgggtggactgaggaggggctgatggcctcccagtcaccttgactggcagtgtttattacagtgcctgacagattgctctcccgagctattaaccgcaaaccccattaacatcagcccacctggaaatgccgagacagttaagagcttgaatgcttgcgggatgttaatatacgatgaaactttatgccctttagagaccatcccaagcctcagaacaaaagagtccaatgcctatagctttccaaatgctacttggaagaaaatttacccacgggggggagaaaatgggaaagagtgaaatccaatgcttgagaaaagtgatcaaagtttgcataatacctaaaagacatgcttccatttgccaggcatgaaacattaagaaattctgctctctttaaacttcctggatgctgcatgtattcttacagagaaatagatcctatggctacagatacagccctggaaactggattagggacataatattatcatttgtatataatatgtattacaaaagtttactggaaaacttaacataaaacatcatcatgttaactagttataaaacccctgtattgaaatagtgcattagaacacattcgttttcatttaaaagtgagtgttcaatataatctgagtacttgaactgatttttttgtagaatgtggttttgcttgctttataagaggtgaaaaaatgattctattttagtaactgacaaatcctcagagtcacatgatatgtaactcttgc

SEQ ID NO: 7745 - DNA, 6000 bp, Homo sapiens
tatttgtgtttttattgtatatggatatctaattgttctgggactgttgaaaaaactgttatttctccataacaatggactgtatatgtgtggatctgttgtagagagcagggcttggcttagtgctaaggttagcactcactggtgcactgttgtcaccaataatgttgtctgttgtgacagacagtgcctttgctgtgccgaagattcccagatgatgttgttagtcttttcctcttagaagagtgggcagttgctcaggtgaaggcaacaccagcagcctctggaaaatgtgggatgtttgttctttaaactttatcagaggaacacagccctgatattcatgtgggcccttttctattttccctaagtgtcctccggtctgagaaataaacggagagagtacaaaagagaaattttaaagctgggagtctgggggagacatcacgtcagcaggttccgtgatgcccccgagccgtaaaaccagcaagtttttattagtgatttccaaaaggggagggagtgtacgaatagggtgtgggtcacagagttcacatgcttcacaaggtattaaaaaatatcacaaggcaaatggaggcagggcgagatcacaggatcgtggcgaaattaaaattgctaatgaagttttgggcacacattgtcattgataacatcttatcaggagacagggtttgagagcagacaaccggtctgatcaaaatttactaggcgggaatttcctcgtcctaataagcctgggagtgctacgggagaccggggcttatttcatcccttatctacaaccataaaagacagacgttcccaaagcggccatttcagagaccccttgggaaaccattctctttctcagggatggtccttgctgagagaaagaattcagcaatatttctcctatttgcttttgaaagagagaaatatggctctgttccgcccggcccacaggcagccagactttaaggttatcttccttgttccctgaacatcactgttactctgttcttttttcaaggtgcccagatttcatattgtttaaacaatttgtgcagttaacacaaccatcacagggtcctgaggcgacattcattctcagcttaagaagatgatgagattaagagattaaagcaaagacaggcataggaaatcacaagaatattgattggggaagtgataagtgtccaagaaatcttcacaatttgttcagagattgcagtaaagacaggcataagaaattataaaagtattaatttggggaactaataaatgtccatgaaatcttcacaatttatgttcttctgccatggcttcagctggtccctccgttcggggtccctgacttcccgcaacaaaacttcttttgtttcctgaaccttattaaaggtctctggggcaaatgtgaaattccttttcaaggcttcctagattatggctaatctttctgaacaaggagatcatattaatattacttattaatggctatcatgaacctaaaaatatgatttatgactcaacaatgcattcataattttgcaccataactatttttataaagaaactgccaccacccctttaccttgaggaaaaaaacttcaaaatgtaattttaaaagtctgattttgtaatatattaattttttctagtaatgaaaaatattatatcaaaaatataaaattggccttgagtttcttggatcaaataatgaagtctgaagacattgttactatattactttggggtttgatgtcctgtagtctcttaaaggactgaaatttgttgttggacagttctcttcagctctgactcttttccccacctgctgatttgttctttgactgagctttgtgtgccttttggaacaaggacttggttttctttctatccttcattttaaggacagcgaaggacacacaaaagttgcttagtaagtggagaataaggaataactttacaataatggtggcaataaaggtagcaattctttcattaaatacattgtactagctttcattaaacaaattgaagtaataattatttaattacatatgaaaactagaatcttacctgcaatgggtcgtgcaaattaacaatcttttaaacaactctttagaaagaaaaattatctgccatatttaaataaatgttttttcattcttttacatcttatatctttgatgacaattgcaaacattggtggcaacatacttggaactttatcttcaattttctaaagacataagtagcctttttttttttattgaacataaacaacaaagtaaaaaaaatcaagttccttacatgttatttgctcttcaccagatttcttcctggtacggttatgatctcaaagaaacatctcaaagaagacattttctaagagttttctcttagaagcttacagagatgagcaagccttctgtgacctcattcccttgcggggaacagtaatagaaaccccaaattaccagtggcctcgtcctaagagccaaaccctgtggacattctttctttgttatctcagcctcatagagggtctaacattgtttatccatactccttccttcctctgacttttcatgcctctctcagaggggtctgttttctgcagtatgtggaaggtgatgggtgtcctggagtttcagcccccttttttctctctgccattttcatcggccacatcgtcccctctgccaaccccagctgctgcttgtgtatgtatgcctaacaaacctgccttttcacatcagacccagttactcccctgactgcctattgacacctcgacatgaggcccctcacattcagtgtgaactaactgaactgatgatttagtccgtatttcctttcattgttgcattaccatcatctgtctagctagttaccttggccttaaatctgggaatcattttttgcctctcctttatcttcctttctccccatactccatgtagggtgtgccacacacccctcttctcccaaacactccctcttcactgcacttcaccttcaatcttaaaagctaattgtgcacccttgcgaaacttaagtagaagtagatgaaaagttatacttacatttaactattctgcaggcatttttttcaaataggattttagagaccgtaaaaccacatttgaaattcagatgttgcaccagcaatcagactgctttgccagtgatcaaaagaggcagcttttcatatgaaataacacaaaatataaatgtatgtatatagtttatctggtgagaacttttgttccatgacattgtgcactctaatgctttaggttctcccctcacctcagttaccatagttatcagtaagttgctcactacaggtgacccagtatcaggtattgagtaagcatgattttgaggtaagaacatgacagtagcatccttgttttcatcttgcagtcagggagtattggtttgatgaaaggaggaatataggcaagagatcaaagcccctagagagatgagcataaataataactttacatttataagtatcacttagtgttttctcaggttgctctctagcaaccttgtgaagtaggcaagaactgctgtatatatttcatggataaactacaggcctgccctgaattgttcaggtaagtgcatctctgttggccaccatggaacttgttgcataaagttgcccttgtaagaagctgttatcttgcccacattctggtccttccagggcatctgcatttgtagctttcagcatagacacagtgcagactctgtttcctcactccacttcataggaatgcacttggtttatatttctcctggtcttcagtgacacaggctttgagccttagagtcagctgctgagcaggagattctctacctctctgaggtctctcaggctgcttcatcatgctccaagatgaattccttacgcttaagacacctatgctcaaactatcccaaatgacttttcaaaattggtaaccattcctctagtcattttctcatcatggtataacataataaagggaggtagtagggtgggaaatggaaactaaaaatcagggaagtgtataaaattattgtcagagccaagactaaatgtcagatcttatgacatatacttttcttttccattatactttccacgaatctgtttcctgaatgattggtgactgttgcagttttagaatgggattcagtgtgaaagaggaacgagagttaactcaggaagctgctgtagtgcaggctacaaggagaactctattaattcttgagcctgggtactgaatgtggacagttgaaatgcactgggaatcactagttgcctaaccccctatggtaattaatagcttgacttttaccttaacgtataatacagcagttgagtaggaaggtagttaagacccaggtgtttgatgggtgtgaaatagtagctcactgttgttttaatttgcatttcctaattgtagggaattgagcacttttctacatgtttattggctatttaggtttccattctacaaagtacctgtttatgtcctttacctattttcctattggattgttgtatattgatttgtaggaattatttatatagtcctgatactctttatatattttataagcatttttccaagtctgattttcaaacatagtcttcatagtgaaatttcttattcttaatgaaattaataattcatattacttaatgtttataatattaaattaattttataattcacttttgatgttctgaatttttaagttaatcttttttcctttctttctctatagggtatgaacgtgatttctgatgaaactggattggaataattttcatgatctttgtatatttatatatatatatttttaaattttgcatttgacttaaagtgccatgagaaaatttgcatactgcaaggtggtcctagccacctccttgatttgggtactcttggatatgttcctgctgctttacttcagtgaatgcaacaaatgtgatgaaaaaaaggagagaggacttcctgctggagatggtgagtgacattttataatagagctgttttaactactatatcactggtttttactaactaatttggataatataaaattttaacttttttagattaactgtagtctgtgacttcctgtgggagatatgaggatcatattgatagttctccaatgggttcatccagcagttaaaagcatgaaagtatcatatatagaattgctgaattcgatttttgtgttcaatatttagtgtagttaatttcctgtaagttactttatgttactaaataatgtgggtatctcatagttgggatatcaaaattgtacagaagattagtctaatgccaaaatgctgagtggagcattaaaattgcattataaggtatcaaaagagattactcctcccctcccatctcattcctaaggggaagaaatttttatagatagatgtgatctgtagaagttgttgttgttgttgttaatgttttagatagctgcagttagcacttttagggagaacttttttgaaaagattgggtgatagaatagaggctgcagtgagatcattgcaatatctagtatggaaaggaaataaatatacaaatataaaggagggaggtaataggtagtactgatatttttggcagaggacattggaaaattcagttttaaactccttttattcaacaaacaaatgttgccattttttaaaaaattctttttttttttttttgtttttaaccataatgaaaatgactgcattgcaagagtcagtaatccagttgttctgggctctgaactctgtgattagttatagaatacatggctatacagcagttctactatttttagaaattatatacaaataattactctttaaacatgttttctttaagcatatagccacatttaaattttttatacttttatgatgagaagggcctttggtcccccaaaatttacaatagaaaaaaaatattgatt

SEQ ID NO: 7746 - DNA, 6000 bp, Homo sapiens
ttcttcatgttcacgtggcattctcactgcatatgggtctgcctccaaatttcccctgtttttaagagtgccagtcatactagattaaggcctaccctaatgacttcattttaatttgatgatctctgtgaagaccttatctccaaataaggtcacattctgaaggggttagaccttcagcatatgaagtttgggagacacaattcaacccaatgcaaggatcatttgataatcaggagtcagggtcaaggtcaggccatcaagtatatcataagtcttccattttgttgtatgttcaattcacctacatagcataaaaatcaaacaacagaaaacattgcattcaagccccataacagaccaattaagttggaattttgatcatggagccccagtgttggaaaaattgtgaaagctccccagattagtttaatatacatccagggctgagaatctatttgagctgaggaccctgcaactagcgggatcagaagaaacaaggttgggggaaagggttagacaaaaacatagaaggggaaagtatgatcaagggttcgtatttatagcaaaatcccccattggaattgggagtggtggcaccaggagttcaggagacagaggaaggtgagacagggtcaagccaagaggtagtgaacagaagctatgtgctgacctgggccaaggtcttcagctcttcagacctgggaggaatcatttactggcagataatagaaagcagctgatttaaaagccaaatccaggaactagacttgctcaagtgtctgtcggaggctctatctgcccctctgctgctgccgtttatacaagtcacagactcagccagcctacagccacctctaatcaggaggaacgtgaaggatgatttaatgtctgaaacgtggaggctcacaggtaccccactttcagcagatacacattgtttgaaaatccagatttgtaaaatggatgcattagagaatatttacttcacaaaatgattcacagtgggactcctttaaatagcctgtttcccctgggccaactgatttgatttgccagaagtcattgcacacaatagttttccataagcacatctggcaagaagcatcatgaacaaagttttagaagacaataattcttgtgtttctgacaccagttttgaacttaaacacatagtgcacctctctgagacttcattttcttatttgcaaaatgagaatatgggtcctgactagtttagtatctttaagcaatgaaatatgtgtgaaaataattagaaaatgctgaaatgtcttaacaaaatatatttatggaagccattattaacactaacatgtggcttgaggaaatcttatgattctattgttatttagctcataatattggatgtgatgagatgaagatgcttgctccatcaatggcttcagggaggatgctttatggcctgagctctgttccaaattaggacaattaggaagtctgtccctgacttcatcacagtgaagaggagagaaaaatttcagcagagagaatataggcagggcagaatgctaaagctggagtggaagagaactgcaggcacatcaaagtcatttctagaattaagaagaccaggcagctagccttttccacaacagaggaaggaaagtcagcattccctccagaagcctaagctcccgttgaagtttgggcatctgcagatggaaaaaattaaaattattaataagagccctggaatggaaaacaatcagtccagtgaggaaagactgtgatgaatcagcagaaatgggatataggagaaggggcattgctgtctgatacaaaacaaacaataatgttgttggtgaccttaggaaaaagttactaacatgtctgtttttcttttctctttttttaaattataccttatgttctgggatacatgtgcagaacatgcaggtttgttacataggtatacacatgccatggtagtttgctgcacccatcaacctgtcatctacattaggtatttctcctaatgctatccctcccctaactctccaccaccccaacagaccctgttgtgtgatgttccccctgtgtgtccatgtgttctcattgtttaactcccacttttgagtgagaacaaccagcatatctctttatgaggcagaattaggagatgatattagaatgccactgtacattatagctaactattcataaactttattttgtaatgaaatacatagttatcattaatagttcattttaatcattcttttggcttaaatcatcatgttttataaacaatctctcttagtgctttcaagtaaagaataatcttgcctaacttttgagacaagctgctgaggccctggtggacacaaccaattgccagcatcccttatgaaactgggttggatagaggcttctggagttctgtcctgcctatacattgcacacacaaacccatttcctcctgcctgacccatgctctcaccccatcacttctgtgagaagtttcaaactgaggagcaatcagattttcacttctctcttcatatccctcctcagcagcagcagcacacatacacagggatagaactcaaagccagagggaaccaagcagatgcatagtggagataaaacatgtagacagtatgtgcagggaagcctgcacctgaagaattagtattttatgccaagccacttgggaatacattttcgtaaagagaatgaaaaggaattaaaatgggaaccaactgcgtaaaggaaagggttgaaagtcttacagaacgctcgtcagcaggattgtttcaacactggctcattcttcctctctgagtctaggtgtttctcattctgtctctgctctattttcaggaagattcaagaggtaaaacaggactgagccaatctgggaatttgagagggaaactgactttcgttagtgagttgcatggagggtgtgatagaccatcaaaaggtttgctcctgagcacaccatcctccaaattcctgaaaccacaaagtgtgttgaacagttactgtctacagtcacgatttaggtcagctggaaaaatttcttctggaacacagagcatttgatgatagacatgtctaggaagcatctaaacattatcgtgggagtcaagataaatgagttgtcagactaactccatgtgtttcttcaagcaggagagaatatatgttttgggaggtctctagtggcctttcctaagaagtttaaaatactgtacaaactaatctaaaagtgaatttgcatgacagttccagcttgggtggattcccctcaccagcattggaacctgctctcaagaatgtcaaacttgcaacagtgctcatgtctgaggataaggttctccaagataggatggtaataggacttatgatctgactcacagtgtatgctcaggtcttttataattgttttctttcttttcataaactgtattttaaaatgtgatataacacaaacattgcacaacataggcacattgtcctcaagatctttcttggccctgactcagattctattctgagtttaattggctggacccagtaaagatgatgatctgctctgatatccacagactgaggccaaattccagtctcaggactcaccagacttgtggcatcggagcagttcacgtaagtcccatatgtgccatagttgctgcagaaatagcaatgccaacatctcgtaacaactgggaagaatgaagcagcaaatacgaggcggctcccaataccaaaactcactcccaatgcaagatcattaaatgttactctcatgccccctaaactagatgtggttacttatcctgttcccccgaggcctcaagcctatgcccctgtccctgagctggtttggcaagaggcccaaagagggcggcaccagcctggctgactctgtgaggttcagtggctctctggtcaggcctcataactctcttgatgtggtgaattaggctactgtcaggaaccaggagctgcccttcgggattcctagggagatgttatggtcaatgggggaaaagtcagctagcaacatctggccctgcattgtgacaactgctcagagaacatccttatctctgcttcctagtgctctataaagagaggttattgcctcaatcagcctcttgatatattttatgttgacagtgtgggacgtaatgactttcaaacatattgacagtttagtttttactacacaccatacactactgagtgatatcactattcttgttgatttttatgttcagttgagtcaacattaagcctcggggcagccctgcatgtcagatctttaccacaagcctttgagcacttctctcaataacaactgaccacatccaaaaggaaggcaaaccaagcatttgggggctaatgttttcctcctataaactcaaacaagaaagcacatgtgcaacagaactgacaaacaattattgcactcagtgtgtgaagcatcagggctacaaaccaacttaagttgtgtggctttccttatcaaggcttttatagagatggtgagacatatttataaataaatctgtaatccctgcttcccaggatatggatgtctgggcatgaacaatcaatgggtggtttctgacttgggaactccccattgaaacttgggaacttagaccagctgcctctgagtctcacctttcactcaagcatcccatgtaatccacctacctgctagcagcaactgtgctacccttctgatgactttggctggtccttgttctcagttgttgcctggtgcatatcagataggatgctctttgagctctctgcatgggaaaccaattaagacaatgctggacacataagcattgctcatttcccagttaagttctgtggctttgtgtcatgacctgactggagctcgtatcttctgtgtagccctcttctatgtgctttcctgctgcttcaccatttgtataattgtgagcttggtagaggcatcattgcagatctgctactaactcggcatggccagctcgacagagagccagtttgttaaacagcttggtgggggagttcatccgtcttgatgttgccctgaatctacaacttcatattcaatatgctaaataatcctcttttcttttcgtgtgattcatgatagtgtcatcctcatcaagctttatctttctcatttcttgcaattttctcttaaggtaacgtataactggcaaaaaggtgagttgctttaaatcaccactttaaagtttttaatttatttcctaaattgctcctgagggaaagaaaacaatatgatttctagtatgaaatttctatttatggtgaataccatgtgggctttggagccagacgttcggtatttgaattttggctgaacctcatactcatttttatatatgtaaaacactgagtgcctcagtttcctcaagtgtaaaatgaaaataatgagtcatgcctattccttagagttgtgtgttgattaaattcaaccacaaaaaagagtgagaataggaggcatataagcagcactcagtaaataagggtttaataatatttttgaaatgtacttatattggaagcatagaatttacgtacatgagcctttatatcttggcaaaagtgacttccttttgaaaatttactatattgtgatctaagtgcttagaatatggtttatcatgagaaatctttctcttttgatgaagcactcaaatcagggcattgttttggtggaaaaggaacttttttttttatgaagcactcagggcctggaacatgatgctcacatctcatgatgaaacattcctaaaaatgaaaaaaaagggttttcattataaaatctcctgctctctatatattaaaactttttggatattttaattcttgtgtcaaatggtgcataaagggtgttttatggttttgcatcatgagaccaaattcaatgatgacaggggtcatgcctgtttcattttctgctgcatatggggcctggct

SEQ ID NO: 7747 - DNA, 6000 bp, Homo sapiens
tgtccttaatgtcattgagctgcacacttaaaaatggttagccgggtgcggtggttcttgtttgtagtccaaactattcagaaggctgagggggaaggatcacttgagcccaggagttaggggctgcagtgagctatgattgcgtcaccgcactccagttctccgaacctccttgcttgggctaagtgaggaggaggaggaggaggagaaggatggaaaggaggaggagtagcaggaggagcaggagggcaaggagaaggaggaagaggagcaggaggaggacaaacagttaaaatggtaaatttaaaattggattccagtagattctgtctattggaaacagaaacaaccattttaaaagatgtatatttccttacaaccagttatttggccttttgtctgatctggctacacatccactaatacctctcaaccagaggtggctgcacattgacacttccatggggaagggaaacagtgctgcaatgaagatacgagtgcaggtgtctttttggtagaaacacactgatgcacgtggcccccacatacacttgactcctccctcccaagactctactgtcattggtctgcggtagcgcctgggctttgggagtttctaaagcttcccagatgactctaaagtatagccaaagttgagacccacttcctccatcattgcctctcaaacttgagcaatatgagaatcacctgcagggtttgttacaccacaggcatctgctccccggccccagggtttctgatgcagtctatctggggtggggcccgagaatttgcgtttctaacgcattcccacatgatgctgggagaaccactgtgcctacgtgaattcccccttacccacctgccccccaggtctcccttagaaaaaatttttttgctgaattccttttttttcaaacccaaatccttcaaactagtttttatgttgacaatgtcttacatcctttttctggaaacaaagatttccttctttctatattgtagttaaatataaaatactaatatgcacataaataagcacagcctgctgtgggcagtgtctgcagaagggatgcccacccttactgtacccacgggtgtgtggacgaggacctacctgtagagctaaactcttcaggaagtaatttgggccctgctctgaagaataggttcgtgggaaggaggcctagcctgtaagtgctcaccacgctcccttccacaatccaggaaaatgggagttctggtctttaagtgatggctctttgattgggccaacaagtgagagcctatgagggacctcgggaccatgcagcccagccccacagtttatgggctctgaggctaaggagatgcgccttgcctaggtcatgcaatttatcaacagctcaaggacacacactctgccccaccaactgtgatatcattttcctccagctcacactacctgcatccttgaacgattgtttctcttttccaaaaataggtatattaaagaaataatatctgccaaatcagaatcagggttgcctctagtggggagggagggacataagagcaagtggagggacaaaggggactttaactatgtagataatattttattttgtatgtcataagtacttcaaaaatatttttaaaatctcaatatatagctcactctgagcaaccccagagtagaatttttcaaaagccaaataagctgagagttgattttttactttatgtaatatttactgcctctataataggatttatcccaagttttctttctgtggcaaatgtgccaacacaacacgtaaggggcctgttggcaggtgaaacaaagcccctccagagtatagcgattccgtgtgtcagcctgctttgtcacatgcacattcttttgctctgttctttttttagcccaattttctcaagtgcattgaattccatgctcagcaaatgggacctccccgtcttcaccctccctttcaacatggcgttgtcaatgtacctttcagccacaggacattacaatccattctttccagccaaactggtcatacctataactacagctccaaatatctcctggtctgacctcagtgccctggaggtaagagacactggcttctcacattcgccctggctctgcaagatacgcaatggcctcctggtcaactgtccacgggtgtcagagtctcctagatgctcaggactatggtggcctttctgccttcatcttgccatttaaagcatttgttctactccagagcattagggtctaagggattttttaaaattactatttagtcaagctgatttttctgccttttcccctaaacatctacagtgctaaccccagagtacagttccactgggagtcactctatcgtaagcttgggggtgggggtgatgggagccagcccttaaggcatgtggcctccagcctggttttaaatcttccatagtctactccctccaatcaaaaaactggatgcttactcttagagcttctgacagaacctctctattctgcttttccttatggcatagctcatagaacatctacaataatttagggttcccaagctttggtaggcatcagaatcacctggggagctttaaatacccaaacaggcttcatctcagaccctctaaatcacaatctctaagggtggggcctggaacctgttttaacaaactccccaaattgtgatgcgggccagagtttgagaaccactgtatcaaggggtgaatcctatgtatctctttaaagatggctataaagagattctgtattttttaaaacctggttaacccaaatcaaattccagctcttcctgttggtgtgtaataaatatgtttaaggtttctggattatcaagaacaagagaacacctgaaattagaagaaaaccaaagaaaccttacctttttaatgtgctctcccactgtcaggttatgaaacgcccttttgtcttctttgttgagtgatcaaaacacacgaggagctcaagtcaccttctccctagcttcttgccagaaaactaaagggagcacctggaaataattcagaaggaaaaaatcaaagattcattagaactacccatgaaaaataacagtataaaatagcattaatcgatctagaactgcactaacacaggagcctctagccccatgtggctatataaatttagatgtagattagttaaaaattgagttcctcaacctctctagccacatctcaggtgcttgatagccacacgtggctaggacccactgtattagacagcacagatacagactattccatcatctcggaaagttatcctgcacagtgctgatctggggcaggggaagccttgtccttctcactctgaatgaacagcccatcctcagcaccaaccccaaccctatggctacctgagagagagttctgcagccaagtccaaaaacaaacaaacaaacaaaaaaagcatatgccatctttgccaagttccctggtctagaaatagcaaaatgtctagacatgaagactcagcatgggctggaagaatttagagtccatcttagggtagagtcaaactcacactatggtctggtgcccttagccaatgttagactcagcctaatataagaggggagaagacacttccccttgtgccaaagctggggctccctctggtagagtcactgcctccagaaggtctttggtacatacacgacctagcaatggtggagagggcaagatgggaactgaggaaaacatctttcagtaaatggccttgctcaaaagggacatgctatggctaattatgcctatcctagccctaccagaagttcagctgtaaagaatgatcacttgttaggttcagttaaaccttgttcactcctgagaactgcaattctgtgaacagaataactaaattcaggcctcagccagaaagtagaattatgacatttccatgtatttttgtgttttgagacctgcttgacagttgttcataactagaataagctaaaaatatctttgtttaaatgaatacatgttccacttaatgacagaaaagtaaattcacaaacttgctaaaaattacttctaaattgtggacaagataacctggctttgggtctctggctttagtgtaagcatccaaattgcatagtgataataatctctattgaacatagggatgcatggatagattaaatcaccctcaacactgatggacatttgaaagcaaaagaagtgtcagctgtggtccttgccatccccagtaggaggcaaggcagatcctcatagccaggagcagtgagtggcaccaagctgggagcttaacagtgaccaaggccaagtgtcagtgcaagcaggagagcacagggggagctttgagaaggcatgtgttgcatgcaccagggaagggctggtgtatctctggggataaagctgaaggatgactgggatttttctgtaatcaaagagagagaattttaaatggtattaacactgttcttgaaagaggtaaggtatgtccaatctaaaattacattgtaggagtttgtgggtgtcctgtgggtttctgttcagttgttttggtagcctcatttttcttaaatttcttttgcagttgttgaaatctataccagtgggagttggtcagatctatggctgtgataatccatggacagggggcattttcctgggagccatcctactctcctccccactcatgtgcctgcatgctgccataggatcattgctgggcatagcagcgggtgagcacaagagcccttaccaaatattgagcacctcctccatcccatgcattgcctcaggcatcttctgtgctccagatcttccttgagatcttggcttcctagggaccaatgggagttcccgggatgcttcctgctaactttcaatcccaccctcagtttccttccagaacatcctgcctttagtcctgagttctgacccctcctgtcttaacaggactcagtctttcagccccatttgaggacatctactttggactctggggtttcaacagctctctggcctgcattgcaatgggaggaatgttcatggcgctcacctggcaaacccacctcctggctcttggctgtggtgagtctcccacgcccctgggggagggctgctcatgactacaggatctcaatcaaggataagcagtaaaaacggactgcatgaaaaatcagggccagggttctggcttgagcccacttgctgtctaagtgtgtgaacaggacaagtgacgtcccctctctgagagcattaaaatcacctctgcctacctctctgatgattgtgaaggcaggagcctattgagtcatattaatatcctaaaacatggatgtttgggaggatagaaaaagaaaaatcccagttattcttcagctttatccccagagatacaccagcccttccctggtgcatgccacacatgccttctcaaagctccccctgtgctcacgggctctccagcttgcactgacacttggccttggccaccaataagctcctagaatggtggcactcactgctcctggctgtgaggatctgccatgcctcccactggggatggcaaggacctcagctgacactccttttgctttcaactgacttgtcttgcgttcttcaaactagttgtttgacccaacaaactaaacgggaataactccagctaaatacagagcaatgtcccctggtaaatcagggttgattacatttacccctttgagtgagcatcacagtaacccagccattctaaaacttcagaatgcatcagaatcacctgaaagacttgttaaaacacaaatcgctgggccccctcctcagtctgattcagcgtcagagataaggggaagaatatttctttttttatttttctaaaaaacagtctcattctgagccaagatcgcgccactgcacttcagcctgggcaacagagcaagacttcatctcaaaaaaaaaaaaaaaagagaaaagaaaaaaaaa

SEQ ID NO: 7748 - DNA, 6000 bp, Homo sapiens; identical to SEQ ID NO: 2005

SEQ ID NO: 7749 - DNA, 6000 bp, Homo sapiens
ataatacctcagcttctagaaaaagtaatcgctgctaacatttgaaaagtcaaaattctatgcaagggtctgggagattaacacgattgagcataatagctcctttcaaaccatttcctagggactaggctgcaaaaagccttaagcttgaagatggctttccaaatatattttatttattcaatgaagaaaaagactatttgaagtttccatattcctttcacatacagacacttcactgagctttaagagaagcattcgtctgtaggcgcaaaatgagtaattccccagcttctagaaaatgcaatcagtgcaaacatctgaaatgttaaaatgttgtgcaaaatgtcttttgtagagatatagaaaaaaaaaccctgaagtaaatatcattttaaactggtctcagcatttatgtttaaaaatgaatacatactcatatgcttagtatctgatgcatagatcatctccggacagcaacagcagctgcttcttgggagggtaactgaggccctgagagataacagtgggagggcgtttgttcacagtgcatccttccttggctttatattttgtactgtgtgcatgtattaatattaatctaacttaatctaaccacttaatttaattaaacatggcctcttcaataagcgagtcagctcatccatcccggtggagcagatctttctccaccatcagtactggatgctgaccttctccctggcctggacctcagggatgccgtacagcaaacttccctgacttcttttcacactgagcactaggtgggtgctgtgctggcactaaaaggatacaatgaacataagaggttgtctcagggccgtctgcacaggattgctagccctcccttcccaggctcctgccttactcagctttctccagggaccacaggaggcctctgcatatcttatgtaccactctggtcctttccttgttgcccccaacccctctacccttgccaacgtgcactcccttcctcaggaactctgagacacaatgaataagggagaaggtgaaagcccctcttcctctgggctctggagtaccagtgaaacacactggggccaaatcctcttctggaacacactaacaatatgaccttgataaagtcaacctcactgagcctgattctgaactcttgaaatggtggtggtcattatatcctcaggggaatggaatagagattgaatgagatcagttatgtaaaatgcccagtgttacactcaacacatagcatgtgagcagtaagtgttggatgatatcatcgtcatcattgtcagtagaagcaatggtagttctcactgccaaaacatgattgtttcaacctccgcaggcctgtacacatctccagctctctgacctgggactcacttacacacagtgtggattagcagaaagggtgggctttccagccagaggggctttaccttgagcaagtccttaacttcttttaatgtcaatttctttaactataaagtgagaataattttataccttcctcataggagtggggcaaagattatagataatatctacaatgccctagcacctaagtgccctacatatcttggctgttttgactttactccaagggggctgatctatttactggctcctgtcaagacttgccctcttctgcctccacatctttgttcagttctgttgccctccctgccccgtcctctctttccacctccatctctggaaactttcatgcctctgtttcatctgagagattttatgacactttctctgaccacagtgaattttcccacaattgaattcgtagactgcttatcttctgtagggaaataggaggtgcaaatccagaagactccaagacccttcctctgagtcctctgttagacttattagaaatcaaggtgttaggcaacagccggcagaaaggactccggtcacatgcagccaaagagcagctcctcagtggactcactctgagctccccacacgatgatctctgtgttgcctgggaggggtcacttgccctcctgaaagtcaactccctgatgccttattcaggggtgtctcataaaataaaatggccaattggttcattgataaattaaggcacactggggcttctagcacgtggacagactgcagggccacgaggcgcgtcggctgacatccgcaggagcagctggtgtctcacctccccacgggcctggctccagctgctttgacatccattcagtgcaaatcacattgagtcactcctctctgtgaactttggatggttctgagcagcgctgcgagaggatcctgaccaagtcctcaccatgtcccacaggcccatcccgatctgactgtagtcttctaggcttttctcttgcagcagtcacctcctacctcttgctcttccccaagcccaccataatctttcctgcttctagtctttcctttacttggaatggcctttctaaacttctgtacctaatgaatcctactcatgctttaaaatccagctcaaatgttgtcccctatgaagaactttgctaacctcccagacaaagcgtgttgcccagttttctcagcagtcctctagtgtggagctttttgcgtagtacctctgttacatttacatccttctccccaacaagaccataagcatcgtggggtcaaggatgattttataacccctgagtctgccaagcatggtgtctgataaccaacacatttcattgcatgaataattaaagaaaacagaaataaatgaatgaataaacaatgctctttttgttttgttttgtttgagacagcctcattctatcacccaggctggagtgcagtggcgcagtctcggctcactgcaacctctgcctcctgggttcaagtgattctccttctttagcctcctgagtagctgggattacaggggcccaccactgcactaggctaatttttgtatttttagtagagacagggtttcatcacattggccaggctggtctcaaactcctgacctcaagtgatctgcccgcctctgcctcccaaaggaacaatgttgtttctaacaaaatacaccacctttcctggccttcccacctaaatgggttcctggaaattgttcttggccagtatgggttggtgaggggctagccagggagcagagtcatgttcgcaaaaggtgggcactcatgagagtggaagaagggaagtaagttcctatgtctagaataacactctcctagaaaacattacatctgggggatttttcatttctgtgcttcttattttcactcgcctatactcttgcacaggattgatttccaatgaaatttgataagtgatattttgttaaaatgtcctgattttttttaattattaaatagctataatcccaggcctgaaaaatcccttatccagtagctacagttgttttttgaagcaccgccaccaaaattattcccctggtaattattgagcaatccgttttcacccataagcctgtcacatgtaataaggatgcctgcctgcctgtttattttctggctaatttggtccctttacatcatgtgaccttcagtggcctgtatgcaatatgaaaatcgtcctcctaggactttctttagaaggttcacagaggtgtgctaagcataagtaatacatcagtttttaaatccaggcagagcgaacccatatcagatgtctcaggaaagcctgcaatgctgttttataaagggaacagaagagtttcttgatctttgctattctctgcaagaaaatatctcacctaagtacatcctttcgtatgcactctgtagcaggacatttacagggtcagagaaaaagacactaaaaacttacccaagctgttagctcatatttattaactgcttaatataggccagggtgcaaaggcctttatatgctttgtttaatcttcccccaaaccctgggagatttttatcccagttctgcagattagcagactgaaacacagagaagttgtaacttacccaaggtcacctggctgtggatgccagagtaagcatttattttaattgatacataataatcatacatatataggtacatagtgatattttgatacatacaatacatagtgatcccatcagggtaattagcatatttgtcatttcaaacttgtatcatttctttgttttggggcattcaatatcttctcttctaggtatatgaaaatatacaatacattattgtaactatagtcatcctatagtgctatagaacactagaacttattccttctatccagctgtaattttgtatcctttaataaatattttatcctctctcccccgtacacttcccagcctctagtattctctgttctactttttacttctttgagatcagcttttttagcttctgtgtatgagtgagaacatgcggtgtttaactttctgttcctggcttatttcacttaacataatgtcctccaggctcattcctgttgctgagaatgacagaatttcattcttacttatggatgaatgggattcctttatgtatatataccacattttctttatccattcatctgttgttgaatacttgggttgatccatatcttggctattgtgaacaatgtggcaataaacatggtggtagatatctctttgacatactgatttccgttcctttgcataaacgcccagtcatgggaatactggatcttataatagttcagtttgtagtttttttcaggtacctctgtactgttctccatagtggctgtactagaatgcattcccaccaacagtgtatacgagttcccttttctctgcatccttgccagcatttgttattttttgtgtttttgataatacccagagtatgcttttgaagtcaggtctttctggctccacagtctgaaggtgtaacactaccccaggctgcctctccatagcatgtttcctgatttctggttcaagaagactttttctaacaggtgtcattcctagatggctctcttaagatcttactccctttggcattttacaccttactcatacaatcatttttaaaaaatagcaatttaaaaaaatacagttcaagtgttcatcatatccaggcatgcaagccttttctaaatttttttaaataataaaaaagccccacagaggaaaggaggttatttgtgtcctcctgacacacacttttagattttggttaaaaagtctctagtgggtgcaaagtgaccccctttgtcactggaaacaaataggagcattctttgtgccactgtccacaaccacacagatatgtttcccaagggagctcatcaggtcttcaaacatttagcaagcatgacatgtgtaagagacagtattggagaagtaagacaagccttgctctgccgaagcttacaatccaggagctcaccccttcaaggaatttacagcctccagacagataataacattaggtccatgaaagcctacaaggcaagaagttcaggagagaaagaagtcataaccatcttggaagaatctcaacttgttttatcagaactcaaacgccaatttctcacccctagcttccctcattagtgcttattaactagtattgggaggaccaagcgaagagtaaagctagggtagcagaggccataagctaattgcaaaggacagagctaaagaaacatgctagtttcccctgagcacccaactgcatgactgaaaatggattaatttgtatttctaatggatatacaagaaacacgtgaatatgctaaaataaatttaaggtcaagcaatgcaaagtgttagtgcgtttgccttccactctcagaggcagcctctattatttggttcttgggctgcttcataaaaagttctgtgttttttaatggcctcagcttttgggaggctcaggccacctagcccatcaggagaccaggcccgaaggatggatctgaagagtgggcaacggagagttaaaccagggctgacttcaacaggcccagtcaagtca

SEQ ID NO: 7750 - DNA, 6000 bp, Homo sapiens
gggcaatggctgccaatcaaggccagtgtggggtagtgaaaatagccttgaacgaggggtcaggagcctcagctctgtcattaactctgtaaccttgggagcgcttcataaagatcatcctatatgagaaaagcagggcccttctttagagaaatacagctgtactagtggctgagactgcttattcacgaaaaaatactcttaaaatgcagaaagactgcacacacacacacatgcacacacacatacacacacacacacacacacacacacacacactgactcacctctcccagacgaataccttcttgcctaatgggccagtttagtgctactattaaccagatgattataatttgagcaagtgttatccatccatgtccccaaaacagaagctgacataaaagttatcaaatgcttttctcacccatagaatttatcagccagaggtcaaggctgaaattattatatttgtttcggaatctacttttgaataacaataatatcgttatatggtgtttttaaatttccagacacctaccaactatttcatttattcctgatagcccagtagagtcaatggaacacattttcagaagtgtgctaggactggtgttggtgctgagtgcttcccattcagctaaatttggggacacaaaaattattaagacaaagttactgacttcagtttgcttttgattactggtagaaacaacacattgcgttgtaacaatttatttacacatcttggatgtcctaagggagcacgaaggagggaattgttatttccactggaaaaagaagtgtgtgtgtgcatggcagggctgagggagggaaggcagagggagatgtcaaacacagtttcactgagaaggtgactttgttcctggattaaagtccctgttctatcccttcctaggagaagctctgaatgctaccgaatctctgtgagcttgagattcctcatcaattaaatatagataataatactgaattcatagggttgtcagaaggatggaatgagaaagcatatgggagagcaatttgcaagtagcaaagcactcaataaagagtgtattattctttccactttgcacactcactaacttggttcactccaaaggagaatggcttatccaagagggcccacacctgcaacaaggagccagtgtccccgctcagactccagtggtcttcccctgactctgcccactgagactcttgaggaaatatagaaagcactcatcctgataacattttatgagctctaaaatcatgttaacatattcatataaatacatattctaacatctaaagacatttctgtgaaatgctgcttctaaatcctaagtggattctctctgtaaaaggaagaactaacagagcattgtaagggaggaatcatgattgggaaaatcatcagtatttaatatgagaataaaacagtcatacacttttttaacataaaaagttttaaactacccaaagtttcagagaataaaatatggcagatcctcaacgtttaaaagggatttaactgtggatttgaacagaaaacatttgaatagacatgtgccttgcatttagtgggtactcaacaactgttgaattcaaagatttaacctgatcattcttatccctaaaattataatactcaaatttctccctttatataatatctataaattttgctttaatctaatatattatagtccattttcagtacttgaaagataaaatgttatttaaatctggtagtctcacccatgtttaaaaaaacaggaaaaataaaattgctcttaccttattaataataggcctggaaaatcttaagtaaaaaaactgcacactgcgtaccaatgtattgggagatggagacatttgatatccatgggagattcacaaatagttgtgtttactgaatatatcaatttgtattagttgaagttctccaaagaaacagaaccaactaaaggtaggtaggtaggcaggtaggtaggtagatgggtagatatagtataaggaattgactcatgcaattagggaggctggcaaatccataatctgcagagatgatgtctgagtttgaaggccatcaggccagaaaattcttcccatcaggccagaaaattttaccatcgtagaagataagacatttctcatcccaaaggcttttcataagacctataaaaatatgcaaatatctagtcctaaaaactagacacaagctctgtgcagagaaacagcactttataatgtgctgtttcctttcagtaaatggaatataattttggtaaaaaaaagttttcaaacacacgtttgtagaaggtaaaagaagacatctttcatcccaaagacttctcataagaacctataaaaacatgagaaaagccagcccttatctgagggtagatcaaccttttggtctattcaggccttcaactgattggatgaggcccacccacattacggaaggcaatctctctccctcatccagtctgccaatttagatgctaatcttatccaaaaaacactctcacaaaaacttccacgataatgttccaccagatatctgagtaccttatggctcagttaagttgacccataaaattaaccatcacactatccaaaaaaaaaaaaaaagactcatgattttctctaaattttgtgtaagaaattgatcaccaaaaacaagtcacttcaacaaaacaccaagaaactgattttctttttagacaagaagacagtttaagctgctagagaccggaaggccctggaccactaatcagagtcctttgggtcaaagttgatctccccacttatgagctatatgacctggacacactacagttgatccttgaacaacaaaagtttgaactctatgagtccacttagacatggattttctcccatctgtcatccctgacagggcaagaccaagcctccctcttcctccttctccttcacctgctcaacatgaagccaacaaggatgaagacctttatgatgatccacttccacttaatgaatagtaaatacatttcattttccttattatttccttagtatcattttctttcctccagactattgttaagaatacagcatataaaatgtatagcatataaaatatgtgttagtcgactgcttatgttatccataaagtttccagacaacagtaggctattagtagttaagtttttggagtgaaaagttatatgcggatttttgactacacgagggtcagtgctcctaacccccatgttgttcaagggtcaactgcccttactttattgagccacatctgcatcatctattaaaatagagaaataatagtctagactgaatagagttgttggaaaaatgaaatgaaataacatgtgtaacacatgtctgtcacataacaagttctccataaacattagctattctgctattaataatcattgttataactatgagttctaattctaggcctgctgaaagctattaaaatatggcatgactgccttaactgggatactatttctattgtcacacacttgggaatcttattggatgtttatatatatcattttatcagttctttacacacattgatcatttggccacagagcagttgtacaaatagattatttagtaacctatcaattcaatcaaaataacttgctctattacaatcagtgatgggggaggaaatcctccaagcaccttgcttgaagagaaatgtagaaaccacatcgggcaaaaagtccccctccagccactgtgaaacccaagttgtcgtcagtaacttgacattctagggtaggaatcaggacaggagagaggtgatctctccttttgaccttgtgtattctgacctcagaaataagagctggaattgccttctggaatgggcctgtcacagtattgtgtgatttgggggacccccttcatctgggagagaagggtggtctcagcttccacctcagaaatttctgacccttaatatacctccaccccatctctagttaaaggcttaaaactctaagattttcctatgaggacaaaaagaaaaggaaatctgagcatttgaagaaattcttaaaagtcgatgagtgaggtttccctcacacatgccatcttcccctacctctcctcttgaaaacaatgtcttttgcaccctcaaggtcaaggttaaacccgagttggtactcatttcctttctgattttatttgccttatcctgttctactcctcaattgcctcttccagaatctgtgcaaaataattacctcaacttcaggggaaagtttagatgtaaatacccccgcccccctccccacgtccacacatcccctttcttctctctccctcttaacatttccttacgctctcagccaatagaggagttgaaacatttaaatgcggtatctaaactgcatttaaagaattaacccattttgcccctcactggtctaaaccacagggtgccaaccggacgttaattgctttcatctggtggggttccagacagctcctcagaaggaaggagcgcacattcctggcaccaattggctaattcaatttacttcagcggcattagcctctgtcagaatattcatgagcaggggaatgaggacccgcggtacaggcaggcagcagccactcctgctagggaaggcgcgagggaggggaagcggaccgcgcgccacgctcgggggacggtgaccgcgaccagggggctcttctcactggacaggccgaacgcggtggccgcgggagggcagggcagggcatcggcggggttggtgcacttggcagtaccccccaactcctggcaaccgcacggagactttgcgaaacatccgaaggcagaaaagctgtgacacttctgacagagggggtaggggggtggggggcggggacagcgccgcgagcaggggtgaagagacccagcggggcaccagccgcccagtgggggaggcagctacgtgagcagaacgcccgccctggagcagttaggaccgaaggtctccggagagtcgccggcggtgccaggtaacgcagagggctcgggtcgggccccgcttctggggcttgggactccgggcgcgcggagccagccctctggggcgaaatccccgggcggcgtgcgcggtccctctccgcgctgtgctctcccagcaactccctgccacctcgacgagcctaccggccgctccgagttcgacttcctcggacttagtgggagaaggggttggaaatgggctgccgggactgggggagctgctctctggaagcagggaagctggggcgcaccggggcaggtggaggacgtggcgcgctgggagcggggactgcgcgcgcctggggatggtgactggggatccaggagcgcggcttgtgggggcgcttggcacggcttcaccctcgctggccccgcaggcggtggcgcctccctccgcctgcagaggggacagggtggccgcgtccctcgcacagagatgtgcgccgggaaggggaccagagagccaggctccggggaggcgcaggcacctacggggccgatccctggtccgtgcctcgcgccgcgcccccgccggagctcggctgtgggaggagaatgtggtgggtactcgagtccccgccacctgccggacttcgccaactccccggatttcctgtcctcgggccctgacactcccaaggaaagctctgaattgcgctcgctgtttggtttttgcttgttgtagttactctgggggaagagccgggggcaagggggtcaaatggggctaaagtttcagatttgcaaagagaacgttaccgaggactctcaacgtgtccttagcaatcggagagactgcagcagcctttgcctagctatccgcctctggggcagcagtgggggctgaaatctggaaggcagcccggaggcagcgtcagagccttgttttgttttgtttgtttctgccgagaccaggctggaagtgagaggggatagtaccagacaat

SEQ ID NO: 7751 - DNA, 6000 bp, Homo sapiens
gcatgtgctatcttcctccttcaaatcccataccctactacttgctatttgcttagtgagtttagcctaatctttcacttgtatgtattttagttacattcatgcctgtacctgcttggggccttggtcttactttcctcggtagatatcgcaagttttggcatagaacctgctacatagcacatacttaagaaatatttttgaaatgaattgagatgttgcaaaaatctactttttaaaaaagattctatggcttatcacaagtgaaagatagagaaatgcttagcagaaatttgcattattttttttctctcttgaggttttagaaggcttttacagaacaactataattcgagagacagtgtgggcctagctgtattatttctgacaattttgatttgagctgctttttaaaaatattttttgtcccaactattctgaatccagagatacattcacacatcggtggtatcatgtgctattttaaaaagtaagtgttcccctggtttgacatttgacaccaaattgaaatcacatgtttatctgtttgactttgttcttcagaaagaaaatattgaaatttgacatgtagtggagaaagttaaactccttctttaagacgttaaccaatgacacacaccatcacagattttctcatgcctgaaaagaagccctaaatatctgtaggagactggaataatagtaggaaccacttcgtttgctgagcacggggctaaaatggacttttacccttgctttccaaccccactaggtgtcctttcattctcattccttttctgaaggatttttctaagtggttcagggaaggagtaacttacttgcaaactcccagctgaagcaccatctctggcagcacaggctgaaagctgcacagaattcttccgtgaggatttgcacttacgttctgccagattacataataaagttccttagaccccatcaaacatctttgcctctgcctttttttttttttttcagatggagcctcactctgtcacccaggctggagtgcaatggcgtggtctctgctcactgcaacctctgcctctcaggtgcaagcgattctcccacctcagcctcctgagtagctgggactacaggcacgtgccaccacacccggctaactttgtattttttgtagagatgggatttctttatattggccaggctggtcttgaactcctgaccttgtgatctgcccgcctcggcctcccaaagtgctgggattataggcctgagccactgcgcccggccaacttcgcattttctaaatatttctgtggcgtctaagcagctcctttattctatgaatattttagggtcttttaactgagtggtatactctccaggtaagcattcatttttgtgcaaaactgaattttttggatagtgaaggaggagaccttgagtatatcgtaagaagcaaaattgttgtattacctcagattttggatttttctagtttggttactctatgaagtggcatggtcatgagtgatgcggtttgggggttgactccatgacgccaatctgaggtaccaacatctttcttcttttagtgattatttatgctgcattagtgatgactctagtcaaaaaatctttacatctatttatattttctgactatatccaaggaactttcatataattccagtgccacaactagagtccaggccaaggtttttcccagcaactggatttctaaaacgacttcctaaacatttctttcacctcaggtccaagactgacttaacaggggctagggtgtttcttcttctaatgcaaatatgatcaccatttttcttcataacactcctcaataaagccccttttgtcctcacagcacattccaaacatttttccttcattcaaggtttctcatcatatggcccctttgttgtactcccacatgtgacattttgtgcccacctcatcacgtggtgtgtggagatatacacacctctttattttcagagtagattgagaagttcctgacgttaagaactaaatcttatttatctttgtgttcccatgccccagttgaggaatcatatagcaggggttcagtaaatatgcactaaatggctaccttgtgctagaagtccttactttccagaagatggaatcatatttaattagatgaactaaactgaaggacatagataccctcagaacaaatgttaagcattaaatataaatttttattattattcacagtttatattgggagaaacattcacaagaaaccataagtggtcccatgttctaagaccttttgtggccttatggggagagcctcctaccttctgccatatctctgttttcctacctgaggttctccagaatgtttagaactgcttagttctcaaggattacatctgttctcttcttagctaccagataccaggcctatgtctttggctttagagtaagatcataatggaatgactatgaataaaatctgatcagcaatctcatcagaaagtacttgcttgcatcgtatctactttggatgataaaacacctaagaatatacttttcatacaaacagaaaccgtgaaagaattctcctacattttactgattcctccttctccaaaatatagtttcagagcaggttaacttttcttaatttaatcaagacagtgaaaataaattgaaaagaggctttttaaagtaggatagaaaagggaacagttattcaaataatgctatatacaacactaaagacataaagccttcaactgagggaatttgaaaatatatacacacatatgaatagaaatattataacatacatttgaaatgtataagaaaacatgaaattttgtaagtaagacattatggcttgcatttgtagtttatggaatcttaaataattggcagtgccttgggattcatctactacagtttttttatgttgttgttgttgcgtttctcagaaaactgggtcttctaatcaaaccagaaattgtgagaaaaagaaagaagaggagaaaggacctaataaaacatgtgttgaccctaaacttgacaacagcttaagcctggtgaactcttacttgctgttcttgatgctgggcttcctcctaagataaaatataaacatctttcagggcctggaagacctggaaagatctattccatatctattactacaacataatccatctccattctcctcccttcctgcagtacatacatccaaccccttcctgccgcagacattccccttgtttattctgcctagatcattcttccctcagagctgcacaacgctgactcattgtcatcattacatttcagcctatgtgccatcacctcagaaagagaccatcccttaggtaaaaggtgtcccttggtttctgtctgtattattcccagttcttacccttgctctaggttgtgtcttttggacaagaagaatctagacctccctctaagatcaacagctgttagtgtgggaaccagggctagaattttggttaactgaaattacttcacctgttttggattctgtagaggttactgaggaaattttttaaaaggaaggcacatagaatggtttaagaagaaagcgtgcatttggaatcaacatttatgtggagtcataagaagagaaaaaatatgaaaacttgaggaaaaatatctttttcttaaagggcctcaaaacattttcattttctatgcaatgtcttttgaccaaaacaagccggtagatgaaaacagtgcagtttctgattcccaatcacaatatgacctcctatagatgaacaacccaggcaatccaagagcagtttaaaaatagcttggtatggtcagatttgtgataaatgctagatgggatacaaacacttctttattcaaaaaatgcttactatgggccgaacatgtgctgtgtcttgatgatattgaatattaatcacagccctcctgaagcttttagttcagaacagttataagaaaaaatctcatcccagaagtcagttcgtaggcaaaacaaggcaaatatatgtaatgttaccagaaaaatctgaattgaatctaaagattgtactacatgagccagaataattgagcattttaacacagaaaagtatttcaaagagctcaaagatgaagccaaggtttgatacctggctaccaggtgaatgatagtgcccctgacagaaaagaacatacagggaaaatccaagctaatatctaaaaaaagatacggaggtcttttctaagcatcttgaatttgggtgatggctgacagctgagtggaaatggaccatgaaatggtcatccaagcagccctggatctggggagctttggggttggagttagaacttttaaaatgcattaatgttaggtaagcaacataggatggtatctggaacttaacaggagtccataattgctgtcagaattattagcatagaattcggttttaaacattgactaaattgaatgggcgaggtgggggaggcatggcgccagttaaatagccaggagaggctggactggggacagaaaagtgtgcttgactgcacaagaaatcagagataatggtacggacaagcctaagcccatgtaactggtatccgaagaattactgctaaggttaagtaagaataagtgcgtaagagaaagaggacactttccattggtagagtgagaaaaatgaaaggaaggtagttggaaatgatctcttccccctcctaacccctatgacagaacacccagtcatcagattaaagcgagcaccagagcaggggaaaacaaagcgtgctcaactccaggggctgcaccgcgctctaaagaaaagaccagatcctcttccttccttctttccttccttccacaccttgcaagggtcctctgtcccgcactgcgagtaaatcatacactttggaagtttagcattagagagcccagcaggggagaaaattgtctgcaagttaaaaaaaaaaaaaaaaaaaaagtagaactagggcagtccgaggagattgaaagggcaaaactatcaagcaagaaaactgtaagttctgattagttttatgactttgccttcatgcctcaggagctcaactgatcacggctttcacgacaggctaaggtgggtgttggaggggcagcttgaaaataccctcaaaactctcctccagctccgtgctttcagatgcaaatgcctcacggagagatggatgggctgcagcccctcctactttcacccctcttctttattttcctgcgaaggaatccatctgtacagatccgccaggcgggaggtggaggagggtgcgcgagggtgcgcgcgtgtgtgtgtgcgcgcgtggcggccgagcggctccgtcttcgcgttcttttccagtagcccccaccgggtctctgggaggcgccgaagtctcagtggctccctgggccggcctccgacagcgctgacagcaggcgcccgccgcccaccatcgtcgccctcttcccctccctcttcggccccggctccggcgcgctctctcctcctctcctgcgcgccctctcgccctctctctggccgcgcgctcccgctggctccggaccctgcgtctcagctgcccgggcgagccggaggggcccctcgcagtgagcagacgcagcgggcccccggcgcccgaggccggggcagggtccccgcgcaccgcggagtgggctgtgattggaggaggagcccgtgccgggcgggcccgagcgggtgtcgagccggttcctccagtctgccccgcgcgcggagctgcgcgcactgggtccccaagagcccgcgggcgtccggcagccgagcgcacgttctttcggatgcacacgcccgggtccctggcgtctgacgccgtggggagggcagcgaggccccaggtgagtgtgtctgcctgcgcggggctggggaggcgccgctgggcagatgtgcgcccttgctgtgcgcctttggaagcaggactaatcagtgagcggagagc

SEQ ID NO: 7752 - DNA, 6000 bp, Homo sapiens
tgtttgactataacgaccctagtggatgtgaagtggtatcttgtagttttaatttacgtttccataatgactaatgatattgatcacctttcatgtgcttattagccattcacatacttcctcgggagaaatatctattcagatcctctgcccatgtttaaattgggttgtttgtcatttgttgttgagctccaagagttcctaacatcctggatactggactcttatcagatacgggacttgcagctctttttttttccaccgttacttgtcattcattttcctggtcctgttctttgatatacaagagtttcattggaatgaagtccaatttatctttttttcttttgttgcttgtgcttttggcattctgtttcagaaaccaatgtctcatccatggtcatgaagatgtacagtctgttttcttctacgtgtgttttggagttttagctcttacattaaggtctttgatctagtttgaattagtttttatatatagtgtgatgtaggcatcttggtccattcagtgttgctataaaggaatacctggagccaggtaattcattttaaaaagaagcttgtgatgtcatcatgattctgatgtctggaaaagttcaagatcaggcatctgcatctgaggaaggccacaggcagctccagtcatggcagaagatggcgtggagctggtgtgtgcagagaccacacggagatggaggaagcaagggctaggggtgccaggcgggttcaacagccaactctggagtgaactcatagagcgagaactcactcattaccatgaagacacctcccagccatgcatgagggatcagcccccatgacccaaacccctcccattaggccccacctccgacactgggtatcaaattccaatataagatttggaggccaatatccaaacgatagcagggtccaactttatttttttacatgtggataaccgtttgttggagacactattacttctccattgaatagtcttgacgaccttgtcaaaagtgaactgacggtagatttatgggttcatttctggactttcaattctgctccattgatttttatgtctctctttacactagtactacactcttgattgctgtagctttatactcactttgagtaagtagtaatgtactagtccatgttcgcattcctataaaggaatacctgagactgggtaatttataaagaaaagaggtttaattcgctcatggttcttcaggctgtaaaggaggcacggtgccaatgtctgctaagcttctggggaggctttgggaagcttccagttatggcagaaagcaaagggggagcaggcacgttacatggtgaaagcaagaacaaggttgcggggtaggtaccacacacttttaaacgaacagatctcatttcgacacaagatttaggtggaggcatgtaataaaatgatatcaagtaagtttgagccctccaactttgtcctttgtcaagtttgttttggctaccttgcatttccaatagaattttcaacttgtcaatagaatgttcaacttgtcaatgtcttcaaaaaagttactgggattttcatatggattggattgactctgttgatcaatttagggaagattgccatcttaacaatattaagtcttccaatacatgagcatggaatgtcttttcatttatttagtcttaaaatttcttccaccaatgtttgtagttttcagttttcagtgtaggtttcagtttccactccttggttaaatttatttctaagtattttattctttctgatgctcttataaatggaatttttttaacttccttttccgattattcattgcttttgtatagaaatacaactgattttttttaccgatctcatgtcttgcaactttgctgaacccattctcatagtgatgtgtgtgtgtgtgtgtgcgcatgtgtatgtgtatgtgtgcgtgtgtgttctttaaggttttctgtacataagatcataagatcaagtcatctcaaaatatagttttacttttttcttttgagtgtggatgccttttatttctttctcttgcctaatttttctgactataatttccagttcaatgttaagtagaactgatgagagcaggtatttcagtcttgttcctggtcttaggggaaagaatccagtctttcaccgttgactatggagttagcggtgagtttttcctacgtggaccttgtcatgtggaggaagttctcttttagacctagttattgattgagttttttgtttaatcaggaaaggatgttagacttcgtcaaatcctttttctgcctctattgaaattatcgcatgatttttcccttcatcctataaatgagcgtattatagtaattttgtgtattgtgccacccgtgtattcctgtgataaatctctatggtaaacgatcaaatggtcatcatgtataatccttttaatatgaagctggatttattttgctcatgtcttgtggaggatttttgcctctgttttcttctctctctctcttttttttttttttttttttttgagatggagttctcactctgttacccaggctggactgcagtggcgcgatctcggctcactgaaacctccgttcccaggttcaggcaattctccctgcctcagcctcccgagtagctgggattacgggcacctgccaccacaccccgctaatttttgtatttttagtagagacaggtttttgccatgttggccaggatggtctcaaactcctgacctcagaggatccacctgcctcggcctcccaaagtgctgggattacaggcatgagccactgtgccgggtctttgtctttagacagtttgtggtgtgtcagtgtggatgtctttgaatttatcttacttggagtttgttgagtttcttagatgtgtagattaatgtttttcatcgaatttggagggtttttaaaccatatttcttcaaatattctttcttccctgttccctctttcctttcaggactctcactatgcaaaagctggtacatgtgatggtcccacaggtctcttaggctctgttccgttttcttcacttgttttctttctgctcctcagataggatagcatgaaatgatgtatctccagtttctctgcttatttcttcagcgtgttcatagctgctgctgagaccctctaatgagcttttcatttcagctattacactttcaacaccagaatttctatcacttttttttaatataacttctgtctctttattgatattctgtatttggtgagacatcattctcacaaattcctctagctctttgaagatattaaataagcttatgtgaaatcttttctggtgagtccaatatctgtgtttcttcagtgatattctgttttagttcctttttcctgtctatgagctacactcttgtattctttgtatgccttgtaattttttgttgaaaatgaaatttttaataagtggcagttctggaaatcagactctcccctctccccaggagtttttgtagctactgtggtttgttgagtaacttttgtgaactaattttgtaaagtccatattctttgtctgatgtggccactgatgtctgttccaatagcttagagggcagcaagtggtgggacatatagattcttaaacgtctggaatgaaaactgaaacttgtttttgcagatgggctctgcgtgtcttggagcaaccttcagcactcatccaggctggtcaagcctctgtcttatcacctcctgctcgcagaatctgaaggtcagcccgaggaggcacttcagggacttctcgggtttttcccggcatgtgcgcagccgaggcgtgtgcgtggcattccagattcccgggaactcttagaactttatcaggccttcatttcctaaatcatctcattccccagcctttcgtccccagctttttgtttagcctgtggcggcaaccataatccattgcctcaggcagcaatggctgaaacactttcctatcaatgtttttgacacacactccccaagtggctgcctttgcacagacggagttccaagacaccggagatgaaggcaggagtttgagccagtcttccacggagtcaaagtaattacgattcctagtcaaagagtcctgtagcttctccttccagtgctggtaccgggaatgcaggctgttgctgtccccgcagagctggggagcgacaaagcttattattgtgacgaagactcagctgttctttcttagtgccccacggttggtgcaagcttttggttagtttccagagttccaaaaaagttgactcttgacagttttcaccaggttttccattgtgttaaggtagggatggacttttggagctccttattctgcagtttctccgcctcacagaatgctgagtagggccaggaatgccgttttccagcaggtcccctggctgattctgacgtggctggtccgcgggacacaccgtgagaaactaagctaggactgcgtctctccctccagacatcacggcgtcctcaccggtcggtggggtccgccctgaaacatctggctctttggagtttgcgtcgatttgtgaaagctccgttcgaccccgtgttccaagtcccctagtgtaagaacccggctgttcccttggtgataactcaaggcgggtcaccacctggcggggtccgctggacgcttgagggtcccccatgcggaccaggtgcagaggtcgggcctgcggaggagtgggaagtgggcgggcggaggggtctccgagctcacctccgagggttcggtgccggcccggcccctggatccccgcgggcggacgcgctcccccagctcagccctcgcgaccctaacgcggtccgttccttttgcaggagccgggcaggagcccctcggtccggtccggccctgcgcatggagccatggccctgctccccgggcggcggcggcgggacccgcgcccggcacgtcatcatcaacgtgggcggctgccgcgtgcgcctggcatgggccgcgctggcgcgatgccccctcgcgcgcctggagcgcctgcgcgcctgccgcggccacgacgacctgctgcgcgtgtgtgacgactacgacgtgagccgcgacgagttcttcttcgaccgcagcccgtgcgccttccgcgccatcgtggcgcttttgcgcgcagggaagctgcgactgctgcggggcccgtgcgcgctggccttccgcgacgagctggcctactggggcatcgacgaggcgcgcctggagcgctgctgcctgcgccgcctgcgccgccgcgaggaggaggcggccgaggcccgcgcggggccgacggagcgcggggcgcaggggagcccggcgcgcgccctgggacctcgggggcggctgcagcgcggccggcggcgcctgcgcgacgtggtggacaacccgcactcggggctggcgggcaagctcttcgcctgcgtgtccgtgtccttcgtggccgtcacggccgtgggcctctgcctgagcaccatgccggacatccgcgccgaggaggagcgggtgagcgcggccgggggtggcggggaccgggccggagctggggctgggctgggatctgggctgcggggaggtgggtgggggaaggggcgcgggggcagccatggccagggcctaggaccgggctgggggctgccgggactggggtgggccggggccgggctggaggcggccgggctgagggagcgccgctgatggtggtcttggccaacctccacccccagcgggagacaacagaggctccaagttacattcggtttccgacgcagcatccggtccacaggccgccggaaactgctcagcccatcaggccttcaaagtttggacaacgtggagctaaaatattgggtatccggggcctagagaattgtgtgacatttggtcattctggaccaaggagacccaaccgcattgtttcagggctggaggacagtgccagggccaggaaggcttctggctat

SEQ ID NO: 7753 - DNA, 6000 bp, Homo sapiens
gatcatttgcccttgctcaccaagaagtcacagaatgtgttttcttttataatcacaaattgacctattttcattttaaaatgacaagacgatagaagagagtgtaagatttgttacagaaagggccatggtattaagttgtttatttggccttgaccagaaagatagatttagcatttagaaatgtttattgccattttttatgaccttcttttcccacatcatagagaaaaaagatcaagatctcaatatctcttttacaaatacaagtaaggaaggaggaatgttagcttatttattctggatgcaatttgttaccctccaagaaaatagaggtgcttgtcctgtgctgaaaatagcccagttaaattttagtaaaaaacacactgtgtatgattaatttacagaaattatcattggttacatcatttaacttaaatcatcattagtggccttaaacagctcttcgtttgctctgcttgtcctcaggtaacgtcatcttgcatggaatgttgctcacatattaaagataattaaatactgaatacctgattaaaataatcttgtatattttggagtaaacatgtataattcatgttttcagctcttgccagtttcacattttatttagcagaaaatatctacccaagattcaaactgcttgagaaggaaagttcgaaacattattccacatcattttatatattgagattctactatatgtgatcataaaagttagtatgtgtctataatcctaatagaatcttgtttttgctttttataagtctgtatttgaaaggcaaaaatgtcctcagtggaacctgatttgtagagagagactttcttatgcaatggatttttgcatctaagttagtttgtgccacagttttgctaaaaacacatacttaaccctcttacattcttccttgccacagcctacttttaggaccataacttcatacaaagcaatcccaaggttttctgtttcattagtctgtcaccagtggacacgttttttacctatcggttcttccttatccacaggtatcataagtcctgaattccttttttgtcccttcaagagtcagtttctctctctcttccaggcggattgccctctgtctaagcatcctgtagtcagcaggttaggcaaactccccagactttacttccagacaggtagaacggcagaaggtacgatattgcccagtgagttgcagagttagaagtcaaaggtatataggtcagaaggagtgttcaccagtctgcttcctgccttgctctgaagactggtctttggaatggtcaccctgatggaatggtccccccaactattgggcatctttccttggccttgcccagcctggcctttgccacacagtcatgttttcattaaacagatgctacttgaatcacactatgaaccactttgggaaattttgcattaatgcattaagtaattgagtaaatattctactaacttaattcccactatccactaggatagcactttgccaaatactaggtgggtgaaacatagtccctacccttaaggacgtcacaatttagtagactaacaaattttgagtgactgtactgattaaaacctttcatcattattcctgaatggtcaatccagaaactgggagacaggaggaagaaaggagcttcacaaagcatggatagagattgccaacattgtcatgagcgctcccagatgcagtatgtctcatggaatagacaagacctggcctctcaaaaatcttttttcatgaggtccagtgtgggtgttttatatgtttgtttgtttttgtttgtttgtttgtttgttttgagatggaatcttgctctgtcacccaggttggagtgcagtggcacgatctcggcttgccgcaacctccgcctcctggattcaagcaattctcctgcctcagcctcccaagtagctgatattacaggctcccgccaccatgcccagctaatttttgtatttttagtagagacgaggtttcaccatgttggctagactggtcttgaactcctgacttcaggtgattcgcctgcctcggccccccaaagtgctaggattacaggcgtgagccaccgcacccagcactatatgttttgtttcttaattaaaccacatatctatctctctaggaatatctgaaatgacattagtgatattttagagagtcatgttggctttccaagatgactctttatatggcaatttttgtattgtaggaagtcttgaaagaaaatcaggctgtcagaaggaacttggtcaggcactgactctaacactgttttggagtccagagaaaatactctgccctgatggaatagcagcctctgttagttactaaaactccggaagatccgagcttggaaatggactgagataccctacatgggatatgaatgagtgacttttccctgaggctgagctattaggtctggggtccttcactcatgtcctcaagaacttttcaagggccatcctttggtcattttgccatcggctattaactttttttttttttttttgagacagggtctcattctgtcacccaggctgaagtatagcggtgcattcacaactcattgcaacctcaacctcctgggctcaagcaatcctctccccacttgagtagctgggactacaggcatgcaccaccactcccagctaatttttttttttttaaagactgggtcccactatgtttcccagcttgtctcaaactcctgggttcaagcgattctccaaccttggcctcccaaagtgctgggattacaggcgtcagccaccacgcctggtcttgtgcgtaaatactcaaccagaaaccttaaactaggaagaagagatatatgatcctcaaattagcctagtcaagcttaacttgttctctgtttgtttagagaaagctcttgaccctcaattgacagaaatacctgggcagattttctctacatttatgatttatttgccatatctttactttttcccactctgagtaacctggggggattgtttgtgtggtgaagttgttcctacagaattcaaaaaggaaaacatgcaacagaagacagagatatcctaaagatacgaggtgccattggcttctattattcatcttagtgtttgtttgtttgttctgagacagacggagtcttgctctgttgcccaggctggagtgcagtggcacgatctcggctcactgcaagctccgcctcccgggtttatgccattctcctgcctcagcctcccgagtagctgggactacaggcgcctgccaccatgcctggctaattttttgtatttttagaagagacggggtttcaccgtgttagccaggatggtctcgatctcctgacctcgtgatccacctgcctcggcctcccaaagtgctgggattacaggagtgagccaccgcgcccggctcatcttgttttttaactcacattttcattcacacttatggagtgctattactgtgtgcttacatggctggatcgacactaggtcggggtacataatgagactaatagactgggaggcaaggaacataagccggaagagagatcctgaagcaagcaactctgtaggttctggggagtgagtttcagatgtggtggaaacacaagagaggaactaattctctctgctaggagagccagcagaggtttcctagaggaactgagcccctctccagttctatctttaacaattaacatgtagagactagcctgaccaacatggtgaaacctcataaatacaaaaattagccagccatggtggcaggcacctgtaatcccagctactctgaaggctggggcaggggaatcacttgaacccgggagagagaggttgcagtgagccgagatcgtgccattgcactgcagcctgggcaacagagcaaaaactccatctcacaaaaaaaagaaaaagaaaagaaaaagaaaaaaaagaataagacccaagaagcaagagaacgatacatccagttattggggtcatagagggaaggagagttattgtttcaaataatttaaaaacaatttggtttttttttaaatatagttttcttttcctagttttctttttctttttttttttttttttttttttctgagatggagtctggctctgtcccccaggctggagtgcagtggtgccatctctgctcactgcaagctccgcctcccaggttcaagcaattctcctgcctcagcctcccgaatagctgggattacaggcacccaccaccacgcccagctaatttttgtatttttagtagagacagggtttcaccatgttggccaggctggtctcaaactcctgacctcaggtgatccgccctccttggccccccaaagtgctgggattacaggcgtgagccaccgcgcccggcctcctttttctagttttctagctttacctccaccttctctccctacaggctttggagtcagctttcctgccccacagaggtgacagagctcttccaataatgcgttcaagctgttttaggggacactgattaagttctgccaaaaaaacacggtcgcagatggcaccctcaagagatcaataccaggcctgcagggttgctcacgcctgtaatcccagcacttaagggaggccaaagtgggaggacagcttgagcccaggagttcgagaccaagcctgggcaatatagtgagacctcctctctacaaaaaattagccaagcgtggtggggcctgcctgtagtcctagctactcgggaggctggtgtggaaggatggcttgagcccaggatgtggaggctgcaggaagcagagatggcgcctgtgcactctagcctgggcaacagagcaagaccctgtaaagtgcaatacctaatttccaagagaaatgttaacgactttgcccttttcttcattcccccagatccctgcccaagacgggtctggagcctgacttccgggtgtccatgaccctggcggctgcttccggtccgccatgaaagggctatcaggcagccgcagccatcaccacggggtcacctgcgactcggcctgtgactcgctgtcgcaccactccgaccgcaagccctacctgctgagcccagtggagcaccaccccgcagaccacccatactacacccagcggaactccttccaggctgagtgcgtgggccccttcagcgacccgctggccagcagcaccttcccccgcaggcactacacctcgcagcaagagctgaaggacgagtgtgccctggtgccccgcaccctggccaccaaggcgaaccgcatccccgccaacctgctggaccagttcgagcggcagctgccactcagccgcgatggctatcacaccctgcagtacaagcgcacggccgtggagcaccgcagcgacagccccggccgcatccgccacctggtgcactcggtccagaagctcttcaccaagtcgcactccctggaggggccgtccaagggcagcgtcaacgggggcaaggccagccctgacgaggcgcaggcggcgcgctatggcaaacgcagcaagagcaaggagcggcgcgcggagcccaaggcccggcccagcacctccccgggctggtggagctcggacgacaacctggatggtgacatgtgcatctaccacgccccctcgggcgtgatgaccatgggcaggtgccccgaccgctcggcctcacagtacttcctggaggcctacaacaccatcagcgagcaggcggtgaaggcctcccggagcaacaacgacgtcaagtgctccacctgcgccaacctgccggtcagcctggacaccccgctgctgaagaagagcgcctggtcctccacgctcaccgtgagccgggcccgggaggtttaccagaaggcctcggtgaacatggaccaggccatggtgaagtccgagtcgtgtcagcaagaacgctcctgccagtacctgcaggtaccatttctgtcaatgatggaggcttagaagta

SEQ ID NO: 7754 - DNA, 6000 bp, Homo sapiens
gttttcttgtttcctatagatcaattatactggtgccagcatgaatcccgcccgatcctttggacctgcagttatcatgggaaattgggaaaaccattgggtaaccctcatattgatagttcccatcttcctacagttgaggacaattacctgtggggctcttttatttttcattattttgcctactactttctcttgcatttctccaaccttgaccctcactttattacatctttcataaagactagggaaagaatagcacagatctgctgtaaaaagataagagatgtaaaacatctctaactgaaggttctaggcctccaataatagtcttttccttttttgaagcactattttagacactgtatctaacagattgcagcagaatacactgtatatagaggttgcctatgtggaacaagttaaagtcagcatggtgtagtgaatatggtgtttaaataattgaaagtaaagtcttcccagctataatggaaaaaaattgcaaaaaaaagagaaagaatgaaatacttaaaagcgctgcccatagcaaagatatttaccctttttttgtttacaaatgcatgaactcaattaatagtatgtaagttgcaagtatttgaactgcagatggtgtcgaataaatagtgcaaaggtttatgttattatcaccataactgttaccggaaaaataaatgactcacagaaaaggctcacttttcagtctcaaacctaaactattataaataaatatttattaatgtagtggcagtgcttccagagaatagcagtgtccattttaaaatattataattaattttgtttcagttgtttctcacagcaaaggaatttaaatcctttaaaattaaataagtaatgcagcagttgtgaaggccaccaacatgctaacttacaatagccaataaaaatatgagacctgtaagccagcttcaaagagcgctagcttttattataatttatatattgcaaatgtcacttacaactttaaaaaattcatgaatataacagaatatgccccttgtgtttattcagacagtgattaccaacctagtcacagccattcatctatggtgtacactgcaaatgacaagaaaatgcaccgctgctatgtgcattcacttctaagaaaagtataccaaatctttaaaagtaatctacagcattaaataacagaataagagtcagcgttcaaaccaagacttagccaaaaatgccatccatgagattagtcattttgtcactgatacctccatttatgtctcaaaaactgttaccacattaacagaaatggaaatttttagtgagtagtatatgattttgttttcttctttttgagatggagtcttgctctgttgcccaggctggagtgcagtggcatgatctcggcttgctgcaacctccttctcctgggttgaagagattctccaacctcagcctcccgagtagctgggattacaggtgcatgccaccacactcagctaatttttgtattttttcatagagacagggtttcaccatgttggccaggctagtctcgaactcctgaccttaggtgatccacctgcctcagcctcccaaagtgctgggattacaggcgtgagccacagtgcccagccctgatcttacaatgaaaatacaactttcagttcaacatattaaattgaaactattttgtcattaacaacttttagttaaatttataagcacttgaaaatgtagatgaaaaaatatattttactaattacttgtcagttgcagtaaactagttaagatttaaatagtaggaacattcttagcttgttgattaaactaaaagttgccccatgttatattataccaatcttaattctactaaaaatagcaatggttgtatgaaatttagaactaatttaaagtatatttgtaggtagaaagattaggaataacattaaaatattaattgggttttttgtatagtgtaatgatattattttagttttctttatacttttacacattttctagatttttagcaataaagattctttactttaaagtacatatgacttcattttgaaatagcaacttgacactgagatttgtttatttttgagaacatgcagctgggtatcttattcacagatgttttggaaagggtagtaattattttgctgttctagtctcccttgtgggatttgtagcctgtggaatagtacatgtctaatgagaccttactaacaaagagcaaagacatttagaggagggctctcatttctcctttaaaagggcatagagaagataaaggctcatatgggttttttcatgttcaagagaggaacttgattcttccagccacactagcaacagtttccccgtaaatgttatgtcttcagcctcagcttaaattttgaattttatttaaatcttacaatgaggatgcaaactgagattaatttgcagagggtgttttaaacaaaaagcatccatcatgttttttttcaaatgagtgtgtagtacagtggaaaacagtatactgcagtgtttggaacagtgtttcaaaagagaggttttcattttgtttgtttgtttttttcttttttttgagacagggtcttactctgttgcccaggctggagtagagtgtcacgatcatggctcactgcagccgagacctccctgggctcaagtgatcctcctatctcagcctcccaagtagctgggactacaggtgcacaccaccaagcccagctaatttttttttgtattttgtagagacagggtttcaccatgttgctcaggctgaatcgaactcctgggctcaagcaatccacccaccttggcctcttaaagtgctgggattacaggtgtgagccactgtgcccagcctcaaatgagaggtttgaagtcagacaggtctgaaatctcagctcaaccatttgataagcacaaaatcttaagcaagcttattaccctctcagagtgtcactcttcttttcataaaatgggaagaataataatatttatctcattggttattgttagaattaaatgagattatacaagaaaagtgccaagtacggctggcccggggacagtgctcaacaagcagggtttctgttgcccaagtgcgtctgttaaataaatgtctaatattctacagcacacatgtgctctaaagcaaatgtctgcacttcattcaaactcaaaactttattctaggggcatagctaatatgtaataataatttccggctgggcacggtggctcacacctgtaatcccagcactttgggaggctgaggcaggtggatcacgaggtcaggagattgagaccatcctggctaacacagtgaaaccccatctctactaaaaatacaaaaaattagccaggcgtggtggcgggcacctgtagtcccagctactcaggaggctgaggcaggagaatggcgtgaacccgggaggcagagcttgcagtgagtggcgatcgcccactgcactccagcctaggtgacagagcaagactccgtctcaaaattaataataataataataataataataatttccatttattgaaatcctatggaattgctacttctcaactagccataaactcatattttttcaccaagccatcgtgagaaccgcatagatgaaagctatctgcacagtaatgaacacgaggttttcatttaaatcaaatcaccaaattttggaagcctggaatggagcagattactacgagctaaaaactatcaagtactttacaagtattgttgcatttaatccttttaccccgtgaggtttgtattattataatccccactttacagatgaggaaattaagacttggaaagttacgtaactgatacaagcactcataactctgctaagtggtggagctgggttggttttgatcatgcttacctgaataacggaatccccaaaagataaaaactgtgttatgatcatgattgtgcaggaaaccagtgtaaaatggcaatattgagaaaataagagaaggactctccagaaattttttttttattttagttaaagaattcttagtgcgcttaatttgtagtaccaccaaagaggatctatctttacattaacgattatcataagatggaaagaacataattaatgaaaagaggataggagatgaaacagttctttttgttttctgttcaaatgcagtttaataatttatggatctctgatgaggctttggtgtgttttcttatttcctctccaattcccctctttttgatgcatgacacaaatacactcttaatttaacccagctagattctacattcatgagctgctcaatggaatagcttttctctacttacactctatcctcttccatcttttccttagatatattgggttgggcccatcataggagctgtcctcgctggtggcctttatgagtatgtcttctgtccagatgttgaattcaaacgtcgttttaaagaagccttcagcaaagctgcccagcaaacaaaaggaagctacatggaggtggaggacaacaggagtcaggtagagacggatgacctgattctaaaacctggagtggtgcatgtgattgacgttgaccggggagaggagaagaaggggaaagaccaatctggagaggtattgtcttcagtatgactagaagatcgcactgaaagcagacaagactccttagaactgtcctcagatttccttccacccattaaggaaacagatttgttataaattagaaatgtgcaggtttgttgtttcatgtcatattactcagtctaaacaataaatatttcataatttacaaaggaggaacggaagaaacctattgtgaattccaaatctaaaaaaagaaatatttttaaaatgttcttaagcaaatatatacctattttatctagttacctttcattaacaaccaattttaaccgtgtgtcaagatttggttaagtcttgcctgacagaactcaaagacacgtctatcagcttattccttctctactggaatattggtatagtcaattcttatttgaatatttattctattaaactgagtttaacaatggcaaaatacagtatgtcacagtcatgcacattcaagagagaaaatataacaagttcttttatgagcaatcccttatgcatagactaccttggcaaaagagcattagcaagtgtcactgctcatcagttacttccttccatttatatcacaaatacccaagtttcaattctaacttcatttcatggtatttcttcctcctcaatgcccaaggtaatgtgggactaaagcccagaaatttgaaaagaatattcagaaatccttcccaaatcataagggcacctattgagattcaagacaagcagactcgtaaaatcttgtagaggcagaggcaaagttatcatcatacaaaaatcacaaacaaaaaggagatctgtattcgggtatcaaacggttgatctgttttcagtgcacaccctcaaatgcaccacaccagttttacgatctaagcttttaacccctttaccactttgcttatttttaaaaaatttattggcaaaactggggattttgtttgtaactttggttatctatatttaaacattagctgagacatatttttgataacaagaacttagctagttgagtcctggctttttgttgattattaagctgtgttcactctagaaggtgtaaaggccctgtcccaatctctgctctctcacttctcgtgacatttgttgataatctttactgcaagtgtaatgatatttgagtgaattaaaatgcatgacagacaaggtacaacatggttgcagaataaaagggtgaggacatcagatcactctgtattcaaagcttactagacgaacaatctttcatttctggatatattgtagctaacccaacacatttttaaactatttttgttactgactcacttacttgtcaaaataattggtttttctgtcctgctttgccttt

SEQ ID NO: 7755 - DNA, 6000 bp, Homo sapiens; identical to SEQ ID NO: 1999

SEQ ID NO: 7756 - DNA, 6000 bp, Homo sapiens
tgacacataacgttggttaacttggttttttgactccctaagcaaaggtcttattcatttttggttttaagatctggtattctacttgataagggtttccataaaaatccacaaatacataatatctaggttttgctaggaaaataggaattacaggatagtgttgtgactaaaggatatttttctctgttatcgctttaataactataaaaggaaataccatggtttaagtttagttttgataagctaaatttaagtttatatcctcttttcgcttttacattctgttgtttcatttgttttaaaaaaaagaacactcaagtgatttctaagcctcttagtaaaacaagctcgttaaagactgttttataacatctttcacattcctctgaagtactttgtagaattaaccctttaccctaactttggaaaccacctgtgtgctcactggctatgcctggtctagttttctttttgttctggtgaatattgtgcagctgcggatagaataacattcctcgtatcagtctttactcagctgttcagaatgactttttactggctattagagccaatagaagttttctgttttatatttaagaccctccaacgctccaaaatctgacattcttacctctctcatgccatgcccctaccttatcctccccacctgttggtcactttcagcacaggttcttttccccacaaatctggaaaaaatacgtgctatctcatgaccacaggttacttcatttggcttctttgctttcgtatgagtacacacccacctagaattgcctccttcacagcctctgtctccaacaaaactgaactcccaatgcggctatgcatttcaacatccagagttgagcatcaaaggccaaaaatgatcaaatggaagcaagtcccccttggggtaggaacaaggatgctgcctgtggcagaacagagctctctatgcaccaaatggctccaggtgaaccccccccctccattccacatagcccccctccccgcagaaggacagacactgtgcttttcacttaccccagtgagatgcacacatatttgctttctgtatgtgccatggtaatgaggaaggctgggaagcactgactgggaagcatcagcctcgaagataagcccttgcctaatgttcaaggtcaatgtcactttgttcccagcttacctttctgccctgatctgctgaccccaggaatgcctgtgcttcttggctcagactacttctgccacaactttgaggtgaaactgacatttctgcctgtctgccggatgtgtctccagtcgctttccactggaccctcccctgactcactgtgctgttgtaaatagcctaaaatgttagaatctcattcaacgtttttgtatccctccacccacatatttaacttgcttggatcttcaattcccattgatactcctcttaatacattgccactgccataatctgcctttattgaccatgccattccaggtaagtgatttcatgtcctggggtcttgagtctctcatctgaaaacaaagggagtcaggagtcatgttctttacgtattatttggaattagacctgtgtctggaaagtcaagtttttcatgtccaagttgtgtgatttggggtagaaaacatattccctccaaaccccagtttcttcatgtgtacagtatatacagttctttactgatggtgttgctacatcctgatagagaattaaatgagacccatcttttcggtgtgacctgcacactaccaggcacctaatatacatctggtatacactaactactgcaaaagccttcaacctagtcagttcactctctagggcatgattcttcctctgtgaaaattttccacataccttcctctctagctaatagaaaatgctttctcaatttttgtcgtttcttttacagttagtaaataatgacaagtgtgttgagtgctaccaatgtgaagtgcaagtttgacgggacatagggagaccttatttggttagggtgggctgggctgccaccccaaccaaattaggttgcccatgcagagttgttggctgaatgacttttctgctgtctggcatttaccaagcgtaatgacacctttttgatttttctttttcctcctgtttcccctccaactcacacatacagaattaattaaatgttttttggtttcaactctttatctcatcttgtatggattagccaaatttcctgcctaagttattaaaccaagttgaattctgctatatgtgtgtttgtgtcttcgggatctgatcatctttgaggtatgattctgaatgtcatttgagcttattctttatgacattctagaaaagtatgtatgctaggcctcgaatatattctttttttaaaaaaatttctataatttcaaaaggtaggaaacatgacagtaatggttagttttagattttatttatttttattttttaagacggagtctcttgctcttgtcgcccaggctggagtgcgatggcgtgatctcggctcactgcaacctctgctttccgggttcaagtgattctccttcctcagcctcccgagtagctgggattacaggtgcatgccaccatgcctggctaatttttttaatttttttattttttgtattttttgttagagatggggtttcaccatgttgtccaggctggtcttgaactcctgacctcaggtgatccgcctacctcggcctcctaagtgctgggattacaggcatgagtcaccgtgcctggccaattttagattttattaatgttagacatagactcgtgtgtcatagaaaacaatactcagagaaaactacgtacctagatgttttttggccttttagttaggcacttggcaatgaatgtgttttctaagtttattagttactttgatagatattcctggtctaaaatctatttctttttattttttgtaagtattctttctgtctaacccctctttaaaataaaaagttatttaggagtttaatgatttggggggaggggcagattctggtaatgtgatgaacgagatggggaggagcagtcttgcaaacctttggtttagtagagaaccaaaaccagtttggaaggggatacaggtctctttctagccatatgtatttgactgaacatgtttgtttggaaaaactagtagttttgtaaatcatccattgagagccagcaagttatctctacatttgtgaaagaaaaaaattgaggtggatatgggtttcctttttctatgtgtgtccgtattgttttgattgtatagaggtagatatttttcttcattttgactgaaagtaaagtcagaattatatgtatatctatacatatatatgtatagatatatttattttctacattttaagaggaagcagcgtgttttaagagtgaaagaaaataagctttgaaagcagacacatcttgatttgagtgctagttactatcattagcttgcttatataatcttgagaaatcttttctttctcgaagccttagtttgcccatcagctaaatgagcacagtacatcctatatggtagggttgttgagtatgagtgttaagtgaggtaagttaagtcaacacaacgtagtaagagatcagtaagtatcaaattccattctcactcactatatgtaatataaataggtttaaatcaacagagtgagtttatctgtaactgcagactttctttgccataacacctttaaaaagttttaaatgcttaaatttactgttctttcaactgccagtttagtgttagttcatatcattttgttttggccgtatttgctaatgttattggtggagtcataccattttctgttggcttcatttataattctattttttttttggctgtctacacattatttcattttgggacctgctacactgttggatttttggctttactcaccttttccccccttctccacttttgacccatctcctcctatttcattttggcaccagtaaagtaatggttcatgtgtatgctggaagcctaccccatacatctctatgggtgcagtattcctttttattgtgttttatttttcaaaatgacaagcttatatttccagtatgtgaaaatgctttagaacttcttgttgaatatagattagttgacattttaagtcttagcccatgttgtatggttgtgttttggttttctatttcttctttactcttttcatcatataccttgtagtttttgtcatcagtgaatgatttttgagaatcctaatgtgcacagcattctgctggatcttgtactaagcagtttaaagagaccctgtgcaattacccgacatttcctgtgtgcttcttataggcagaatttcatagaatacaaattatcctcttctaggtacttgaatctaaaacaaatatggacacacagagcaagaaaatagctgaacagtgagtatgtgaagagtaaaccaacagacaccaggattattcaccataggccagccttctagctcccaagatgttccctccctgccagtcttcattgtctctcagtattgagatgtcagcctcctttccatattacctggaataattgccaagcagtcatgccacttgaaaatgaggtaacaagtcctttgattgaactggcagtcccactccctgtcatagcatccttgtatcagtgttgtttattcatttcatggtctgttctctcaagaaataagcatcaggagtggacagtgatgtttggggggatcccaaggcacatgggaggcagatcttacctctttctgaggaggccacagagagctggatagtccctctgtctgctccctggtagctggaatgtggatctgtgactccatgcagccaactggaagcttaatgcagggaatgtgaactttgaactagttagagattattcactgtgaggcttttgcaaagggcacaggctggatgagtggccgtgagcgtccgtgttcctgagcagactgtgctgtggcccaatcctgtgcgtgtctcctcttcaggctcctgccggagcatgcttctctaatcttaccatttatcactgacccttcggtgaaactctcttctgtttaaatttaccagggtacactttgtaatacttgggaccaagaatttgaagatagtaatcagacaaatcaaacaactagtagtagtggagagacacgtagccctacaggaaggggtagaattatcattaaaaacacagacaaaccagagactgcctgaaaaaaaaaaaaagatgaactggaaagattcaaagtaggctctattggaggtgagtatggaaaacaagcttagctttttattttgaagtttccttccaggagttggatactgtgatctcttcaatcagcatgtttatatagtgaggaggaagaccagaaatgagaagaggaataagaaaatggcagcacagccttttggggtatggataagggtggtcttcctgctacagcagaggagaggggcatgtgtggcccatgtggaagagcaactgagttggtggctgactgaatttgggtccgaagcaaaaataggatatgaggataggtataagaattttattttgtgctatgtgtgtcatttggcttttaaactgtctagaaataaaatgagatgaaaacaatctgccctcatttcttggttgcttttcttaaatatcattggcccaaagcatagccaagccttttatttagaaaatcctaccttcaaaaagtgataggttacactaattatatttgtgctgttctacagattttctattttgcactggtcctttacctgctgctcgctgtgcgggcagctaaggtgagagtttgaagactatggacttttaagctgagaggctgctgtggtcatacagttttcaacacaaaacttgttctccctctagtgttccacttgcacaggggtaagttgcacaactttgttccattttgaattctttgcaagatttgtcttca

SEQ ID NO: 7757 - DNA, 6000 bp, Homo sapiens
tgctcctgtgatgttgaatcacgtgaattaaagcaaacagcattactaaagatgacaaattaatagaagttagcttttcttgggcatgttttttcttaggtagtttccgattttattggaatgattacgataatatccccctaccccccagaaccttatttgaattgcacaaccagagcacggaaaatgaccttcaatggattttgttgacgtcattcagcatactttcattgaataactactcttgaccaaagtgctggttttaggggtaaatacaaagagagatggctcttgctctctcagcctttgaagtattacaggaaagaacttgaacaataattattaagatacataataaagtgctatggtagaggtacgtgccagggattatgggaatagagggagtgggctggttatttagactaatctgactgctgacatgtactgatttaggccttttaaagagtttttcatgaacaaagatgtagaatttatattgttatttgtttaaaacctgtaaggagatttggttagttaaaaaattcccaatatctttgtaatgcagaatgatatggaacctagcaaagctgttccactgaatgcatctaagcaagatggacctatgccaaaaccacacagtgtttcacttaatgataccgaaacaaggaaactaatggaagagtgtaaaagacttcagggagaaatgatgaagctatcagaagaaaatcggcacctgagagtaagttctgttggttgaaaataaattgattgaaatgaaggtataggacatgtgagtgttattaggccattttagcaattagcttttaaatttttgcttggtcagttctttcttctttgccccagtgcctttgctccccaccctactcctcttttaacagtcttcccgtggtttctcattgctgcaagttccttactttagcacacattctaattatttgtgatctggcctgcagtattgccagcttctgctcttgtttctcatgtccttcccattttgtgccctagtcatactgaactgcctaggattgtgttgtcccacatcatagccattagtcacctagggctgttgagcactgaaatgggatttgttcaaattgagctgtgctgttgagtgtaaaatactgatgttgaagagttagtacagaaaaaggtaaaatcttttttttttaatggttacatactgaaatagtagtttgggtatattgggttgaatcaaatatattattaaaatgaattttacccatttctttttactttttaaatgtactgttggaaaatttaactttacatacggggctcacatttgaagctcacattgtatttgcgtggggcagcattgggctggagtatgctggagaagcatctgtttatcacccctctttgctttagtgtaagctcttcactgtgactggaaaggcccagaaccctgcccctcccgacacagcacatacacacattgacgttttgctactacagcatatagcctttgctgggaccctctccaaaagaagaaaaaaatcgatttgtcatgtctgctttgtgcctccactatgctgatcgccttctactgctcttacttgttagaggcctttctccctctagtgggcagtaattgccttggtggcaagggcagtgcttcatttatctctgcattcaccatacatgcatgtggtagtcattcatgtatttgattgaattaaatggatggcgaaggaggactgatttgaatatgtctgaaatttatgaataatttgtctttgacaagtaattacttgtttcaagacctaaatacctatacgttgctctctaggctttgtttgaagctctttgcagcaaagtagatgatacaaaaatgtatgtaactaaaataagctaaatgatgggagttatttgattattccttttgttaggtgtatgtaggaactacactctaaattaaaggcactgtgttttaagtcgatctgtgaactcctttgctgaaatgctttttaaagtgaatttttgtgtctcttcatgcttgatgtttcatagtaccccctcgaggggtacccgtctgcttccaagcacttgtctgggtagcggaaagaatatctttatttcacacctacacgccatggatcttttaaaggatgttgttggttacttttacttcatctgccatgacttccatagttctgttctttgataaagatgtgctccttagggtgctcaatagatttctttcaaaagccactgtttacctctggcagggaggggagaagtggaaacagtgagaatgacatagatggggcagggctggaaaataggaagagtgaaccagggaagtaggtgagagagactttattcctggtttctactctttttatgctagtgttctgtatgagattttatttgagagatgattctgctgctggaaaagtaaaacaaaaaagctgggctgggcgggtggctcacaccggtaatcccagcactttgggaggctgaggcgtgtggatcacctgaggtcaggagttccagaccagcctggccaacgtggtgaaaccccgtctctattaaaaatacaaaaattatccgggtgtggtggtgggtgcctgtaatcccagctacttgggaggctgaggcaggagaatcacttgaacccaggaggcagaggttgcagtgagcgagatcacgccattgtactccagcctgggtgacgagcaaaacatcgtctcaaaaaaaaaaaaaaaacaaaacccttgaagacccactggcttacagaatttcagaccctatacacaggcccaccataattttttgccaggttcactttcttgctcctgtctgttcactatcccttttaattcccctagccctgtggttcttaattcacactgcatgtgaatcacctagtgagctttaaaaagttacagttgaccaggcttgccccagacctaatgagtcacaatcacaggagtattaaaagttctgtagatgtttgtgatgtgtagctgaaactgagaattactgtttatataggactaattagcatgagaccaaaaaaacccaactccagaaaatccagtaatgcaaataaaactgtgccattaggtgtactcttttagttagtgtttatttataagcacaataaaggaatcatgggagaaaatattgccttgtactgaaaaaagtaaaaaactgtcctgccatttatcagattggttaacagacagagataaagacaactgtgtagttaacaggtattagtatttttcccaaggttcacattgcacacagtgtcataacaacctcctgcttggagtgacttctgctttcttctgagaaaccttctgctctaaagacatagtgctgtgtgaagccatatcagcaagaatgaagcagcctactcttgactggaggatctaagtcattttgacacagagaagcaccctcattttccagtccaggtgcagagcttcagataagggtttcctatgtacatttctcatctaaatttgtagtttctgaagaaacagtattctttctctgctttgcagtcgagacctggtgctaccactttacacacagccctctgctttgctttgagcatataaaaacactgttacttaaatttcacgctaaactgtttccttcccccaaattctgtgataccatatctctgtttacggcaagaacacccttttgtgcctctgctgttccggttccttagttgcagtgtgtcagtaaacccaaatggcagactacaggtctgggtagtttttggctgattgggctaggacggatgtaactgattttaaataccatgggccaccttggaagtactcttctttaattatatttttagtgggatttaaaaaaaggtaaatatagcctatctaacttttgctttttaggaatacatttctcagctccagttttaaaaaatcagtgttattgaggtataatttatatcccatggagacacccactgtgagtgtacaattcattgatacatagaactttgtaaccatcactatagttcagttttagaatgtctatcacccccggaaagtttccttatgtggttagcagttaatccccttttccgtccccagccataggcaaccactaatctactttccgtccctatagatttttagctccagtagtctcgttagtatgcttgtttttaaaaaccttttgtgtgtgtgttttttttctaggatgaaggtttaaggctcagaaaggtagcacattcggataaacctggatcaacctcaactgcatccttcagagataatgtcaccagtcctcttccttcacttcttgttgtaattgcagccattttcattggattctttctagggaaattcatcttgtagagtgaagcatgcagagtgctgtttctttttttttttttctcttgaccagaaaaagatttgtttacctaccatttcattggtagtatggcccacggtgaccatttttttgtgtgtacagcgtcatataggctttgcctttaatgatctcttacggttagaaaacacaataaaaacaaactgttcggctactggacaggttgtatattaccagatcatcactagcagatgtcagttgcacattgagtcctttatgaaattcataaataaagaattgttctttctttgtggttttaataagagttcaagaattgttcagagtcttgtaaatgttattttaataatccctttaaattttatctgttgctgttacctcttgaaatatgatttatttagattgctaatcccactcattcaggaaatgccaagaggtattccttggggaaatggtgcctcttacagtgtaaatttttcctcctttacctttgctaatatcatggcagaatttttcttatcccttgtgaggcagttgttgactgagtttttcatccttacaatcctgtcccatggtatttaacataaaaaaaaataaaactgttaacagattcttgctcgatagcttgtttgtgtctgtcgtgttattagagggaactccactatatatggtcacttgaaattatgatgcaaaggtttctcttgcattgaaaccctcttggatattacagtatttttaattgaaagtcctaattctgttaaggaaaggagttgattaaattttaaggtaccactggtattttgggagattataatcagtttgttttcaagataatagaaaataaggtccatgagaatagaagttatgtgatttcagtgagttgatgtgtacagcatggctgtgctccatctgatttaccccattcttaagttctgagagtatgttctcaaggaagatttaactctctttggttttaaattactttttaaccagcctaataaataagtcttactacttttcataatatttcataatagttaaaagtaggtgtttttttcgtgctcaatttggcactcaaaataatgttcattatggaagtttggtaatactgagcaagcctgtggaattttctttatgaaaaatgattttagcctttgcaaatgttaaccatgtgaaacacattttcagtataagtatgcgttacagggtttgatactttcctgcacttaggtttgtcctattcttcatttattcatactaggatagaaaattttggaatcagaaaatagatccagtgtttagctacatacaatctagtacaagtgaatttttattcttaaacataggtgtgttggctctttttttaaaagatgcgctctacctgaaaaggaaattggattttagaactggatgtggtgcagtgaagtattttaggcccaggtctgtgtacacattttatagaagaatgaagtactctgaagtattttggttgccttttcatttcaactgtgttttgaatttgtcagatcacacatatattgtgttattgggcgctgtggtatcttttataaaacctcttgcttgtgtgcaaaagttcctaaaaggaaacacaagtaatgcctatcc

SEQ ID NO: 7758 - DNA, 6000 bp, Homo sapiens
tcagaagggaggcctcagaggccacctcaaaccagcagccatcactgcagcctcagagacccagagctcagggaagactcagctaccctgggatgctctgtggggtgcaggggacttgggggccaccttggcaacaggacagatagagctgtggctgtacagactgagatgcgggaggtgtgcgcagggctggggaaactttaggtactgtaatatttgtaagagatctgacagtacatgtatcacagctcaggaaacgcttcatcatttttcagcgatgtaatgtgtagataccacacacaaatatgtctggatggattgtctttgaggtcacacatttctttctttcttgctgtgttttccctttgtcttcactccctggcccctaaggagagagcaggtgctgtggcttttgcccaaggagagagctctgcagccaggctgagagcagaagttgcctgcagaacacttctctttccatcctgtgtgattttcaacctgatcccaaaggaagtgaatgaggttggtgggtcctggagcagcggggtccacaggatcccagggaggggatgggtatgcagatggggacttggccagtgtcacagaagaccccatgaagtagtaactattacttccagtgtacagatagacgctgaggtgtggcgatgctgcgtgttggggcgaaacgcgcaggagaagtcgtccaggctcagggacagagcccttgctccggggctgctcatcgtagattctggtcctgagaatctagagcggggctcccacttctccaggaccagaattacccacatgaagcttctctttctcatttccttctatttctcatttaaattaaagagtacaaggcataggatgaatcatattggataaatttcatttaaatgttatgcatgagatccaagaaacaaaattgtgttctcaaattcacattcaacttgaggtcacttggccctcaaattccctttttctcaacattcgttcatgtttcccttttctatttatgtctccttagatgactgactagcaaacttctatggactaagtatggccagggtataattgacatgagacaggctgcaaggattgacagtgaaaaataatctttttcacctctcactctttgaaaccaatttcagttgatttccacccaattttagtaatatttatctcaatattgtttactcatctatcccaatactaaggtaccattcattccaaaaaaccctttgagccccttgtgtcaggcactattctgtgtactggggtccaagttctccaccaacggagcaaaacaaagtctccgctctgctgcgcttcagtctgggcccttggaatgagcgaatggtcaggatgaagccgatgtagaatcatgttgcattttacagagagcaaacttacatctaagtacctcgaactcttagcattgctatagggagagtgtgtgtgtctggaagggtgtgggagggaatagctgaagtggaaaacaaatacagggaggactgagtaggaaacacagggacaggccgggcacggtggctcacgcctgtaatcccagcactttgggaggccaaggcgggcggatcacgaggtcaggagatcgagaccatcctggctgacacggtgaaaccccgtctctattaaaaatacaaaaaattagttgggcgtggtggcgggcacctgtagtcccagctactcgggaggctgaggcaggagaatggcatgaacctgggaggcggggtttgcagtgagccgagatcacgccattgcactccagcttgggcgacagagcgagactccgcctcaaaaaacaaaacaaaacaaaacaaaaaaaagaaaacacagggacaggttcctcccatattttctagagatagaaatacagagccgcagcagtttctagttataaataagataagaaagggcaacacgagattgagattcatcacaaatggtagaaattgagattatgattttaaaattcagccctcaatttaaggcggttaagttagacacagagaaattatgtgcaagtgaaatagaaggcattgctttgtggttttggaaaaacttttcttcttcattgtccatggggcgtttagatggaaaaagtcatttctttttctacctaaagagggcaagagcacagtttctccaaccccaaagcatgtgagttttgcatttgtggacattaaatataaactaagtatatgcttgtcagattaggataacctgtgtgaagcacttatcagcttattgctcatttaaaaaagtttacccaggcagccaggttcaaagttcccctgctacaagcttctcagttagaccaggacctgggcattcccagctggagcgggctcattgccgggcacagggcagatgctggctggtttgcgggctgagctgaagaactgtcagcgctgctgtaggtaggtggcagtatggcatgctggttcagctcccagctttctatgcagctagttagggatgtaaaaccatctctttgtggtctgaggacaaattactaaatccttctagcctcaacttcgtcatgtgtaaaatggagaagtaatagctcccagttattgtgaggactcaatcagacaatccatgtaaagcgcttagcacagaagcgctccatgaatggtagttattattacatcacatatgagcactgatcaaaggctagcggcaattaccaccatagctgagagctgagggcttaagggaaactgaattcagccaacatttcactaactaaaaagtcactgacaaattagacaaaacgtaggtttcaaaagattcatttctctgacattacggaaatatgaactggacaactttttggggggtgtgtggggacagttgaaaatgttcactcctttaatcagctgcatctatcttaaacccagcctgaaacccctgcttagtgtagtattttgatatgtctgcaggggggttaattttggcagaggcgaactaattttggtgactgcaataaaattgggttaaaatgctcatatgctctggcagtaaccaatcccccatcaaacatggtaggggtggctggaggcaatgcgtgtacttctgaacaaagtctgcactcaggtggaggtcaagtccgaaatggtcttcacaggaggtgtaggtccttcaaggagaaagggtcacagcgcgaagaatccatctgaccttctaggcaggagccatttcctttaaagagggcaggatactaagggggcgaccaggtggggtccgggggcgcctcaagctcctcaaggctcgccgagcactgctccgtcctactaagtgtcctgccgcccgactgcacgtctctaggcggctgcccgaggtcccgcggcccgtggtgcacacgcagcccgcgaggtactctgtgctggaacgcgcccccagcctcccgaaaccgcccccggcctgcgggcagcgagccggctcctccgggcgcccctgcagcgtactctgcgctcggcttggagttccccgtgcggccggcggtgggcgcgcgccacgcgggcccgagccctgggcgggagtgcggccccgggtcccgcggcctcggcgcccgcgcgcctcccccactgcccacccccggcctccgggcccgccccccgcaggggtcggcgcagcctgtgagccggggacccctgagcccccgccacggcggccccggtacccgcggcctggccgcgcgccgggtccccaccgcggagtgggaaggaggaggagagactggaggagttggagacagacacagccgcggcgcgcagtcacggctggagacagacggcggcgacggcggcgggaggcgggacactcccccctccggcgactggaggcgggacacctccccggcggccgcagcgccgcgtcccctctctccccgcgctgaggctgcggaccgggcccggcgggattagcaggcgagtgcgttggccctgcccgctccgcgcgccgccgcggccggccggggatcccctgcaagccactgagccgctgccgccgctgcagccagacaggctgcgggtgcctgggaaagtggaagcagggcggggagcgcgggggaggcccgggggtgaggtcctcagctcttaaagaaccccggcgcgccgcgctccccgccggcccgccgcgcgccccctgccgcgccccgcacagcgcccctccccctggccagcagggccggtggccgcggagccgcactgcgggcagtccccgcctccgctccgggggggcggcccaggtgagtgcggacccgaggtggccgcagtggtcggggcttctggcccaagttcaccgctgcgctccggagggaggggtggcgggggactcgggaaccggacgctttgggaactggacgtccgcgagcctgcgccgtcggctggggccggagggagaagctgggcgccgagcgcgcgaggtctgtgaggcttggtccgggtgggcttgccggtgggcacggcggggatccggggctggcccgcgggcggggttacgccggtggagggacttcgccgacccccaccccgttttctgtttcctggtgccctggggcgcagggtgtcccgcggttgcaagactgaattctgcaccgcccggaggccaggatgggcgcgcggatggcagccccaactgtctccgcgcccctaggcctcggcgagccgtggcgggcagggactggaggtcagcgggaagcgggaagatcctgcaggacctgaccggggagtttgcgggaaggagggggcgggccaagccccgcagcccctcagtcccgcatcctgcaccgcgcgctccccggccccggcccctcgggcccgcttcacccggcgtccccccgggtccccccgcgcgcgttgacgtcggtcgcgggaccgcccggagctcccggcattggctgggaagtcgattgtctggggctgctgctgttgcacttaggctgggtctccgagccccggaggaagcaggcgtgtgttgaatttctctctgcccctcaccttggaataaacaggaagcgacaagcacccagcccggcccggcacttgcctttgtgaaggggtctgccctgcacagcctttaggaagcttcctcgggaccccttcccggtgcgccgccccgggtgggcctgggggcgcgccctgtgagtacaccggtggaagacagtgggttcggtttaggttaaatcgctatcgtggcggagagggcatttgcttgtttaaacttttttttttttttttttaattggaaaaggagaaggtttcccgatgaggcagaggttttcaggacgacagggacgcatggtgggtgggcggcactgggggaaggcgcatccgagagtacagcgttcttgggtcacctacctggagggacacctcgtcgccagtcagggcagctagaagctctttaaagcaagcaggactccttagctctgcccaggcacaggaatggttgctgtgtgcccatagccgcatgaactagcatgatttttgtttttcccccaaaattttttaattagctagaattagataattttgatttgcttcttttcttttcctctgtgtcttggtctattcccttctctttttctcttttctaattattttggcatcttctcatccccggaccagcgctgctttctaaatgttaattaccattgcaatacatatttattgagggcctactatgtgttaggcattgtaggatgtgaggtaagagtagctgcacagaatgtgggttctgagcgctagtattagtaagttatttgcagtagaggtggatagagatggtgagcagcattgactctcaaaaatagggtcctatggctggtaaggaggttggtgccttctcgaagggctagtgctgggaagcttccttttaaaaacggccctttctgccggtttggctagccaagaatggcatcctcctctctgtatcttccctggagcttcaggactgagtattgaatgacag

SEQ ID NO: 7759 - DNA, 6000 bp, Homo sapiens
tgagaggacatgtcaatgtcagaatgcatggcatggggaaaacagtacatgtggaaggggtcaagaatgcccagggttgaccagcaggctttactgtagctgagaacctcaaaactcagcttatccagcccggccaatatggtgaaaccccgtctctactaaaaatacaaaaattagccaggcatggtggtgcgcgcctgtagtcccagctacttgggaggctgaggcaggagaatcggttgaatctgggaggcagagattgcagtgagctgacatcgcaccactgcagtccaacctgggtgagagagtgagactcccccctccccaccggccaaaaaaaacaaaaacaaaaactcagcttatatgtgctgtagttggtggtgtgggcccactgacattgtatgcccatcactatcaccacatctgtcacactgttttgtaacttgtctgccccccgtgtttcatgggactgttaagtcacagagcagcagggattttgtcttgatatctttgtatttccagcagctagcatggggctctgttacactgtaaatgctcaaaggtgctcagtgaatgtttgcacaatgttcttgaatgatgccagaagcagcatgaacatacaagaggctcttcaatgaagaaagccctaatgcgaatgatcgagacgtttgatttgataagaaaacatggccctttatagagttgacctttgtagtgaaggaattgaatatataacagggaggccacaaaagcagttcctgcagcgagcctgctgggagatgagaaggcttcctgggcactggcatgggtgagggagggaaaaggaagagctagcgatgctgggtagttgggtgtctattaggttggtgcaaaagtaattgtgggttttgccattacttaaaatggtgaaaaccacaattacttttgcaccaaactaataaaactttgcaaaactagcttttctgaaaaccaagttaaagagcagatgaaaagtaagtttaataactatgtcttctttggttattttctgattttagactgcataaaccaagaacccaaagatagcagccctgcagaagaatgtgatggtgagaaaagaaagcccctcctcctcctttccaagttgtggggtttggtttaagatatgtgagcaccatgctgggtcatgcagtttccagtctgggaaagtaagggtgggaggaggtggaaggactacttagggtcaaatcagcttctctctgtatgaccttcagcaggggaccctgcttctccaagcctcagtttcatcatttgctaagttaacatgataactagacctaccttatagggatattagggaagtgcttgtaaatgtcttatcacaatgcctggtaaattgcaagcatcccatagatgaaggctattattattttccttatgtgtaaagtaagcaaccagttgcatggaatctccatttctaaaatgctccctgtgcacagggctctccttttttcagaatccacatccatccctgagaaggccagggctgtggttgtcacccgtgacgatctgcgtgcatgccaactgggctgcatagcacttgtggtcttttcgcagtcccacggctccccccacagcacatttgcctttgattgtggcccctacagattgcgacagctgtgtgatgaccctcctgaacgacctggccaccatgggcgagcagctccgcctggtcaagtctcagctgcagggcctgagtgccagcgcagggcttctggagcagatgaggcacatggagacccaggccaaggacctgagggtaaatcccctgcggccgagagtagacacgtggggaggagatgctgcgggagtggattctccataagcaggaagggaaaggttgactcctggaaaggctcaggggttgtcctccttcctctgatccaaatgaagataagacttttcctggtggaaaatcatttttgtgaacacacaaaactagcacatctgggtgaacaatacttactgaacatttccaggtgagtttttctcatcgagcctttatttcagtatcttgcattcagaagactcaaacacaggtttgtgttaagttggtattaactcttctttaaatgttggatagaatttttccagtgaagccatgtgagcctggaattttctttgttggaagttgtggtttttgaaaataagccatgaatttaattttcaaagaataggtatgagactacagtatttgggctatgtgtttcttcttgagtgatacttggtcatttgcacctttcaaataatatgtcaatttcatctaaattaccaaatatattgacataaaattgttcataatgttcccttattatcctttgtacatctgcaaagtctataaagatgccttcttattcattttctgataatgataatttatgacttatctctttctcttattttggctagagtattaccaatgttgttgatccttttatttcattgattttatccattgtttatctattttcaatttcattgatttctgttcttatcctttttttttccttccttgtgcttgctttgggtgaaacttgctattcattttctggtttcctaagcttattttactgattcaaaatctttcttgattctaacgtaggcatataatcctatcagttttatcactaagcactgctttagctgtatcccacacaccttgcaatgttatgttttcattctcattcagttcaatggattttctgattttccttgtgacgtatctgtaacccatgtgttatttagaaatgtgttgaccaggcatggtggctcatgcctgtaatcccagcgctttgggaggccgaggcgggtagatcacttgagcccaggacttggagaccagcctggccaacatggtgaaactccaactctactaaaaatacaaaaattagccaggcatgatggcacatgcctgtagtcccagctacttgggaggctgaggcaggagaatcacttgaaccccagaggcagaggttgcagtgagctgagatggtgccactgcactccagcctgggtgacacagcgagactccatctcaaaaaacaaaagcaaaaacaaaaaacaaaaacaaaaaagaaatgtgttgtttaatatccaaattgggggattttccagataactttgtgttactggtttctaatttaactctttcatggtcagagaacacgctttccatgatttcagtccttttaaatgtgttgaggtttgtttcattgctcagaatgtggtccatttgggtgaatgctgtatgtatacttagatggaatatggctgagagggtatcctaagaagtaatagaacctatttccctgaggggaaataggggatgctgtgcccatgaatgggggctaaaaagcagcctggaagctgcccaatgctcatcgttgggtgatggccacatgagagcctagcaaagcttacaggggcaggacaaatctacagacctggatctatgctggaatgttacatactctcaacgccactatggtatataaatcctaaactgccaaagtaagacctggtcctagaccgtgggttggaggttcgagtaggggtggtgataagcataagagcactagacagggcccagagagcacaaagaaaggggaactcccacccagaaagagcctgcaaacattgttagcagagaagtaataagaaagacacccaacagaagcaacagtcaagagatgagttcacttcggataaaatgaaaacaacaggacaatctgaaaatgactttgcagaatgacacccaatagaaggaacaagaaattaggaaatttgagggggaaacctccagaaatcaaacaagaagaggtagataggaaaagacccaattgaaaatcatggaaatgaaaaaatacactcattgaagtaaaagaattcagtagatgagatcagctctagtctagacacagtgaacaaggctttggggaaagtttaataagtacttttgggttgagggctgattctagtgactatagctgagtatatatagcaaaagattattctagaaaaatgactctttcctatccttttgcataactttagtccaaggtttataggcttaatatggagaagaggagggaaaagcatttatgtcttgaggggaaaaaaaaggaagccactggcttgcttggatttcatcaacatggccctgcagccttcaccattctgcacacacgctgtttgccacaccctgtgctaagggctttactcaagtctcacaacctcctcatgaggaacctagtgttgttctcattaaacaggcatggagaagctgagaaacttgcctagaatcatggtggttctggaagaattcaaatcaagatcaaattctaaagaccatgctttacccactccacttcttatccaggtgttctgctgacaatctatataatgacttgcctccctttccccaaagtaaagttaaaatagaactatcttcttgctgtatcacacaaacatgcgaaaattaagaaagattacgtataagaagggaagtaacatttttgaatgctcatatgtacatgacattttacaatacattagctcgcttatcaccaaaaccaaccctgcagctaaatacgataatccccaatttactaatggaagagcaaggcttagtgaggctcatctatcatgtggcagactaagggtttggacctaggctttatttaaagcctgtattcttttacccaacactggttctgacatacatattgaggtaataatatcattttttcctataaactttttcaatatattaatactttttccaaaaaatggaaaataatcaccattctagatattacgtgcagtagtgtctaagggtctaagagtaatgaggcaatttagcctaaaaaaagggcaagggacccggattatggtcctgaagcaatcaccgatgagctatacaaccgtggacaagtcacccgacttctttgggcttccattttctcagttgcaatatgaggctgttcagctacaagagctctgagttccctgtggttctgttggacgagattctttgaatagattcttaatgattccttcattcaagtagccatatgcactgcttttagtgttgtcaggttaactgcaggtttttaaaaaactgtatttattatagaatctggaaattaatcaggtaagtagtatcaccctcatttctataaggttaggtcattaattcaagtgaagtagctcttatctcttcacatttgtcacatttgctactttattttagagccatatcacaatgtacatcagaaaatagattccttatgtaacctatttccaagaaccacatttgtgtgtgtgtggaactgaaaatggtcttgccaaatgattcttcatttataaccctgttgaccaggttgataggacttagtctttatactgtaaagtgacattcatttgtgttttgtttccagaatcagttgctcaactaccgttctgccatttcaaatcatggatcaaaaatagaaggcctggaaagagaactgactgatttgaatcaagaatttgagactttgcaagaaaaggtaatgtgttaggtccatttaactttggggtttttttgctttcaaagtatttttatttttccttattgacttaatttgctgctaatcaatttatttttcatataggctcaagtaaattccagaaaagcacaaacattaaacaacaatgttaatcgggcaacacaaagcgcaaaagaactggatgtgaagattaaaaatgtcatccggaatgtgcacagtaagaagagttattaagcccaattacattttttttggttacataaccttcattgtacactaaaagaattccctttaagatttcaacattatgaaaagaatcccatagtgatactaaaaaactaatataaaatctccatagaagtttctacctttttttttttttaagtagcctactggagcccagaattcccag

SEQ ID NO: 7760 - DNA, 6000 bp, Homo sapiens
gagagagagacatcgggtactgaagccaggggaccagttccttggtgttgctttggcattgatgcctgaagtgggaggagaaagccgagcccacaaacacacagagcagagtggggctctgagtatataactgttaggtgcctccctccagcaccatctcctgagaagcactctcccttgtcgtggaggtgggcaaatctttatcagccactgccttctgctgccaggaagccagctagagtggtgtaagtactcatccttatttctattcatttccaactattcatcatttggggcttgtcttcacagttctaagttttgctctttttcttaatgaagaaaatgttttatatcaccggaattgatcagaagtagcaaaatcagagttctggtagactagaaagcaatttaccaaagccacaggcttcttcctggaagctcaaaggcatgcctttattcgtgatttctgaagcaaggtgcatgcagcacctgagctgatgtggaagagggtttgcagggaggtgtccacccaatgtgctcaatgattctgggttaatcaacactattaggagtttcaggttgtgttcttgaaataataatttgggctgtgttcttgaaataagttcgaggcgagtgtctacaagactcaaaagaaaaaagtgggccactgggaatggccctttccagtgatggatttatggactcctctgtgtgtgctgtcatgctgaagggaatgttcttgtgcacccatcgggagaacaagtcagtcacaactgaagccacgaatttggcagcttccttgcagctgcactctctggagtctggaatcaagacttctgggagtagtgttttccaaggagggaagtgttttaaccaggacacaggaatatctgacagcattttctttgtttccaattacagctttaaagaaaactgggcatctcctgctacttaaaatcaaaaactacctaaaataaagattatagtaagtaccaaataagtgtcaatgctgaaagtctctttattatgctagaccatgagtgtttaaatgctttcttctatatccatatccaacacttcatattatttttaaaagtaatagctgaagcatggaaaattgaagacttcaggtctctccaattgcacaaatttctaatacatgctggcaatagaatatattttatttcgtgtaataaaatagaggatattagttgacctgaaatcttgatattgccttgtattaaaatgctaagcactgcttcattttactagtgatctggggtatgaaaagtgctttttgacttctgctggaaagctcttcaggtgcagcttccaggatattcttgggatgttaacttcagcacacataagccttgctgtagatgtgtcagctttgaggcacagggagacatttgtttgtcagagagtaactgcttctggcaagggcatagggtgaaactggggatagcagagctctttctttgtggttgttcaacccccaccccaagattagttcaaagtgaccgtgaagatagtctgtgcccaccgcatcgctaagtcctagccctctctgcatactccagcacacagaaactgctgcttcacttgtttgttgacttgaaccgaaccttgggtggcattaatgtgcctggcccaagactgaaaaattaagaaccaccagagctgacctattccataagacccagtctgcctgccacgtactgagtgaatctggatgatgcccactctgatccttggttttctcttctataaaatgaaggcttgaactacgtggtctctaaaatcctacctagctctcaaatttctcttggttctaggaaaatattgatgttgagctcaaggaaggggttctccaaggtgtgtgattttggtggtagaggaaaggccggtgccaggcaggggcagaaggagacgctgtctacactgagaaaatgtgacaacccctgcttgtctcttttttcattcttcattgtttcttatttctttgtttttagctttatataacatgagagccctaccactgggtttcttaaccatttgttctttatcaaataaaaatattcataatgcaacatgcaggcacatcagtgtggtacagaactagccagctagtttactataggtaaatatacacacatgcatgcacacacacaatttttacctgagacatgtcagaagtgtttcctaaaattgtggatttttctgagtcattctggtaaagggtaggttttcaggttttaggccaagccagaagaagaaagtaaaaacagaataaacaacagggggagaaaaagagaaataccacacacacaactggaacttctggtaaaagagtgatattcttggatgcaatggaagttttaaaaaggaaaaagaaaatttataaaaagctgccacatttgtggaattcaactaaaaactgtttattattaacaaagtgatgttcaaaatttaagagttcttggcctggcatgatgacttatgcctgtaatcccagtgttttgggaggctaaggtgggaggatcacttgaggccaggaattcaaaaccagcctggacaatacaatgagactttgtctctaaaaaaaaataaaataaattaaaataaacacagctggatgtggtggcacaggaaaaaaaaataccatttaggagtctcttaaaggcagcttgtgaatgcttacaaagcgtggctagtatcttattacagaaaacagagcccacatcatgcatccttcttctcacatttcataaacaaggccaagggaaactgctgtggggcaacctgttgctttggtgttggtccccaagatgcagccctcacaatctgcccccaaacgtgtcagaacatgaaccccctcctccccctctggaagaagcaacctcagatccaacagcagagacacgcagcagaacaaaatctgggcattggtccctgtgtaggatggcttcccgttattttttttttaagcaaagtaaatgaacatcaaatttccatagtcagctgctgtctttctgcccactgagagctctttggtgaaggcaaagtcctccttcttcattagcggtctcccatgtggggccacatcttccctcaccaggaacccagtgggcgcgctccagcccccctcagcttgccttttgcgtggtcattagagctagggcacacgtcatgctgattcacatatttttgccctttgtcatgtattgagaaaaagtaaggatgaatggacggtctttgattggcggcgctggtgacgcccgtcatggtcctgtttggaaggacccttttggaactaaagctggtgacgcagcgcgcagaggcatcgcccggctaagcttggccctggcagatgggtcgcaggaacaggtatgcttccttcgtgcagcctctggctcggggaacctgggagcctgctccaaactctggtgtatcttttccgggcagagcctgggaagtgggggttggctgtgagctaagccaaaggcacagggatcttggtccaaaaagccccatggcgctcaccttggtttagaggctagaccattgagctgagaagttttgacagccatggaaaagctggggataagtcacctggggttttacgtttaccctgtgtctattttattagagtgccttttacttattgtcccttcttcttagttgaaattaatggcctgcttcactggggctaagatgtttgaacattagcagaaggtcctggctgcatagccttgccttgtcttcccagttaggatgtaaggactcttaaagttccctaagaaatgcaaatattttagcatggcaaaattctaggccaactacaactgtaagtttcgtatttctcctaagtggttctcatgcctgacttctggagcaaggagtcaggtctcccaggggctctagaagggttcagctgttcagaataaatggttcctggggactctaaaatagcagcaactgtctgcccaggtcatgagaagacccctctctgcaggacatcctagccctacaacccatcccaattatgttgaaattagattcacaaatggcaataagtcttctatatgttgggctgtcgatttggagaaaactagtttaatctttacttaactttgggtggctcaacaggagactcgggccgctcaggctctcaatcacgtctggccagttctattatcaggtttcgaatctgtatctccaaaatctctgaggtgatgggatatttcaagccctctaaaataaataaatatatgctgggaattttgagaacatgaatttgtttattctgaaatggtccatgttcctgctttgggagttgatggaaaatgccacttgagtgttttcatttgatgctgccaccttagggttttatagattcagttccagaaactcaaggcatttatctctttgggctgcttgtccttgcctgagctgaagcctgatgcctcccataagttggtatggctttgaaaatgggtcactacagcagaggcatgggcttatcaagcaatatgttcagctatgaaatttgaagagggagataatctgaaaataaatgacagccaccacttagattatgaaatagaagtactttttcataagtgcttaattattcatacggttttttatctttaactatggagccaactcagctccatatggacttaattttggttcctgacctccaagattcattgcaagtcacacagatgttggtatctaacattgttttaccgagataaaatgaccttggtctggaatgcattgtataaaaagctgcttttttgtgtaaagattaatagtttggcattgtttaaaaagcagaatggttagttgggcagtgaggtaatacaattgaaatgtaattgctaccaataaatcagttacccatattgatttctttactgggattaatagaagccaaagctagagttcaactttttttaataggtataacttagtatctgttcattgctatttgttagctatggtaaatggaacaatgatggggccagaaatatccatgaggaccatttgatcacagcctggcaacacagagaagacaggctggtttctctatgtgggctttcagtgtttctttggtagtgtcttatgtggctgtggcttcaacattccacaattatgccttccagggtctgatgattttggcgtttccctgcttcccaattgacctggctgtgctgttggctgttcttgcacactcaaggtggttttgccattggcttcctccctcagcctgcctctgggattatgccactgctattcttttttatctaccatcagcacaatgaaatcatcatttttgtcttcaaggtaccaaattctggtgatattggtgctttcttgcagctacttatcatgagaagtgaatggtctcatagtgaacacagtcatggttatagtgttcatacgttccagagacatgtttcctataattatgccctgcacatttttctatcatacaatccttagattacagctctttggttttcaacagctttgtccaattccatctttcccagtttctctaccttgatgaaatatccttcttgcctggttttacatatttaaataacaaattccaaaagtaaagagtatctgaggcagtcacatgacataaggacaaattcaagccatcttggacttgcagagggtggggagaccgtgtcaacacacacaattttaaaaatttcttccctttcaatcttttaaaaacaaaactttttataaaataaaaatgtaatttaaaaaggctacctgtcttggcaagtagctgatcagcctgcattggtgagcaggccattccataacctggtttcttgctccttaattgacagcatggagctaacgtacttaatttcagctctttctacgtgatttgactcattctgttaacattaactgtttttcagtcttctcaactagactgaactccttaagtgcaagaaatacacg

SEQ ID NO: 7761 - DNA, 6000 bp, Homo sapiens
tgactcacgcctataatcccagcactttgggaggatgaggcaggtgaatcacttgaggccaggagttcaagaacagcctgggcaacatggtgaaaccctggctctactaaagatataaaaattagctgtcatggtggtgtgcatctgtaatcccagctacttgggaggctgaggcatgaaaatcatttgaacctaggaagtgaaggttgcagtgagcagagattgtgccactgcactccagcctgggtgacagagtgagactctgcctcaaaacatatataaaataaataaaataagatagttctaagaaatatctctgttgtgtttactatgttcaaatatttcagaatattattttccttttctcactgaaacttatcttttgggtaaatcataaccccactgcttattcttttgtaattcttcattgtatctaacacagcatcctgcaaggggttagttagggctggatgaatggagttgattggccataaaatcctactgcgtaatgcattagtgtgtttcttaggattctttcctttatgtgactttactgagggagtgaatgattctttgctacttccccagaagcagagagagttggtgagtatgctgatatacagctacgtaacaccgcatactgcagcaattgcctgtgtttgtcttctcccagggattccaaatgccagctactggccctgggcctgtagataaaaatctttagctgatatggtactttaaattggaagatcaatctccaagtgccttgaaagcattcagcttcaaaaattcatgaaagtaagaagaatatgactttgtttaagagaaaaggtagctcatgattggcgctacagccattgtgatgtgtgaattggtttctgatgttcagctctgtggcgataaataatctgacatctggggcaatgttctcttgtctcataatcagcaaatgttttatcttcaatggctgcatttgaattctgcaaaaattattacggtcgaaattgaagggaaacctaacagttttgttttgttttgaatatttggctttcgtttctttagctactagtttaaagggaaagttcaactgttttgtaagccatttgctgtaagagagtcatgactgctgttttgtgcaaagcaaaggagtctaaagcataatactgcatagaaacactgcttttttcttttctgactctctcaatgtaagtatgcacaaactttctttccaatttatgcagtgaagctgttgcctacctcaacttcaaatacttttctcagttcccccatcaatacttaaagaggttgttgttaatttctgaaaaatatcccttcccccaaattgctcatgtatcaggctactatttacagtaatctaagtgaatagatatcattcacactctcacaacctcagaattacaaaaatgaggcaaaagagaaatgagactagcccaaaattccatagaataccttccttcctagtcacagtagaataaaactctcctgatttgcagaccgaagcctccctccatgaaggtgttgcctctcctgtgacccaagccaccgggccaactccctgaaggtcattcaaggcttgagatgactcattccaactccacttggggccacactctttttggtggcaggtgcctgggcacttattaagctgtttagtccagaactctgttgactcctttccagagctcacggagagccagactggtgcctggaacagagcaaatgctcaatccctgggtgttacctccccatcccaacaacactgccaaaaataaatgttagggcttgggaaggagagccatataaatgatgaatggcttagaaatagataaagaagttcaggtcgtcttagagacatgtaagctgaaaatgataccaatattcttcctcctgcaggggtagcacagttgtgcgttcatgattccctcttgaggctcactatagagtgggagtcaggaaccaccccctgcttctttagacaaactcagcttccactgttttttaatagtggctgttacatacaattgtatttgtaccagggattgtaatcctattttacaaagaaaaaagtttgtgatacacatactctattttcactggattttatatgagataaactgtcatgggcatctgcttattcatctgtcaaatgagacattgaatttttttactctgagcaaactgcataactctccaaggagattgttgtacgtgggttgtctctgacattggttactagagacaggcatcagggtgagaagttaggactcctgtggtccaaccttgcctgcccgcaactcactgacctcctctgaccctggtgcttccatctgtaaagtcaagttcttggactaaatgagctctgacagaccttccagctttaaaagttatataatctcaagtctggaaaactttcttaagagaaaagcaatttataagatttatgtctaagaggattttaaggagaaagataacacccatctgtctttctctctgtctatctatctctccctctctcaaatgcatgtgagagtatttttctgaaggccaggaggatttaaagaccctttctttaaagactctgtcacttctgtgtttctagggttttcaattctctaatactccagtttaacgctgtttcctggggcattatagatttcacttgtgtaaattcttcttgtgtttttgtgatctctttcaaccagaaatgagttttgtttctttatttttgtggctgttttttgtggggtttttttttaattgaatatagtagctgacttaagttacatggttatattcttcctaaattcatactttagggttttattttcttttttcagcttcatgtaggtctgcttttgaataagtcattgaagcaattgaatgacatttttgaaatcttgttttataagttcacttccacacactagagtctattaaatggaagggacatattttcactccatagtggaaagttaatgcatagaacaggtaccaagactcagcttttctccatgtttgaaatcaagatgctttggttctttttagcaaaaatcttgctaaagtatgaggtgacaggcatgagaaggtacaatgccactaaatatgaaccacattacaaaaacaaatgttcctgagctggaaataaaaattagctcctcaggaacttaatgaaacacgaggtataaaatggtagcaaaataatctttaatagtgatcttcaaaattgttggcatcaggactttctcaggtacagaggaacagtgtgacacagcagctgatgacattatttttcgttcctgttaactactcaaggaggtgacagctgtgagtgttgtacctaatagcagaagtgagctcacctcaaattataaataccaagggtaatgtagtgataacttctctcacctaaatattttgccctcttggttaataaggccttctgtttcacctgagagatcatttcttttttgaaattgctgttgtgagcccaaggaagagaaagtatcttggagcagaagagaaaaaagcagtctccccaaacatctataagccctgccctgccctgcctccaacaaacttccagcatctgctgaactccgaagtgcgatttgcttagtgggatctaaaccctttgctctataaagaggaacagaggtagttacctacccaaagatgcatggctgaaggatatgagcttaaaggctatcagacataactgtggacagtggaataggacagagagagaagagtttataaatatatggatatggagaaattgaaacttacatggtcacgcttggtggctcacgcccataatcccagcactttggcaggctgagacgtgaggatcacttaagcccaggagtttgagaccagcctggggagcatagtgagacccccgtctctacagaaagcaaaataattagccagtaatggtaacacatgcctatagtcccagctgctgggaaggctgaggtgagacgattgcttgaaccgtggagatagaggctacagtgagctatgattgcaccactgcacaccagcctaggcaattgagtgagaccctgtctcaaaagaaaaaaataaataaacttgagaaacaaatgcagaaatccatcattactgaacggttactgtacttctatagagtaaaagtgttgcctgactcatttgggtaagcatatctaatatgcatagccaatattcactttttttttttttttttttttgccagaacattcaaccatgtcaggccattaacttgctgggatccttagtactctcgtgtagccaggtgcactcttgctctttttcacatctagtctctttattttaaaaaacaaaattccatacatccttcattcatgtattaattcaggagctctacactgagcattttactttgtgcccggcagtgttctctgcattggaaatgaagcatgagcaaaagaggctgaaatttgtcctcatgtagttcacatctggagggagtatacagcaatgaacaaaataagtgattacaacatataaggcataagatatggtgaggagtacaatggagagaaatagagcagggaaagggaggggagtgcctcgggattttcaataggggagtgaagggtacagcctcgctgagcaaggcatatttgcatagagacataaatagatgcacaagtgccctatgtgggtatctgagcattccaggcaaaggcagcacatacatgggcgggaggccggagggtgcctgaccaattcaaggcactgcatgtgaaccagtgccctgaagcagtgggagtgatggacaaggatgtggccggcggggtatgaaggtcaggcagggactcaatgatgacttaggccttactctgaggaacaaaggaagccattcggtaggtttttaagaaaggagtaacgtgattcgactgactttttaacaggattgctctgctgctgtgctgagaatagtctgagagggagagattggaaggtcgtttttaagcttgagaatggtaatagacatccaggtggagatgactaggcggcagatgagtctggagttcagggcagctctccatcgatatttctagctcgctttgtctacagtcatggtaagtccacgtgtctaaatgtctcccctttccccccttgagtaattgaacagattcggcagtctctataagaaaatgttaaaacaggcagttaggcagttagttaaagtagagagccatttgtgagcctgatttgctggaaaataataaagaagaaaagaaagctgtacatcaggataagagaaatcctcatgcagtaaagtcttcaaaaatgttacagactccaacgagtcaatatcctgaaggaactgaaagtatggttcgggctcctgctctgttcttcatttcgccgtgaaggttattgttaattatttcctttgagctttaaagtcagcattcatgcttgtttcctcattattttcccactaagctaattaatgcagttgcacaggaaccccaagataggcttttggagaggcagcaagggtttgcagtgaagacccgagtgaaggcccagggaactcaagtgccaagtctaacgctaccatttgggggtgactttgaccaaaatcacgatatttttttcatctctcgcaccaaatgccatattaatactcccaaaattaaaatggttttgctttgtcactggcatattgaattttagatcccagtatatcctgagttctcagatagtgggaatttgaagatcaaatagaaataagagtgaaaacctaggttaaatcccaagggccatgatttagtgaccttccaaaagacatttaatcctcttgactgcaatatcgttacatcccaaaccttgctgtgaaaaatatatgggataactttttttttaagatggagtcttgctctgtcacccgggctggagtgcagtggtgcgatatgggctcactgcaacctccatctcccaggt

SEQ ID NO: 7762 - DNA, 6000 bp, Homo sapiens
aaggctcacttttcagtctcaaacctaaactattataaataaatatttattaatgtagtggcagtgcttccagagaatagcagtgtccattttaaaatattataattaattttgtttcagttgtttctcacagcaaaggaatttaaatcctttaaaattaaataagtaatgcagcagttgtgaaggccaccaacatgctaacttacaatagccaataaaaatatgagacctgtaagccagcttcaaagagcgctagcttttattataatttatatattgcaaatgtcacttacaactttaaaaaattcatgaatataacagaatatgccccttgtgtttattcagacagtgattaccaacctagtcacagccattcatctatggtgtacactgcaaatgacaagaaaatgcaccgctgctatgtgcattcacttctaagaaaagtataccaaatctttaaaagtaatctacagcattaaataacagaataagagtcagcgttcaaaccaagacttagccaaaaatgccatccatgagattagtcattttgtcactgatacctccatttatgtctcaaaaactgttaccacattaacagaaatggaaatttttagtgagtagtatatgattttgttttcttctttttgagatggagtcttgctctgttgcccaggctggagtgcagtggcatgatctcggcttgctgcaacctccttctcctgggttgaagagattctccaacctcagcctcccgagtagctgggattacaggtgcatgccaccacactcagctaatttttgtattttttcatagagacagggtttcaccatgttggccaggctagtctcgaactcctgaccttaggtgatccacctgcctcagcctcccaaagtgctgggattacaggcgtgagccacagtgcccagccctgatcttacaatgaaaatacaactttcagttcaacatattaaattgaaactattttgtcattaacaacttttagttaaatttataagcacttgaaaatgtagatgaaaaaatatattttactaattacttgtcagttgcagtaaactagttaagatttaaatagtaggaacattcttagcttgttgattaaactaaaagttgccccatgttatattataccaatcttaattctactaaaaatagcaatggttgtatgaaatttagaactaatttaaagtatatttgtaggtagaaagattaggaataacattaaaatattaattgggttttttgtatagtgtaatgatattattttagttttctttatacttttacacattttctagatttttagcaataaagattctttactttaaagtacatatgacttcattttgaaatagcaacttgacactgagatttgtttatttttgagaacatgcagctgggtatcttattcacagatgttttggaaagggtagtaattattttgctgttctagtctcccttgtgggatttgtagcctgtggaatagtacatgtctaatgagaccttactaacaaagagcaaagacatttagaggagggctctcatttctcctttaaaagggcatagagaagataaaggctcatatgggttttttcatgttcaagagaggaacttgattcttccagccacactagcaacagtttccccgtaaatgttatgtcttcagcctcagcttaaattttgaattttatttaaatcttacaatgaggatgcaaactgagattaatttgcagagggtgttttaaacaaaaagcatccatcatgttttttttcaaatgagtgtgtagtacagtggaaaacagtatactgcagtgtttggaacagtgtttcaaaagagaggttttcattttgtttgtttgtttttttcttttttttgagacagggtcttactctgttgcccaggctggagtagagtgtcacgatcatggctcactgcagccgagacctccctgggctcaagtgatcctcctatctcagcctcccaagtagctgggactacaggtgcacaccaccaagcccagctaatttttttttgtattttgtagagacagggtttcaccatgttgctcaggctgaatcgaactcctgggctcaagcaatccacccaccttggcctcttaaagtgctgggattacaggtgtgagccactgtgcccagcctcaaatgagaggtttgaagtcagacaggtctgaaatctcagctcaaccatttgataagcacaaaatcttaagcaagcttattaccctctcagagtgtcactcttcttttcataaaatgggaagaataataatatttatctcattggttattgttagaattaaatgagattatacaagaaaagtgccaagtacggctggcccggggacagtgctcaacaagcagggtttctgttgcccaagtgcgtctgttaaataaatgtctaatattctacagcacacatgtgctctaaagcaaatgtctgcacttcattcaaactcaaaactttattctaggggcatagctaatatgtaataataatttccggctgggcacggtggctcacacctgtaatcccagcactttgggaggctgaggcaggtggatcacgaggtcaggagattgagaccatcctggctaacacagtgaaaccccatctctactaaaaatacaaaaaattagccaggcgtggtggcgggcacctgtagtcccagctactcaggaggctgaggcaggagaatggcgtgaacccgggaggcagagcttgcagtgagtggcgatcgcccactgcactccagcctaggtgacagagcaagactccgtctcaaaattaataataataataataataataataatttccatttattgaaatcctatggaattgctacttctcaactagccataaactcatattttttcaccaagccatcgtgagaaccgcatagatgaaagctatctgcacagtaatgaacacgaggttttcatttaaatcaaatcaccaaattttggaagcctggaatggagcagattactacgagctaaaaactatcaagtactttacaagtattgttgcatttaatccttttaccccgtgaggtttgtattattataatccccactttacagatgaggaaattaagacttggaaagttacgtaactgatacaagcactcataactctgctaagtggtggagctgggttggttttgatcatgcttacctgaataacggaatccccaaaagataaaaactgtgttatgatcatgattgtgcaggaaaccagtgtaaaatggcaatattgagaaaataagagaaggactctccagaaattttttttttattttagttaaagaattcttagtgcgcttaatttgtagtaccaccaaagaggatctatctttacattaacgattatcataagatggaaagaacataattaatgaaaagaggataggagatgaaacagttctttttgttttctgttcaaatgcagtttaataatttatggatctctgatgaggctttggtgtgttttcttatttcctctccaattcccctctttttgatgcatgacacaaatacactcttaatttaacccagctagattctacattcatgagctgctcaatggaatagcttttctctacttacactctatcctcttccatcttttccttagatatattgggttgggcccatcataggagctgtcctcgctggtggcctttatgagtatgtcttctgtccagatgttgaattcaaacgtcgttttaaagaagccttcagcaaagctgcccagcaaacaaaaggaagctacatggaggtggaggacaacaggagtcaggtagagacggatgacctgattctaaaacctggagtggtgcatgtgattgacgttgaccggggagaggagaagaaggggaaagaccaatctggagaggtattgtcttcagtatgactagaagatcgcactgaaagcagacaagactccttagaactgtcctcagatttccttccacccattaaggaaacagatttgttataaattagaaatgtgcaggtttgttgtttcatgtcatattactcagtctaaacaataaatatttcataatttacaaaggaggaacggaagaaacctattgtgaattccaaatctaaaaaaagaaatatttttaaaatgttcttaagcaaatatatacctattttatctagttacctttcattaacaaccaattttaaccgtgtgtcaagatttggttaagtcttgcctgacagaactcaaagacacgtctatcagcttattccttctctactggaatattggtatagtcaattcttatttgaatatttattctattaaactgagtttaacaatggcaaaatacagtatgtcacagtcatgcacattcaagagagaaaatataacaagttcttttatgagcaatcccttatgcatagactaccttggcaaaagagcattagcaagtgtcactgctcatcagttacttccttccatttatatcacaaatacccaagtttcaattctaacttcatttcatggtatttcttcctcctcaatgcccaaggtaatgtgggactaaagcccagaaatttgaaaagaatattcagaaatccttcccaaatcataagggcacctattgagattcaagacaagcagactcgtaaaatcttgtagaggcagaggcaaagttatcatcatacaaaaatcacaaacaaaaaggagatctgtattcgggtatcaaacggttgatctgttttcagtgcacaccctcaaatgcaccacaccagttttacgatctaagcttttaacccctttaccactttgcttatttttaaaaaatttattggcaaaactggggattttgtttgtaactttggttatctatatttaaacattagctgagacatatttttgataacaagaacttagctagttgagtcctggctttttgttgattattaagctgtgttcactctagaaggtgtaaaggccctgtcccaatctctgctctctcacttctcgtgacatttgttgataatctttactgcaagtgtaatgatatttgagtgaattaaaatgcatgacagacaaggtacaacatggttgcagaataaaagggtgaggacatcagatcactctgtattcaaagcttactagacgaacaatctttcatttctggatatattgtagctaacccaacacatttttaaactatttttgttactgactcacttacttgtcaaaataattggtttttctgtcctgctttgccttttgtcactagaatgttctccagaaaccccagtttctgtcatcttaactgtctagtctagccgttaacttagacaaagaagtgcaaatgtcaatttcactaaacaaaagctattagaagtaaagcagaaacctatcactgcaaggagtgacttgtaaataactgatgatcaagggctgtcttctctcaagcatggttccaactctgtgtcactttttagcgttaatggcagttgtgtgtctgtggcagtgagataatggaccactattaaacctgattctcttcggtgctaggaaagagtgatgtgtgagattcccagagagtcgtcacaccagtgttatgcctgggagtgccactggcataccgcaggtgcctaaatcccaggcccctttctcagggggcgtggccacaccacacactgcgccagtgacacatagttacttcctggctgggacggcacctatagaaactagggtacaaatctcccaaagatggtttgcaccgtcatttcaaatgtttgcacaatataccacttagaggcttaaaatcagggtggttcagttcaaaaggtaatatcaaccgtcagcaaacatgtcagtttaaaaataagttcggttaacaaggaagtgttaagcagattttttgaatacacttacaatatactggcttataatcatttttattctgccatatggtttatttcatata

SEQ ID NO: 7763 - DNA, 6000 bp, Homo sapiens
cccggccgcttgttgtcgttgttgttgttgttgtttttaagtaaaattggaactactttgagttttgccccttgtaggaagctgtttatcttagaattcctgcaactccattaaaatacatctaaagtcaaaataataaaaattgggtacctttaaagggaaagacacttacattttgttaacagttgctttttttttttttttttgagacggagttttgcttttgtcgcccaggctggagtgcagtggcgcgatcttggctcaccacaacctctgcctcccaggttcaagcgattctcctgcctcagcttcccgagtagctgggattacaggcatgtgccaccacgcccagctaattttgtatttctagtagagacggggtttctccatgttggtcaggctggtctccaactcccgaccttaggtaatccgcccgccttggcctcccaaagtgctgggattacaggcatgagccaccgtgccctgccaatagttgctttttaaaatactgactgccaggccgggtgcagtggctgacgtctgtaattccagcactttgggaggccaaggtgggtgcatcacctgaagtcaggagttcgagatcaacctggccaacatggcgaaaccctgtctctactaaaaataaaaaaattagccgggcatggtggtggtcgcctgtagtcccagctactcaggaggccgaggcatgagaatcgcttgaacctgggaggtgaaggttgcaatgagccaagatcgtgcccctgcactccagcttgggtgacagaatgagactccgtctcagaaggaaaaaaaaaatgtgtgtgtatatatatatttactgcccagtaaatatatatttatttactgcccagtctgggcaatatgatgaaatcctgtctctataaaaaaaataagtacaaaaattagcctggccaggtggcgcactcctgtgatcccacctactggggaggctgaggtgggaggatcacctgagcccaggaagtcgaggctgtagtgagccgtgattgagccactgcactccgacctgggtgacaagagtgagaccctgtcccaaaaaagaaaaaaaaataagccgggtgcggtgctcacgcctatagttctagcactttgggaggccaaggcgggtggatcacttgaggtcaggagttcgagaccagcctggccagcatggtgaaaccccgtctctactaaaaatataaaaaattaacctggtggaggtggcgcacccctgtagtcccagctactcgggaggctgagaatcgcttgagactaggaggtggaggatgcagtgagccgtctcaaaaaaacaataataataaagtacagactgcattttaaaaatatgcgagtgtttactgtgtactaggagctgtataaaaggttttcacatatatcaaaagctactttcccatttgacattttaaacaaaatgctttatatgtaattagcattttcaccagtactttgatcacactaagctggcatttgtttaagcttgtaagttttataaaggctttgttaaaaatcaaatttttaagaatacttttgcactaggtctccagaaatgctttgggttcatctttcattgctgcaaggaacttccatgcctctaacactcatcttcaaaagactggtaagttattatttctcagtctacgccgcacttactagatgaagatataaattacatacatcgtataactgtggtgagttgtttttcatttgttagttttttctctagtttgtatagactctcaggttcttaaaccatattgttaccatttagccctgtcatggttctcttgttatagtcaaatgaactactgttacatatttttcttttgatattagtatggcttctttgttctggtaatggcccttgggtagaaacagaaagaacatacactaggtaatggaatctttgtgacctctggaagacttcctttttccttttctaaaaggcattagaaaaaatgtaagttcttattgataggttttcttattcgttttctttttttttgagacagaatcttgctctgtcgccaggctggagtgcagtggcaagatctcggctcactgcaacctctgtctcctgagttcaagcaattctactgcctcagtctcctgactagctgggattacaggcatgcaccaccatgcccggctaattttttgtattttagtagagacaaggtttcaccatgttggccaggatggtctcgatctcctgaccttgtgatatgcctgcctcggcctcccaaagtgctgggattaaaggcgtgagccactgcaccggtccactgataggttttattttttcaaaggcagtagctactagatatttggcaatctgtgaacttgcacattacagatgcagtagagaagtggggaggcaagcataggaagacactataagttggggaatttctttggagatgagtatttggacttttaaaataaaggttaaatatatatgtgtgtgagagtgtgtgtgtatatgtgtgtgtgtgtgtgtgtgtgtatgtgtacacacacccccacgttcagcatatatgtttttcttttttcttttttttttgagatggagttttgctcttgttgcccaggctggagtgcagtggcatgatctgggctcactgcagcctctgcctcacgggttcaagtgattctcctgcctcagcctcccgagtaggtgggattacaggtgcccaccaccacacccagctaatttttgtattttttgtagagacaaggtttcaccatgttagccaggctggtctcgaactcctgacctcaggtgatccacctgccttggcctcccaaagtggtgggattacagacatgaggcactgtgcgtggcctccttttttttgagactctgttgcccaagctggagtgcagttgcgccatctcagctcactgcaacctccacctcccaggttcaagtgattctcctgagtcagcttccctagtggctaggattacaggcacgcaccaccacacctggctaatttttgtatttttagtagagatagagtttcgccatgttggcctggctgatctcaaagccctgaccccaggggatccgtctaccttggcctcccaaagtgctgggatgtttttttattttgttttgttttgttttttgagacagagtttcgctctgttgcccaagctggggtgcagtagcgtagtcttggctcactggaccctccacctcctgggtttgagtgattctctcctgcctcagcctcccgagtagctggtattacaagcatgcaccaccacagctggctaattttttttttttttttccttagtagagatgggattttgctgtgttggccaggctggtccaaactcttggcctcaagtggtccgcccgcctcccaaagtgctggtattactggcgtgagccactgcacccaacccctgtatgctaagatgaagaataccacctatactaccctgtgtgccttgaaagagaaagacacactttgttaacagttgatttttattttttattttttatttttttgagatagagtcttgctctgtctccaggctggagtgcagtggggctatctcagctcactgcaacctccttctcccaggttcaagtgattctcgtgcctcagccacccaagtagctgggattacaggcatgcaccaccatgcccggcaaacttttgtgtttttagtagagatgggggtttcaccatgttgcccaggctggtctcgaactcctggcctcaagtgatccaccccctttggcatcccaaagtgctggttttacaggcatgatctaccgtgcctggccaacagttggtttttaaaatatgtttttattgaatttagccaaaaattcaggttttaacatagttacagatttcttagaaattaaaggagaacatttattttaagggttttacttaatttgattagcttcttgtctggtttacatttgttttgtgtggacttttttttccttaatcacttggttttattttcatagcttttaaaaatagaatctcgtgttacagtgtagaatatatatatatatatataatttttgtgtgtgtgatagtctcactttgtcacctatgctggagtgcagtgacacaatcttggcttactgtgacttccacctcccaggttcaagcagttcttctgtctcagcctcctgagtagctgggactacaggcatgcccgtgcccagctaattttttttttatttttagtggagacggggtttcacaatgttggccaggctggtctcgaactccttacctcaagtgatctgcctgcctcagcctcctaaagtgctagcattaccactgtggctagcgtgagccactgtgctgggtctgtagaatatatttggattattatgatcacaaaactagttttttgttgttgagaaatgggctttgaaaagatccgaggaccagatttttattattattattattattattattattattattattattattattattttgagatggagtttttgcccttgttacccaggcttgagtgcaatggtgtgatttcagctcaccgcaacctccgcctcctgggttcaagcgattcttctgcctcagcctccgcctcccgagtagctgggattacaggcatgtgccaccatgcccagctaattttgtatttttagtagagacagggttctccatgttggtcaggctggtctcaaactcctgcccttaggtgatctgcctgcctcagcctccaaaagtgctgggattacagctgtgagccactgtgcctggcccagattatttttttaattgaattgaattgtcttccatagggactgctgagatgtcctctattcttgaagagcgtattcttggagctgatacctctgttgatcttgaagaaactgggcgtgtcttaagtattggtgatggtattgcccgcgtacatgggctgaggaatgttcaagcagaagaaatggtagagttttcttcaggcttaaaggtaaattataaaataagattttggtgttttaggatctaagtcttctcagttattcatttagcgattcaaagattgtatcagatttttaaaaaactttgtcttaatttgcctcagatttttttcttgttattatcatagattgtaaagagaataaacttaagggtttgaattagccaagtttttttactctagggactgatttatacataacttgtagccactggctccaaaatataaaattgaataaactttcaccccaaatccaagaagtttaagtctgttctgtcttgctgttaagattattttatacaaaagcaaagcatttgataacttcaacaaaatttttctggtggaaattggaagtccgtgactttgtatttctagtgagtagacatattgttcaaaggcgagttttggtgtagctatcagaagctctctaatgtaagtctactttgtattgggttgagcctcatctgtcagggtatgagaaataagttgtaggagttagggaaagcagaggatgacatctggataaactagagagagtggaactgtctagtaggcatgcagatatgggaaaagatagtcttgatactcttggtaatgtctactacggaaaaagagccacttgatgtggaagaataattacagagcccaaagttatcattagctgtaagacattggccaatttagcatcttcagtgtacagtatttatctttgaaaggtgaggtcgaaacagattaattctgagttccccttttagcttttgaaatccaagtgtctagaacagtactgtccagtagtattggaaatatgtagtattctgcagtgatgagaatacatctgtgctgtttaatatggtacctactatactatcactattaatcatgtaaaatgtggctagtgtgacaggaactgaatttttaatcttttaaatttgacaaatttaaatagccacatgtggttagtggatg

SEQ ID NO: 7764 - DNA, 6000 bp, Homo sapiens
actcctattttctgagtcatttgcaaacatttacacagcaacaaactctatccaaagaacctcttttggggaaagagggacacattttaatatttcctgcataacattgtcattctgtttcataaaatcacagcacaagaggaaaccttggaagatattctccctccaggcaaaactacactgttttgtgctattttattaagttctacatggacggattcatcaaccctcctttcagcacagtgtaatgtttcaccaccttttagtcagaaaatgtgtccctattgatactagaaattctcttgcaacatgggaagccattccatcttgactacatagtcaaaacagagaaataggaagatctaataactgttgataccacagagtaaagatgtttaaaatgtagaagagttcaaacatcctgagtgtgtgttgccacatactgctcacagtgcgatggcttaattgagttttcagatacagaattgctttcctaagcaacattttgaatgtacaaagatttcaatgttctcctgaaacaactgttgacaagtatctttatagagaaagtatggaggtggatttgttttcactaagagctagcttataatttaaagtaagggtatgtctcttaaaaatatatttcatactatttataaatttaatgcagtgattattttaatcatattccaaagacatattttgacactcatcatcttaaatataaacttcataaaagttagacaggaaaaaacctaagctgtattattatatatctccatacgtgtgggggattgcctatatttttatgcatcctcttcgtttatgcacctagatgaatttcctataggtacaagttaactataggcaaactcatcacagaatattctctcttgagttaaaagataaagacaccataaaccagggtatacgtgatgtttatgtgttacctgcccaattcaagggattgtttttaattgtatagtggagtgaatagagtagcttttaaatatttcttaaaatctatgaaattgtatttttcattaacattcacatttttatagttggatttttttatgaccatttggtccaactgtgttttagtgattagtgtatgtgttttctttagcttttatattcaccatggtggtctcatggtaactagtagggtggaaactctttgcagctagttttagaaggcttcattgatgatcaattctaaacttgtagggtacactaaaaaatccaaatgtgttattagtaagttaatttcttatattgaatgaggtctattcattctaattgatgtaacaatcagtttaaagtatgcacattatattaatcttccataaaataagattttttcataatatgttagcaccgcatgtttgtccttggcagtatagccatttgggagctttcctgttgttcatttaaaaattatttgagtgcctccttgatttataaaagtgctttggggtttttttgggttttgatatatggggagcagtcatatatgttaatttgatcctctccttgctgttatttgactattgtctagctcaagcttgtacaacccatggcccttgggccacatgcagccccggatggctttgaatgcttcccagcacgaatttttaagctttcttaaatcattatgagatttggctgggcatggtggctcacgcctgtaatcccagcactttgggaggctgaaacaagaggaccacctgaggtcaggagttcaagaccagcctggccaacatggcgaaaccccgtctctactaaaaatacaaaaattagccgggcgcagtggtgggtgcctttaatcccagctactttcaaggctgaggcaggagaatcacttgaccccgggaggcagaggttgcagtgagctgagattgcaccattgcattccagaccagaagacagagtgacattccatctcaaaaaaaaaaaaatatatatatatatatatatatgagatttatacatgggcttttttttttaagctcatcagctgttgttagtgtattttacatgtggcccaagacacttcttcttcttccagggtggcccagggaagtcaaaagattggacacccctggtctagctagaagtcaaagcaaaaacttcacgtaaacacatgctgaattattttccaaaactattagaaaaatcagactgtaagccttaaacaaaaagaaaacaaagcatttttcaatgttatattttaagggactttttcatgaaaaagttattcatttcactgtttttgtaagtaacattttatttaagttaaatttgtaatggaatgtgaatatggcttattggaagaccttgaggaaactttgaaggatttccattgtcctgatataatttctagattcagaaatttgaatgtttctttttttaatcactaagctttttgagaagtttctacagactgtttttctgttcactgttttgttcaatgaaataccatcctttgtaggccataatggtacagaatgaaagagcgctgataaaagaactgaaaagaatgtctgttgagatgtaaagctaattaagattccgtttaatttctcatattctctacatgagaaaaccaattatatagcaagaccactcatatatgctaatctgctgttatttaggctttggattttgaaataggaacattaacattcatcgttcagcattttatagagaaaatgtacttttttcatgtctgaaatagtctttataatgtacatcatgagtatattaaggccccctgagaagttcctaaagaaaagaatccggaaaaaccctatgctttccaaatttatttgatccgaattcattttttaaggaacactggagtcatgcaaaatgcagttaggtaaatgctggctcaacaagcttccaggagatcccgctgcacgtaactgagatgaccatttagaagtctgatccacagggaccttacatttatcagcaccagatattgtcttcaaagtgtaggattggaatttctgtctttattccaattttatactttgaagacaatatctggagctgataaatcctttatcttttttcattataaaagagaatatcaccaaacttagtgataattctcttttataatgcatctttattgatattttaagttagaggtcagcaaactttttatgttaagggccagataataaatatttgaggccttgtgggccatatggtctctgtcacaactacgcaggtctgctcttgctgggcaagagcagccataggcaatacattaacaattaagcatgtgttccaataaaactttatttgcaaaagcaggtggtaggcctgctggcccatttgaagataaagtatagcataatcaaattttttcctcatgactaaaaataatagttacaaataaacactttacaaagcagaacatagagatcatataaaaatccttcctggtatttataatatactttttacatggtagacttagcttctgattatagtttgagttcctttttatttgtgaatacctggctgactgacatagctattttcgagtaactttttgttcatattgtttacctttttggatattaggtgctctgtttctctttttctttttctttctttctttctttttttttttttttcttgagacagtgtcttcctctgttgctcaggctggagtgtagtggcgcgatctctgctcactattgcaacctctgcctcctgtgttcaagcagtcctcctgcctcagcctcccaagtagctgggactacaggcgcaagctaccacgctagactaatttttgtaatttttttagagatggggtttcaccatgttattcatttgatcttaaactcctgagctcaagcgatccacccacctcagcctcccaaagtgctgggattactggtgtgaaccacggcacctggcctgctctgtttttctataaaacaatttcatttttctcaaaaggagaacaggtcagactctcctacagataatgcggaactgcataggagtattggttggagcaacagtagtctatgaccaaacaaaaatgttatgtgtataaaacttggaattggtaccaactttgtaaccatcttagaaataacattttactgtgtacagcttattataacagtattcaaaattgcataatacgtcatattaagaaaattatctctgtaatgcgttaatgcactgggagctgcctattctctgaccaaactgttagtttgttaatctcacttaacaaaactagaatatgttcattaataatgtgtgaaagactgttacaccatttttaactcagttgctgcagttgtctagttgtaagcagcactgcttgcatggtgcagagggatatttcaaaatattatgcagcagcagttttgggtttaattgtctgcagatggtagatgatctattttccttactcgctgccacatttctaatagtacccaggctgttccatgtaaattagtaatctttcatgtaagcctgtccttaattttccaatatttttttgcatcattttccagctgtatcatgttagaactgatgttttaattttctattttttttaaatatctgtgtgtcattaatgttaaccacttaaacacaactgctgagctgtgcaggcaaactaagaagccagcctggtctgcttcaagactcttaatcatttctttgttcacatgttaaccatgataactatagcaaaggcaattcgtagtttctattcttttccaaccaatacttggagatgcattttttattctcttaaagtgaaaaaataaagttcctgaatggaaagctgcatgaaatttagatatcagagaaatttttctacataaaaacgtttttagtgaaagagtgtaatattcttctttacaaaagggatttagtaagaagagaaaacattgtgatttcaacaatagaatgttgaaaaacctaatacgttctaaaagcctaaagtttggatcaccagaattaacaatgaatctttcagcaccacactcaatttcaattggaaacactgctcagtcttcacctttatttaggatgaatgtttttggttttgttttcctttttttcttcttcagttgatctatccaagatctcagccaaaccttgcaactgtgtcatagttagaaatccaactgcctgactagagcttgtttaagggaaaagaattcagaatattcagcaccttgctatgttttttttttctttttttccttttctttttgttgttgttagaacaaagttgagacaatttgatatactgatggggattcttcttgctagcctagcttcagtctggcttttttttccctcatgcatgctgacctggaaatcctcctttgccttagctgcgataatcgtgactcagcttacaacaccttacattcgcatcgcccccgctgcaggcgacggccaactaacaggtcagatgttcaagtatagacgagtcatcttgcccatttcccactcatttttctcagctctgtttcccctctacatttcctcctttgcttaaggcctgtttacaatgtttcagacccttggtacagacctttgctcgtattaaattaagtgacatgcttggcctcttctgtgtgcacatttatatccatgcattaagtacaactccactgcatgttttcattgtgtgtttggtctgttggtatgtttctttctagactaatgttatatagaaatgaaatttgctggacttgaaatagcaataacatcaaacagggtttccaacaaaatacataaagatatattcctagttttccaaattagtctaaaatggtattcagatttgagggtgcaagagatttattttttaccttgcctggtctagtttgcacatacatttagctatacacaatcttggctgccagtagtattaaacgaagccccccaaaggtgtttagggtggcagtgttctaacagctttgtgtgtatgtacaatag

SEQ ID NO: 7765 - DNA, 6000 bp, Homo sapiens
tgctagctccatggggtcacacacttttatatttgttaacattcctaccagacgacagggctggtgggagcacacgcagagcatttgcgtttctacataaagctgtctctgtgctgcgtttttctaagttccaaggatacgctagaagattattccatgttatagactaatgtccacaaatatcaaactatttccatgttttgagtctgtgggaacataaagtttgtgttcttttaaaatcctcattcatgactttaagcataacaaactgacttaaaatgtactgtttctaaaggccaaattccagggattaatttttatgtggaaaatttcatctcagagcaaaattttatagcatagtcgtaaacctcaaagaatgggaatttgtaatgggcagagccatcgattcttaacaagagctgcattaacaggcagacgagacacataaaatggctccaagagcctcatggcaacatgtggagatgtagaatcttttacatggatttgcaagtaaacacatcctcttagtgccccaaaaaatcgggtaatcaggctaaaaaaatcaaagtaagtcatcatcagtccactggcatcctttggttagtttcagtggttgctacatttgttgactgttggctaattaattctgagcttgctaccactgagcaaaacaatgagtgggtggccggatgggagtgtcagagtcagactatcccggctccaactcctagctggcctctcaccagcagtttgcccttggacaaaagactcaccctctctgagcctcagtttccccatctgtaaagtggtaacaagaaaaatgtgcctcacagggttggcatgaatataagagatatatagtgcttgaaagtgctttgcatatagcagtaaacctttatgaatgtttacaaatgctaactttatgctgcagaaccattgaaaaggtatttctaattctttttttcttattattttattttactttaagttctgggatacatgtgctgtatgtgcaggtttgttacataggtatacatgtgtcatagtggtttgctgcacctctcaacccattatctaggttttaagccctgtatgcattagttatttgtcctattgcccttcctccccttgcctcccccagcccccaacaggccccactgtgtgatgttcccctccttgtgtccatgtgttctcattgttcaactcccacttatgagtgagaacatgtggtgtttggttttctgttcctgtgttagtttgctgaggatgatggtttccagcttcatccatgtctgtgcaaaggacatgaactcattcttttttatggctgcatagtattccatggtgtatatgtgccacattttctttacctggtctatcactgatgggtgttcgggttctttccaagtctttgctattgtaaataatgttgcaataaacatacgtgtgcatgtgtctttatagtagaatgatttataatcctttgggtatatacccagtaatgggactgctgggccaaatggtatttttggttctagatccttgaggaattgccacactgtcttccacagtggttgaactaatttacactcccaccaacagtgtaaaagaaaaaacaaccccatcaaaaagtggatgaagaatatgaacagacacttctcaaaagaagacatttatgcagccaacaaacatatgaaaaaaaaaaaaagctcatcatcactcatcattagagaaatgcaaatcaaaaccacaatgagataccatctcacgccagttagaacggcgatcactatttctaattcttcaagtgatctttatctgcgagaatttctgttgtgagtgaagcacccgcggtggggcaggctgtggagggggaggcaactggagggggaggcagcggggcataccgagaagccctgggggtgagagctggggctgggacctgggctgggtgagatgctaactgggcttagagatgacagttacagattctgggcgagcagagcctccctttaccactcagaaatttttttctgaagctaatgagctctgagtagccgctgagctactaacttaccatacttggagtggctggatgagagctgaaatctcagctgatcacctccaatcaaatccctggcttaggctgcctctttttggccattcaggacagcaaggttccagccaccttagcttctcctatgcaggtctcaactggtagccgatccttaaagcccgtttggttccttaaataagcaactacctgcagatggaacctgagacgagctcagccacacagaaacgcttatctgtaggacttcactgaaggtccagtgcgtttcctcctaaggactgtaaacgctcaggtaaatatttgtcagatggattaatgaactgaagacctttatagaggaaaccttgaagagatatcgttagaatctcaagtccttgttgctaccaacaactcttgtgaaagtctttggtgtccctgccttgctccattttcaaggcccctgctgcacacacagatgcctcctaagctctgagatgcgttggtgactgcacaaaactcatattagacgtgatagccatcagagtacttacgtgaaagatgcgatgtaaagatgatgagggaggagagagtgccgaatgcaaatgtttttacactttcatatttgtgtgttccacagacttccctctcccatgcccttctgctatgtgtgctgccattttctctgaatgaagggaaaagaaatattggcagctctcagctaaaattcccagtgatggacgtgctgtcatgcagccagggtgagctgtgtatcagggcatgaaccctgagtcacgacttgacctcggaacttcctttctgaagcaccatcttcaagtggtgcttaaaaggaataaaaacaaaactcaagagcactatctagtacatccgcccagacagcccctcagaggcgctgggagaggccctgtgcctgtgtttaagccacacatcccaagacagactctacaccatgtccccagacacccacaggagcgctcattatgcgtgtgtgtgtgcgtgtgtgtgtgtgtgtgtgtgtgtgtgttaggtgtgggcaatgttttcaaagtaaacttgtattcataaagtcaaaagttttgaaagtggtttttaaacaggttgaactgtgagaacattaaactgagtgggcaaggagcttaattaagatcggctccatggccgggcgtggtggctcacacctgtaatcccagaactctgagaagccgaagctggtgggtcgcttgaagtcaggagttccaggacagcctggccaacatggtgaaaccccatctctactaaaaatacaaaaattacaaaaattagcccggcatgttggcgcacgcctgtaatcccagctactcgggaagctgaggtgggagaatcacttgaaccggggagacagaggttgcagtaatcagaaatttcgccactgcactctagcctgggcgacacagcaagactgcatccaaaaaaagaaaaaagaaaagaaaaagattggctcccatggccaagatgcccagtgacagggaagctagccaaacacagtaagtgtgttgagacactggggaatagctgatggccgttaaatgaaagaaaaaaatgttgattttctttttttatatatgaaatattcattttacaccatgttaaatcccagagcgggctatttataaccatttcaaaatgcaaatatgttcattagcaaaggagagaagaacttttccagttccatgaagttcaccaaagccctaattttttttttttttttttttttttttttttttttttttttgagacggagtctcactctgtcgcccaggctggagtgaagtggccctatcttggctcatggcaacttctacctcccagttgcaagcaattctcctgcctcagcctcctgagtagctgggatcacaggcgtgtgccaccacacctggctaatttttgtatttttagtagagacgggtttcgccatgttgaccaggctggtcttgaactcctgacctcaggtgatccgcccacctcggcctccgaaagtgctaggattacaggcttgagccaccgtgcctgccccacaaagccctaattttaagaaacagacaggtacagtggcctacagcgctcctcactaaggccctggcttgagggcaagcctatcatgtgactgagcctgaccaggaagtgctggcccaggtggcaaggagcctcggggctccagggacaaggggcgctggtagccagggaggggcggcttgaagtggctgcagcttctaattctttctgaagctgcctctttctgagggtgactccctcttcattcacccagcagggtgactctgagaagtcagggaaagtctggcacagggaggggagttccatttttaattcggaaattgctcaggaagaatcataccatccggatttccctcgcggctgtatattaataaatggtcactttccttgctgaaattctctggtttccttttatccacgtgaagcttctggaaactcttctgggtggttcttctgttgcttttctgcccctgcccccaaaaatgagaacatgagaaagtgatgtcttctagccacctggaggaccctgcggtgacatcagggcccagtccctgctgtcatgccccaggtgacgtgctgggctgacagcagggctggccgctaacgtcactgtcctggcttctaacgctggtagtaaccaacagagtttagttttgctttgacaactcctcctacagccaaaactattgttatggcccacatgtcattcctatttaccctaaataaggaaaaacaaaggctattctgggctcccggcagtgcttgtggtgggggttatttgcagcgttaccatggcaggctgccctttccaccacggccaccccgtgattttctctgaaaactgcgacagactcgcagcctgccctgaattttcttcacacagcctgggggcatccgaatgcacgggagatgttttacactcagatgaaacaaactgtttagacctcggggaaaagagactgtgcttgaacaaaatgaaccaggagaaagcgccctcctgagacatgtctctgctttcatgtttgaattgcctgggattctgttctctaatttctgatccttataaactaaaactgcctaggaacattgagcatcctgactttgaaggagtctctgtggtgtttttgtgctaccatacatggggaataatgatgtgaggcagagggagagggaatgaatgggagagccaagagggaagagcgagccggggggaaaggagcgcgcagtgtttcctgctgcggttaggacctcacgccttgccagtacagagctcggtggcaagagccgctgggagctgctcccatcagttagaggatgtggagagggagcaccagaagaggacagcccgcagcctggctcgcagcctgagggacgctgtgggtgctcccagccgggcgagcacgctctgggagcggatctgcaggggagaagcacgcgagcctaacgtgagcgtcccgcctgtcgcgtgtcctgccttggtaagcgccctctccggtccttccacactgaaagcttccagcagagatcaagggaaggagtattgtgtgagacttgcagatttcctcctttctgtctggactggtttgatatttgcctgttgaaaagattactgaacgcagtgtgacaagatgagccgtctagctgcgttctgcttgcctgtgtgtgtgacacgtccaggtgtgaggccaaacctgagaagtgcagactgctcactgatagacgttgctgtaaacagtagtgccctgggtgtacagctggtctcaggatcggagaccccggacttattctctgctcggtgacacggccggcttcctgccgcagagctcctggtttctgttgatggcagttgataattggtagccacagtctgcggtcgg

SEQ ID NO: 7766 - DNA, 6000 bp, Homo sapiens
acctgcctcagcctcccaaagtgctgggattacaggcgtgagccacagtgcccagccctgatcttacaatgaaaatacaactttcagttcaacatattaaattgaaactattttgtcattaacaacttttagttaaatttataagcacttgaaaatgtagatgaaaaaatatattttactaattacttgtcagttgcagtaaactagttaagatttaaatagtaggaacattcttagcttgttgattaaactaaaagttgccccatgttatattataccaatcttaattctactaaaaatagcaatggttgtatgaaatttagaactaatttaaagtatatttgtaggtagaaagattaggaataacattaaaatattaattgggttttttgtatagtgtaatgatattattttagttttctttatacttttacacattttctagatttttagcaataaagattctttactttaaagtacatatgacttcattttgaaatagcaacttgacactgagatttgtttatttttgagaacatgcagctgggtatcttattcacagatgttttggaaagggtagtaattattttgctgttctagtctcccttgtgggatttgtagcctgtggaatagtacatgtctaatgagaccttactaacaaagagcaaagacatttagaggagggctctcatttctcctttaaaagggcatagagaagataaaggctcatatgggttttttcatgttcaagagaggaacttgattcttccagccacactagcaacagtttccccgtaaatgttatgtcttcagcctcagcttaaattttgaattttatttaaatcttacaatgaggatgcaaactgagattaatttgcagagggtgttttaaacaaaaagcatccatcatgttttttttcaaatgagtgtgtagtacagtggaaaacagtatactgcagtgtttggaacagtgtttcaaaagagaggttttcattttgtttgtttgtttttttcttttttttgagacagggtcttactctgttgcccaggctggagtagagtgtcacgatcatggctcactgcagccgagacctccctgggctcaagtgatcctcctatctcagcctcccaagtagctgggactacaggtgcacaccaccaagcccagctaatttttttttgtattttgtagagacagggtttcaccatgttgctcaggctgaatcgaactcctgggctcaagcaatccacccaccttggcctcttaaagtgctgggattacaggtgtgagccactgtgcccagcctcaaatgagaggtttgaagtcagacaggtctgaaatctcagctcaaccatttgataagcacaaaatcttaagcaagcttattaccctctcagagtgtcactcttcttttcataaaatgggaagaataataatatttatctcattggttattgttagaattaaatgagattatacaagaaaagtgccaagtacggctggcccggggacagtgctcaacaagcagggtttctgttgcccaagtgcgtctgttaaataaatgtctaatattctacagcacacatgtgctctaaagcaaatgtctgcacttcattcaaactcaaaactttattctaggggcatagctaatatgtaataataatttccggctgggcacggtggctcacacctgtaatcccagcactttgggaggctgaggcaggtggatcacgaggtcaggagattgagaccatcctggctaacacagtgaaaccccatctctactaaaaatacaaaaaattagccaggcgtggtggcgggcacctgtagtcccagctactcaggaggctgaggcaggagaatggcgtgaacccgggaggcagagcttgcagtgagtggcgatcgcccactgcactccagcctaggtgacagagcaagactccgtctcaaaattaataataataataataataataataatttccatttattgaaatcctatggaattgctacttctcaactagccataaactcatattttttcaccaagccatcgtgagaaccgcatagatgaaagctatctgcacagtaatgaacacgaggttttcatttaaatcaaatcaccaaattttggaagcctggaatggagcagattactacgagctaaaaactatcaagtactttacaagtattgttgcatttaatccttttaccccgtgaggtttgtattattataatccccactttacagatgaggaaattaagacttggaaagttacgtaactgatacaagcactcataactctgctaagtggtggagctgggttggttttgatcatgcttacctgaataacggaatccccaaaagataaaaactgtgttatgatcatgattgtgcaggaaaccagtgtaaaatggcaatattgagaaaataagagaaggactctccagaaattttttttttattttagttaaagaattcttagtgcgcttaatttgtagtaccaccaaagaggatctatctttacattaacgattatcataagatggaaagaacataattaatgaaaagaggataggagatgaaacagttctttttgttttctgttcaaatgcagtttaataatttatggatctctgatgaggctttggtgtgttttcttatttcctctccaattcccctctttttgatgcatgacacaaatacactcttaatttaacccagctagattctacattcatgagctgctcaatggaatagcttttctctacttacactctatcctcttccatcttttccttagatatattgggttgggcccatcataggagctgtcctcgctggtggcctttatgagtatgtcttctgtccagatgttgaattcaaacgtcgttttaaagaagccttcagcaaagctgcccagcaaacaaaaggaagctacatggaggtggaggacaacaggagtcaggtagagacggatgacctgattctaaaacctggagtggtgcatgtgattgacgttgaccggggagaggagaagaaggggaaagaccaatctggagaggtattgtcttcagtatgactagaagatcgcactgaaagcagacaagactccttagaactgtcctcagatttccttccacccattaaggaaacagatttgttataaattagaaatgtgcaggtttgttgtttcatgtcatattactcagtctaaacaataaatatttcataatttacaaaggaggaacggaagaaacctattgtgaattccaaatctaaaaaaagaaatatttttaaaatgttcttaagcaaatatatacctattttatctagttacctttcattaacaaccaattttaaccgtgtgtcaagatttggttaagtcttgcctgacagaactcaaagacacgtctatcagcttattccttctctactggaatattggtatagtcaattcttatttgaatatttattctattaaactgagtttaacaatggcaaaatacagtatgtcacagtcatgcacattcaagagagaaaatataacaagttcttttatgagcaatcccttatgcatagactaccttggcaaaagagcattagcaagtgtcactgctcatcagttacttccttccatttatatcacaaatacccaagtttcaattctaacttcatttcatggtatttcttcctcctcaatgcccaaggtaatgtgggactaaagcccagaaatttgaaaagaatattcagaaatccttcccaaatcataagggcacctattgagattcaagacaagcagactcgtaaaatcttgtagaggcagaggcaaagttatcatcatacaaaaatcacaaacaaaaaggagatctgtattcgggtatcaaacggttgatctgttttcagtgcacaccctcaaatgcaccacaccagttttacgatctaagcttttaacccctttaccactttgcttatttttaaaaaatttattggcaaaactggggattttgtttgtaactttggttatctatatttaaacattagctgagacatatttttgataacaagaacttagctagttgagtcctggctttttgttgattattaagctgtgttcactctagaaggtgtaaaggccctgtcccaatctctgctctctcacttctcgtgacatttgttgataatctttactgcaagtgtaatgatatttgagtgaattaaaatgcatgacagacaaggtacaacatggttgcagaataaaagggtgaggacatcagatcactctgtattcaaagcttactagacgaacaatctttcatttctggatatattgtagctaacccaacacatttttaaactatttttgttactgactcacttacttgtcaaaataattggtttttctgtcctgctttgccttttgtcactagaatgttctccagaaaccccagtttctgtcatcttaactgtctagtctagccgttaacttagacaaagaagtgcaaatgtcaatttcactaaacaaaagctattagaagtaaagcagaaacctatcactgcaaggagtgacttgtaaataactgatgatcaagggctgtcttctctcaagcatggttccaactctgtgtcactttttagcgttaatggcagttgtgtgtctgtggcagtgagataatggaccactattaaacctgattctcttcggtgctaggaaagagtgatgtgtgagattcccagagagtcgtcacaccagtgttatgcctgggagtgccactggcataccgcaggtgcctaaatcccaggcccctttctcagggggcgtggccacaccacacactgcgccagtgacacatagttacttcctggctgggacggcacctatagaaactagggtacaaatctcccaaagatggtttgcaccgtcatttcaaatgtttgcacaatataccacttagaggcttaaaatcagggtggttcagttcaaaaggtaatatcaaccgtcagcaaacatgtcagtttaaaaataagttcggttaacaaggaagtgttaagcagattttttgaatacacttacaatatactggcttataatcatttttattctgccatatggtttatttcatatacactcacttttacactcacttccaattatagcattcaataagttacggttaaagaaaagtgaatggtgtttttgtaatttgttttctagtagctagcagagagcctggcacatagtatgtattcaaaacaagtgtgttaattaataaaaatatataaatctcatttgagatttaagaatataaataattttcttttaatctttattttgctcaatatttaataggaagtatgatttcaaggactactaaaggaaggcaatatacatgtgaaaaccataaaatacattttttgcattctactatttttaggggcatgaaatgaatgaaagctttagcacttttttgcccctacatatgagacaacatattttgtatttcactcaaggctctgccagtaaaaagtaatgaaattgtacctttctaatgacatctatgcagcaggggtctatcgccttgtggatggcaccaaattatccaagtgtattaggagactggggcttttttctttaatcccttcttattaatgaagtgcatagtgctgctcccaggagaccactgctgacagatacacagagaagagatcagagaggaaaaactgggaagacataaatgaattatacccagccatgaaacaatgccaactgtctcttccctaaggaagagtacaagtaccctaaaattgaaaggtggtccctacactgaaaacgcacatagtttgtcaaaagtgtacaaaagggaaagagtcttattttaagctttcaggctttcttaaaaacttggggaccagaatttcaatgtatgtttccattgttgaagataacattttcttcaaagagccttaaccttttgtactggaaggaaatattttctgg

SEQ ID NO: 7767 - DNA, 6000 bp, Homo sapiens
ctaatttttgtatttttagtagagatggggttttgccatgttggccaagctggtctcgaactcctgacctcaggtgatccacccgcctcagcctcccaaagtgctgggattacaggcgtgagccactgcgcctggcttggacagcctttttgtacccctgattcccaggagaactgctgctctattttcccatggcttaccttgaaaagagtaggatactagagaaaaggatggctaatcacgtgtttacaagccatgtttcaggagatgacccttgtagcccggatatttatttgcctcaccaaaattcaggttctaggtgtaagccaggatttgggggatggaactgaaaatgcttctccaaacggtgaaaagcgggcccagcgcagaggctgaggaggaaggatcacttgaagccaggagttcgagaccagcctgggcaacatagagagacctccccccacgccctgcccaccaccgccgtctttacaaaaaaattagccaggcatggtggtgggaccacaggggcacaggctgaggtcagaggattgctccagcccaggagttccaggctgcaatgaatggtgataaacccactgcactctttcctgggcaacagagtgagaccctgtcttaaataaaataaaataaataaataaaaaaaaaagaaaagtgaaggcaacgttaataagtgtccactatgacataataataaccagcatcacacacacacacaaatcttgcatatatcacaaaaatctcagtatggtaattctgtggagaaaaaaaaaaagcccatccaggtaagcatagaaagtgttttttcatcatctccctttgactccaaatgaagaagcagagttcccaatagcatgaactagatgttggcagaggaaaaagcgagtcctcgtcctatcctggtgtaaacttctgattctggacaattctcagtaggattggcaatgactcttctaggcctccttgtgattgttgatatattttttttaatttaaagttccggaatacatgtccaggacgtgcaggtttgttacacaggtaaatgtgtgccatggtggtttgctgtaactatcatcccatcacctaggtattaagctccgcatgtattagctatttatcttgatgctcccctcccccggttatcaggatttttaaacagtttgctctaattcactgacaggattcttttagaatgaatctaaaaaagctgggaatctttaacctgagcgcagatcggatcacgtggaacggtgctggtgtttgttaaaaattcagattgccccgaattttcgactcagagggtctgaagtggggctaagatctgcagattaacgggctccgtgggaggctccctgctggtggccagtcccggggtttagctgttcactgttgctactcgtgctaaaccacggtctaacactaccgacactattaatcgccctggtcctcaagacagccgcgaccccagacgggtgaggccctcatcctctagcaccagatggggcctgggaactgctgcttagcagattcagctacccacgtggtcacccggggcaaccacaaggtcgactcaaaagaccaaaataaatgtataacgaatgccaggaccaaagccggaatatatctaatcattcattttgaggtttaaacttaaaaatgttacataaaaaaataagtaacctgccaaaaaatgcagagtggcggcgggggcggggggagaggtggtgaacgcgaggggcagtacttccgggtcaggtgggccggctgtcttgaccttctttgcggctcggccattttgtcccagtcagtccggaggctgcggctgcagaagtaccgcctgcggagtaactgcaaagatgctgtccgtgcgcgttgctgcggccgtggtccgcgcccttcctcggcgggccggactggtgagcaccgaaggccggcatgatgcaggcggccgggtggggctgcagggtggtggtgcgccggctcgggcgctctctgcaggagggcgaggggctgtggcgaatgccgccatcttgcacccgtggcttctccggctggacagagcaggcgacacaggtgcccttttgctcgtcacctgcgcagaggcagaatggtacagggcagacagttaactcgatggtgtccagagacagggcctcaagattcctgtcttcggctgacagcggccctagaagggggatcttgggtgaaggtcagggcttgggcgctagctctccgaggcctgttctgaatcggtgaggttcctctctttcgattcttagggtcgcgtcccgctgaaggtcagaaaactgctgtcagctcttgttgaagctagtcagtggagtctgacattgtgtgaaggtcagcaggcccagcatttcacctctgcctggagctcagtttagaggaaaggaataaatgaaggtggtttttggaatacttacgtaggctttctcttagtgctgaatacgaaacgaccgtgaaaacgtcctgcaggtgcaaagaaccatttcatgtggccagcactgtgacaacagtgaagctggtttctaaattgtctctccggcagagtgtgtgctttgtggcacttggacgtgtttaaagaatttgtccttgagttttccacctggttttgagtaatttttagtgatggagaattcaagtaaaagagaacaaggttggaaaatggctgtaaggattaatacccttcgttatttgtttcccttgaaattaacatgatttcagtgtaaacgcattgacactgacactttttttttgttctaaaagtaatctcaatttgaaaggtgaaataaacatgttggctgttttgctgccttaacaaccgctggtagcatcttgggtttctgttaacaaaaaagcatttttaacggttttcatctagctcctatggaaggtagaggcttcagaattgacagtgaccagtcgcagtattacaacttgaaggagaaactgaaggaagttccaggtggctgcaggatttgttgagagagtaaaataagtccacatgccacaactcttggtttctaatctaactctagcatttattcagtttttgtttgcttgttttttttttttttttttttttttgagatggtgtctcgctcagtcgcccaggctggattgcaatggcgtgatctccgcccactgcaaccaccgcctcccaggatcaagtgattctcccacctcagcctcccgagtagctgggattacaggcacccgccgtcatgccctgctactttttgtagtttttcgtagagacggggtttcaccatgttggctaggctggtcttgaactcctgacgtcaggtgatccgctcgcctcggccttctgaagtgctgggattacaagcatgagccgtcgtgcccggccgcttgttgtcgttgttgttgttgttgtttttaagtaaaattggaactactttgagttttgccccttgtaggaagctgtttatcttagaattcctgcaactccattaaaatacatctaaagtcaaaataataaaaattgggtacctttaaagggaaagacacttacattttgttaacagttgctttttttttttttttttgagacggagttttgcttttgtcgcccaggctggagtgcagtggcgcgatcttggctcaccacaacctctgcctcccaggttcaagcgattctcctgcctcagcttcccgagtagctgggattacaggcatgtgccaccacgcccagctaattttgtatttctagtagagacggggtttctccatgttggtcaggctggtctccaactcccgaccttaggtaatccgcccgccttggcctcccaaagtgctgggattacaggcatgagccaccgtgccctgccaatagttgctttttaaaatactgactgccaggccgggtgcagtggctgacgtctgtaattccagcactttgggaggccaaggtgggtgcatcacctgaagtcaggagttcgagatcaacctggccaacatggcgaaaccctgtctctactaaaaataaaaaaattagccgggcatggtggtggtcgcctgtagtcccagctactcaggaggccgaggcatgagaatcgcttgaacctgggaggtgaaggttgcaatgagccaagatcgtgcccctgcactccagcttgggtgacagaatgagactccgtctcagaaggaaaaaaaaaatgtgtgtgtatatatatatttactgcccagtaaatatatatttatttactgcccagtctgggcaatatgatgaaatcctgtctctataaaaaaaataagtacaaaaattagcctggccaggtggcgcactcctgtgatcccacctactggggaggctgaggtgggaggatcacctgagcccaggaagtcgaggctgtagtgagccgtgattgagccactgcactccgacctgggtgacaagagtgagaccctgtcccaaaaaagaaaaaaaaataagccgggtgcggtgctcacgcctatagttctagcactttgggaggccaaggcgggtggatcacttgaggtcaggagttcgagaccagcctggccagcatggtgaaaccccgtctctactaaaaatataaaaaattaacctggtggaggtggcgcacccctgtagtcccagctactcgggaggctgagaatcgcttgagactaggaggtggaggatgcagtgagccgtctcaaaaaaacaataataataaagtacagactgcattttaaaaatatgcgagtgtttactgtgtactaggagctgtataaaaggttttcacatatatcaaaagctactttcccatttgacattttaaacaaaatgctttatatgtaattagcattttcaccagtactttgatcacactaagctggcatttgtttaagcttgtaagttttataaaggctttgttaaaaatcaaatttttaagaatacttttgcactaggtctccagaaatgctttgggttcatctttcattgctgcaaggaacttccatgcctctaacactcatcttcaaaagactggtaagttattatttctcagtctacgccgcacttactagatgaagatataaattacatacatcgtataactgtggtgagttgtttttcatttgttagttttttctctagtttgtatagactctcaggttcttaaaccatattgttaccatttagccctgtcatggttctcttgttatagtcaaatgaactactgttacatatttttcttttgatattagtatggcttctttgttctggtaatggcccttgggtagaaacagaaagaacatacactaggtaatggaatctttgtgacctctggaagacttcctttttccttttctaaaaggcattagaaaaaatgtaagttcttattgataggttttcttattcgttttctttttttttgagacagaatcttgctctgtcgccaggctggagtgcagtggcaagatctcggctcactgcaacctctgtctcctgagttcaagcaattctactgcctcagtctcctgactagctgggattacaggcatgcaccaccatgcccggctaattttttgtattttagtagagacaaggtttcaccatgttggccaggatggtctcgatctcctgaccttgtgatatgcctgcctcggcctcccaaagtgctgggattaaaggcgtgagccactgcaccggtccactgataggttttattttttcaaaggcagtagctactagatatttggcaatctgtgaacttgcacattacagatgcagtagagaagtggggaggcaagcataggaagacactataagttggggaatttctttggagatgagtatttggacttttaaaataaaggttaaatatatatgtgtgtgagagtgtgtgtgtatatgtgtgtgtgtgtgtgtgtgtgtatgtgtacacacacccccacgttcagcatatatgtttttcttttttcttttttttttga

SEQ ID NO: 7768 - DNA, 6000 bp, Homo sapiens
tagctggaggtcctgaaggggcccaccatgccattctggttgttattccctttattgtaatacacctccatagagttcattgagaggtagaaaagagaaacctgttagtgggagcattggttgtaatctatgtttttgattatcaatgacatgatcctaaaattatacccaaatatctctcacaggttctgaaattgagtttctgaaaaagcactgtagtagtaataaaaggtaaagtgcagagttccaaagaaatgagctgtgaattgaacctgcaatggaaattgatcctatcagtcagtttttgcccttgttcatagaaaaataggactgaatgtagaaggagccaggatcactgattaaataggatgctgaagtgctggaggctagaagtgggcttgctcgtcccttaggtcagacttctctgctggaaacctggctcaagctggcagaaaaagaacagaatgaaaaatgctgcaggcatcagtgggagagtcggtaagagctcactgactgagcttcctgcgtgacagccagtgcacttctccatagggaggccattctcatctcttatcatgagtcagtgggcccacagtggacccactggcctcatgattcatgccaacggggcctgtcatgataccctttcagggaagcagggaggcatcagtgtggccagagggtgtgagtgtgaagaaaaatggctttgctatcaattccattctcagtagcatcctcaggattgtgaggaaagaggacaaatttcctacaactagtggtcctatgaataccatttattacccttttatctaactgtaagagatctatattgtgcacatagaatgcttgtaatgctgtgccatgttttggggggacagtgtttgtattctactcccagaaatgcagtgtgagttgcaattagcctaccaaaattacacatttctggttatgaagttgccatttgtttcctacagtgtaatatatttctacagtgatgcccttcagagtgttcagtgatcatcagtataactcactagagtaaatgtccctgtggaatgcctcattcacagttagtagcacactaatggaaatcgctctgtagaaacattgaaaacaaaggtattataaaacactaacttgagatgtaattattataaatccatttctggatcagaatttaattttgcaaaatggcagaaaaaaaagtaaaaacaaagaagcattgaaatcaggcaatttgcttagtatgagaattgtaaaagaattgtatgagaattagtaaaagaattgtcagatttccttagtcattggtcatagcctatcaacactatcattaaagaaggctgctgtcataggtacatggtagcacatggcatttcctttatgttattgtatgtatctgcttttccagccatttccccatccctcttaactttgcgtttggaccctggtaagagaaaatgacagtactccatctgaagtggaccatgtccctgtgtcatggtattgatttaacttatcctgtaagcttttgacaaatgagaatcagagtcaaagaggccttcatccctatcctatgttgacgtgacccttcctacccccattgatattgaccctgccacgttgatagcaacacattagtaggcacagcagaactacagaccatagtcaaaggctcacagagggcacaaaggaaaatactctgcaaaagcttccgtaagatagttttgctttggttaactgtagttatgcttcaacgtaaagatgcaaaaaagtgagtgtcaccctcttttcatctaagatttagacctcatacagcctctgtctcctgtctgattaccactcatgacaataggcaatttagagcctttgtcatagaaatgattgttttgtgttaggcttagctgtagtacttggcaaatgtatgggaaatgtgagacataattttaccatgatggaattctaaaaggtgctcacagagaaagggagcatgcaaaaatacttgaccggtacacagacagaagcctttgttttcagtcctgaattttaatttaagtatatattttcttggataaggaatactgaatgatgcagacttatttatgcagtgaaaaatagttttccattgaaattaagttagaactgtacttcttgtttaaactaatatctgaagcctttagtcattttattagtcagtaaaattgatgaaaaccttaggaaaatgcgttagaacagtcctgtgatgaataggaggcctgggattaataaggaaaagggcaaagggacacatgttgatctgtgtatgtatagagatctggagcttattagaagtttttatgaacattcaactaatgaagcattatataaaattagacatttccgttaagttgtaaaagttactagtctagggaaaaaaaccttcaatgttatttctaaataatttatttatgacattttcccaacagtagtaatttaaatatgaaaaattaattttgtaatagggaacattccatgagaatgccactcacgatttcttggaggagttttcatctttggttcttagatttattacaggacagagtagcatgaatgatctttattaatcccattttatgattgcagcagatatctggtaaatgctacgttgcatatttaacattattccattttaaacattttcatttgtcagaggttgcaggtaaaaaggggggattttaagttctctctgtggcataattgatggagaaaacagacacaaagaatttatgcacaaataggaatcaagaagggaacttcaacaatagtctagacaagtttgcagcaccctgaaatgcaggccaggctctctggtacagctgaactggggaatgtggccttgaccctctcgtctatagaattagcaggaaaagggggaagaattcctctcagcacttttgtctcaagtttaaattcattggatctttattatattgtacattctttggtcatgttttaggtgaagtcttagtatctttaatatcctgatttcttcttatttgattctctttagtttggtagagaaaacagtggagtggggacagcatgatttgtagttgtcaggtctaaatttgaatgccacagcaaaccctgaccctgatcaagttattgagcctaccttggtcacaatttttatgtctatatattagaaataaaaatatttacaggattattttgaggaataggaaatttatagaaagcaactcacacatagtaagtgtgcaataaactgtagcttttatatctcaagtttattgtcccttctcaattgtagatctctttacattcatatttggtgagcacacttcagacaaacaaaaatcaaaattatgaatcaaatgacctatgggtgtataacacaaaacattttaggttaggcttttcctaaaaccctgaatgctgaattttttgtagtagtgcatggtacattataagtgcttggtaaatgttatttatgtagtagtatttattttcatcattatttcataaacaaatttaagctttctctgcatatattttgttttaaattatgcaaaaatgcttatattctctccatgtcatttagatttctaagcttgaaactgtacctggagcttgggctaaaataagattactaaaaaattgtcatgaacaggcaagaattactttagcattgattgtgtggaattctattcagattgaaatccaaaaatacctgctctgctcagaagtttatgttctcttactatattatttcatgtataattctcaagcttttactcttgttttccaattacatgattataaattaatgtttaaagataaaacacatgtatcagtattaagattggtttattttggccgggtgtggtggcacacgcctgtagtcccagcactttgggaggccaaggcaggcggatcacgaggtcaggagatcaagaccatcctgactaacatggtgaaaccctgtctcgactagaaatacacacacacacaaaaaaattagccagaggtggtgacaggtgcctgtagtcccagctacttgggaggctgaggcaggagaatggcatgaacccaggaggtggagcttgcagtgagccaagatcacaccactgcactccagcctgggtgacagtgtgagactccgtctcaaaaaaaaaaaaaaaaaaaaaaaaagcagattggtttattttatcagagacccagagaaaaagaggcttaagtaagatagcatttaatttttcctaatgacaagtttggaagtaggaaggtcagggctggtatggtagttcagtgatatcagagaccctggctcctccttcatcattgctttgaattcttaacatttaagtgtctcatggttcaccatggctgcctgagctccaaacatcatatcctccatccagctaataggaaataagaaggaccaaagatggtgagcccctgccttttaagaacacctctcagaaactattttggacatttcatcttatatgccattcatcagaacttaggcacatggccacatccatctgcagaaaataatggaaactttcatctttattctgggtagccaaatgcctagccaagatttagggatttattatccaggaagaagaggagaccaggtggtggggacaactgggaatatctgtgacctttgggattgacctgagcctttatctttcttctctctcatgttttcttttgtcttcttttctaaatagatcccatgcgaggcccaagaaaactagaagtagtggaggtcaaatctcggcaaatcactatccgctgggagccatttggatataatgtaactcgttgccacagttataatctcactgtccactactgttaccaagttggaggacaagaacaagtgcgagaagaagtaagctgggatacagaaaactcacaccctcaacacacgatcactaacctgtcaccatacaccaatgtcagtgtgaaactgatcctcatgaacccagagggccggaaggaaagccaagaactcatagtgcagacagatgaagaccgtgagtacctttgaatgatatgtttgtgtaaaacatgttctttcaaaaaacaacttttgtttcgagatctttgctgtgcagatggaagaaagaactacttattttgttgaacaacacaaatgtgtatctgtactctgtattcttaagcgctgattgaaagagggaaaagggagtagagatatagaaatgtcattctttattactcatacagttacttttctatatataatcattccatattgctctcaatagttcttcaagttttatttcattgggctgaaaaattgttgttttgggtattagattatttatataaaatcattggactgaaaaattgttgttttgggtattagattatttatataaaatgtttacctaaatatatttaaatggcattctgaaacatttttcatagttcagataaaatttcagcactaaataggggctgcccttgcttttcaacacagtcttgagaaactgtaagttggtggtcatgaaacaggtcatttttctccacaggaacaatgttgaaaccggatgttactttaataaacaactactttacaaataaaccatgcatgtcaccagtaacgcatcaaaaaagcaaatatacaggaaacctccatagtaatttaaaacagtaaaattatgccttgaatctcaatgcgtggatataaatgtttctttacacagatgacacagggaacccttgtgtgtaatgacatattcatatagtacataaaatacaatggtagtatatcataaatttgacctaaaaatcatttttccggcatcaaaatgaatgacaaagaatgtaggaagaccattaaacgaatgaactgactattcctaagaaaaatagttgtttagctttttgtttcttcatgtaactgataatgtaattttgaccattgattaaattgtgagttgaatgtttagactactttat

SEQ ID NO: 7769 - DNA, 6000 bp, Homo sapiens
ttctgtggacatctgttactgttgaacaaggaaactcaaccagtggtctgtgttcagaatccgtgttaggcgtgtagcatcttggaagccccaaagcatcctattaattttctaagaatgctactattcctgcgggttttatttttctaaactttctgttttaacagttcttccagaattcattttcttcttagcctcccctttccagcccactcctccccaacccctaaaaacgaaacccaaaccccaggtgtctttcctttctgtggatgctgggctccacgcaccacagccacctccctgccctgccacgtgaaaacaggctgtgggtgtttagtggaattctcctgtttaaaatgactgagagggtgtgggaggacaggtgggggggggggggttgccacacaccccctcgtgagcttgaaagggggtcatggagggagagggcatctcaatgcagggctcagggtctgggaatcctcacacacgtttccaagaacctgttgactgcagttttcactttgaggatctcctgggccctgcctggggaggctttgtggccctgaagagagtacaatgctcatcttttctgttgctagtgttctggctcctgtgacttaaagacgagaaggaggtctgtttccactgatgggttttgcccagagtccccagagcaaggctctgccgcgtgtgtgggccccgcaccagaccctgacgccctcaggggagggcttcgggagcacccaccggccaccgtcacctgcagccagggaccaagctgctgcagtgagatgaccaggctgtgaggatggtggtctctgggacccaggtatccctgggtctttgttgcctgcaggaagagctgcctcctgtgcccagggctgagtgccttcatggctcaggcctcatcaggctgccgccaccccagggcaccccacggggccactcgattcggtttgcaggctcctgaggacagtgttcctgctcccacagcctctgagcatgcccatgaacttgacctgccccaggcaccatgccactagggtgcccgtgaacccccagggccgacgctcatccatgtgctgtagatgcacctgccacggctgggcatgactcatatttggagcctcagggcaacagcatggtgcaggtgtcccagcagggcagggcggtacctgtgtgtggcaggtttataagaaagcagtccccttaaaaagaaagatggtggggcctttactttttttttttttttaagagacagggtctcgctatattgcccaggctgatcttgaactcctggtcttaaacaattcccccgtcttggtctcccaaagtgctgagattccaggcacgcctggcctggagtttagttttacagagagtaattccatgcactgtttcatacaactgagatctttcttatccttgcctgaattttaaaatcagatatattagctcagaagatgcacacctttcagtcaatatcacatgttccatgtgctgtgtcagaccaaaagaggaataaaatccagagcaaataaagatctaacataaaattcaaactccaaaaatcttaggaaaaaaatatgtttagaatattaaagaggaccttcccaatcaaacaggatgtttagaggccataaaggaaaaagagagtatttgatggcataaaagtttatagcatctatagagaaactcatggtgaagtttcaagaaatgactggctaggggaaatagttgcaacatgtaacagacaaagatgtgtaaccataatatgtaaagatttcatataaatacataagaaataaatgagaaaactataaatacaccaatatgattatgaaaaagagaaacacaaattaccataaccatagggaaagatctgaaattaccagtaattggagaaatacaaattaaaatgagatacatatttttgccatcagattgtcaccagttaaaagggcgagtctccagggtgaatgagggcatggggaacatgccttcttcctgggacagcctaaacgaatgcagcctttacaaaaggcaggttctcagtagccatgaggatgaaaagtgattatgccctgggtccagaaatgtcacttttaggagtctttcctacaagtatactgacaaacgtgtgccagccacacacttgcacatatacacatgcaattttgtggtcataagagaaaaaagaaaaaaagcaagccacctgaacagccaccagctggagaaggcaaatgccagtatgtttgtactctgtaacagacaggccagtgcacgtgtgttcttgtttaaagaggtctgtgatgtattaagtgaaaagacacaaacaagatatttgcacatcgattccaataactgaaaaaaggaaaggctttattttgtagcaaacacacacacatgcaacggaggcctgggctttcccccgggacggagtggggcttggtggagtcaggggcgctgtgggttgggatgggagactttacactgcactgtttccttctatatgatttaaattttcaagaagttttcattatttttataataaaaatccttttcaaatgaaacacaaatatgtaaaaaatgcccagagacttgtgaaaacataatttgatttgctttgctgcaaatgcttgtctgcatagctttccatagtcaagaacagatgacctagaaaggtgtcctccaagggaagagttgattcattgcaggactttgtgctgatccttccctgtcaccatgattttcctctatatccatgtccataaagcagtgaagttctcttgtaaagaaaacatttggaaatcctagggcatgctttaatttgtgaatactccgctatttaaccacaaaataaaaacaagcattggtaaaagaaggcattattcaggtcacaatagaaatgtgaccttatttctgctcacaggccatgggaagtatgacatgcttgtttacctaggaacacagtcttcgacttcggggttcagccctcaccactgtgttcactgcctttgtcctgagcggagtctctctgcttcctttcatgcttatccctgggctggtggctgacccctgcacagaccctcagggctgctggaggcgcactcgggcactctgcagccagtgcagccttatcctgttggcagtggctgtcctcacagagaacacacccatgcagctgggcagagcccaccggggccacacatcccagccccttctctcagcctgggggtgctgagtcgctcatcaattcaccttgtaccagttaagccacttagctgcctcccgtgtcaagaggggcaaagtaggggctccggactcagcctgggagacgtcacatggtgtgtgggggtagggtcctgagaaacacagggtcaaggccagagtgtcccagacacaggaaggttatgtgcaggggcagagtcgaagactgtgttcctaggtaaacaagcgtgtcatacttcccatggcctgtgagcagaaataaggccacttttctattggaacccaattgcaaagggcccaagcccctgctcgaagactcagagcaatttcagtcttttccaggaagcccccaacatgaaaattgttgataagccctggggagcgtttttgtgtgtgtgtgggtgggggggtggggccgggggggggcgggggtggcacatataagtgtggcagctccaatggacatttcctccccataggaagtagacactcaaaccccaaggctgggccgggcaccaggcccctagagtccctgccacttagcggacaggccacggggaacccaagagcaacagcacccccttggctggggcggggccggcaggcctcactgactgccagcttcgggagctgctcagggcatggcctctgagcctctgagcatggctttgtccgtgtccacagggaacagtgatgttcccaccagcctggcctctccctgcctgcgggggcagggggcccttggcaggtccacctgctctctgcacagctcagccaccagcctcctacacagtctgctcttcattctcaagacaccagcgcctctcctataggccccagtgtcccactgccctccactcccaccctcagtccctagggtgtgggggtctgagggtggaagtggagggccgtgctgaagggtaggacatgtggggatccagagaacccctcgtccagcctcaccctcggttcccagggtgtgggcagcagacgcacacagtcgtagccactggggaggcaccacctgatctctgcctgcatcgccccacgtatgagcggatacacttgacagatatgcctccccactggccggggcctgagccctgctgcggcacatgtacgtgcatgcatgtgtgtgcatgtgtgctgtgagcccagggcagcacagttgatggcttctctcttcttactcctgcctcccccagattcctgcactgtcttcctcttagcatccccgagccccttgctctgaatttacatcactgcacggtcagtcacttccttccagcacgggggacaaggagtgaagcaggcagcagagccatgggctggaagaggggagcagaaagtggctccaggccgcccgtgagccctcgacctgcttcctctcccaaaacgggggtctggctcacctgcttccagctgccggcccaatgtgctgtgactggaagtcactctgtgttgctggactcacatgtgaagtgtgtgtcaatggcatttaaggaatctttggggtggtggtgtcagaaacccaggggagacctgaccactcctaaagtgctgtgcctgaaggcctggaaacaatgtggatgtttcctaactcacctgcagagccacagccttggaggcaaggggctgaagttgatttttcctttcaagtatgggtccctaggggaattgctttgagaaactccactcaaccataaagacgggtttaacttttctagagcggtgacattggagaaatagcttcagtttgtggagacgttctcagctccctgtggtgggggatggcagaggcttcccgctccccgcagctggtttgcacagcctcccgactgtgccgtggtgtctccttccctaaagtgggacagtcgtttctgtgtcctgctggcctctgaggaacagacgtgtgtgagaggccttcagggcctgatggctggggtggtgacagtgcctggagaatgggtggggactggaggggccaggtggctaaccactctcctcttccatggcagcggagctggagttcgcccaaatcatcatcatcgtcgtggtggtcacggtgatggtggtggtcatcgtctgcctgctgaaccactacaaagtctccacgcggtccttcatcaaccgcccgaaccagagccggaggcgggaggacgggctgccgcaggtgagtaccctggccgccccggctccagagtcaggcagctgcaagaggcttaggagcccatcagggttcagaggccgggagtgctttcagttgacatgtaacaaacggggcgaagcgcacctcgtaagtgttccacttagtgagtccccacaaactgaacacaccagtgtgaccagcacccagtgaacatacagacacagcagtccccccagaagcctgcgtgacccctcccaggtctcccctggatctttgctgcccgacgtggctttgccagcttctgagctgtgcacgaacgggaccggccctgggtggtccctcgtgcctggctcctctggcttggcagtgcacttgtgagattcattgtgttgtaaaatcctgtcctgagctgggtcctggaggtgctgcggggacaaatcacgcgctcatcgtcactaaacgtgccggcagcacatgggtgccatgagctggaggacgcctggagcttaaggcctcgggagcttcctggggatcggcggtggggttgttggcggtgggcttgtcagcggtgggcttgtcggcggtagggttgtcggcggtgggttgtggagggtggggtt

SEQ ID NO: 7770 - DNA, 6000 bp, Homo sapiens
gagattgagaccatcctggctaacacagtgaaaccccatctctactaaaaatacaaaaaattagccaggcgtggtggcgggcacctgtagtcccagctactcaggaggctgaggcaggagaatggcgtgaacccgggaggcagagcttgcagtgagtggcgatcgcccactgcactccagcctaggtgacagagcaagactccgtctcaaaattaataataataataataataataataatttccatttattgaaatcctatggaattgctacttctcaactagccataaactcatattttttcaccaagccatcgtgagaaccgcatagatgaaagctatctgcacagtaatgaacacgaggttttcatttaaatcaaatcaccaaattttggaagcctggaatggagcagattactacgagctaaaaactatcaagtactttacaagtattgttgcatttaatccttttaccccgtgaggtttgtattattataatccccactttacagatgaggaaattaagacttggaaagttacgtaactgatacaagcactcataactctgctaagtggtggagctgggttggttttgatcatgcttacctgaataacggaatccccaaaagataaaaactgtgttatgatcatgattgtgcaggaaaccagtgtaaaatggcaatattgagaaaataagagaaggactctccagaaattttttttttattttagttaaagaattcttagtgcgcttaatttgtagtaccaccaaagaggatctatctttacattaacgattatcataagatggaaagaacataattaatgaaaagaggataggagatgaaacagttctttttgttttctgttcaaatgcagtttaataatttatggatctctgatgaggctttggtgtgttttcttatttcctctccaattcccctctttttgatgcatgacacaaatacactcttaatttaacccagctagattctacattcatgagctgctcaatggaatagcttttctctacttacactctatcctcttccatcttttccttagatatattgggttgggcccatcataggagctgtcctcgctggtggcctttatgagtatgtcttctgtccagatgttgaattcaaacgtcgttttaaagaagccttcagcaaagctgcccagcaaacaaaaggaagctacatggaggtggaggacaacaggagtcaggtagagacggatgacctgattctaaaacctggagtggtgcatgtgattgacgttgaccggggagaggagaagaaggggaaagaccaatctggagaggtattgtcttcagtatgactagaagatcgcactgaaagcagacaagactccttagaactgtcctcagatttccttccacccattaaggaaacagatttgttataaattagaaatgtgcaggtttgttgtttcatgtcatattactcagtctaaacaataaatatttcataatttacaaaggaggaacggaagaaacctattgtgaattccaaatctaaaaaaagaaatatttttaaaatgttcttaagcaaatatatacctattttatctagttacctttcattaacaaccaattttaaccgtgtgtcaagatttggttaagtcttgcctgacagaactcaaagacacgtctatcagcttattccttctctactggaatattggtatagtcaattcttatttgaatatttattctattaaactgagtttaacaatggcaaaatacagtatgtcacagtcatgcacattcaagagagaaaatataacaagttcttttatgagcaatcccttatgcatagactaccttggcaaaagagcattagcaagtgtcactgctcatcagttacttccttccatttatatcacaaatacccaagtttcaattctaacttcatttcatggtatttcttcctcctcaatgcccaaggtaatgtgggactaaagcccagaaatttgaaaagaatattcagaaatccttcccaaatcataagggcacctattgagattcaagacaagcagactcgtaaaatcttgtagaggcagaggcaaagttatcatcatacaaaaatcacaaacaaaaaggagatctgtattcgggtatcaaacggttgatctgttttcagtgcacaccctcaaatgcaccacaccagttttacgatctaagcttttaacccctttaccactttgcttatttttaaaaaatttattggcaaaactggggattttgtttgtaactttggttatctatatttaaacattagctgagacatatttttgataacaagaacttagctagttgagtcctggctttttgttgattattaagctgtgttcactctagaaggtgtaaaggccctgtcccaatctctgctctctcacttctcgtgacatttgttgataatctttactgcaagtgtaatgatatttgagtgaattaaaatgcatgacagacaaggtacaacatggttgcagaataaaagggtgaggacatcagatcactctgtattcaaagcttactagacgaacaatctttcatttctggatatattgtagctaacccaacacatttttaaactatttttgttactgactcacttacttgtcaaaataattggtttttctgtcctgctttgccttttgtcactagaatgttctccagaaaccccagtttctgtcatcttaactgtctagtctagccgttaacttagacaaagaagtgcaaatgtcaatttcactaaacaaaagctattagaagtaaagcagaaacctatcactgcaaggagtgacttgtaaataactgatgatcaagggctgtcttctctcaagcatggttccaactctgtgtcactttttagcgttaatggcagttgtgtgtctgtggcagtgagataatggaccactattaaacctgattctcttcggtgctaggaaagagtgatgtgtgagattcccagagagtcgtcacaccagtgttatgcctgggagtgccactggcataccgcaggtgcctaaatcccaggcccctttctcagggggcgtggccacaccacacactgcgccagtgacacatagttacttcctggctgggacggcacctatagaaactagggtacaaatctcccaaagatggtttgcaccgtcatttcaaatgtttgcacaatataccacttagaggcttaaaatcagggtggttcagttcaaaaggtaatatcaaccgtcagcaaacatgtcagtttaaaaataagttcggttaacaaggaagtgttaagcagattttttgaatacacttacaatatactggcttataatcatttttattctgccatatggtttatttcatatacactcacttttacactcacttccaattatagcattcaataagttacggttaaagaaaagtgaatggtgtttttgtaatttgttttctagtagctagcagagagcctggcacatagtatgtattcaaaacaagtgtgttaattaataaaaatatataaatctcatttgagatttaagaatataaataattttcttttaatctttattttgctcaatatttaataggaagtatgatttcaaggactactaaaggaaggcaatatacatgtgaaaaccataaaatacattttttgcattctactatttttaggggcatgaaatgaatgaaagctttagcacttttttgcccctacatatgagacaacatattttgtatttcactcaaggctctgccagtaaaaagtaatgaaattgtacctttctaatgacatctatgcagcaggggtctatcgccttgtggatggcaccaaattatccaagtgtattaggagactggggcttttttctttaatcccttcttattaatgaagtgcatagtgctgctcccaggagaccactgctgacagatacacagagaagagatcagagaggaaaaactgggaagacataaatgaattatacccagccatgaaacaatgccaactgtctcttccctaaggaagagtacaagtaccctaaaattgaaaggtggtccctacactgaaaacgcacatagtttgtcaaaagtgtacaaaagggaaagagtcttattttaagctttcaggctttcttaaaaacttggggaccagaatttcaatgtatgtttccattgttgaagataacattttcttcaaagagccttaaccttttgtactggaaggaaatattttctggacttaagtagttgcctaaatttaagattcctacactttatttctgccattgatgcttttcctaaacccttatactatctttttattatctgagccttttcctaatgcagctcataggtgctagctagagctgctgctcagtattgaagactttacaaggagattagaaatctttggaaaacatatgtgatgaaattgagctatatgatttatcagagatctgattccaaagagcacagaatactgttctcagaccatgaaaccagacaacacatgtattggtttaaactcgataatgacaggaaaattccaaactagagcagtaaattcaaatggtaagatgaatcctagaaggcctctgattgcagcatgttgacaccaacctcacgttacgaacaattcacagagaatttgcctttgtggcaactgaagatggaagtctggggggcacagacaaccttatcaaacaatataaaagccaatataaattctcataagcactatagaatttgcaaattcagaacattttatacctaaaagtaattctgtctttcctaaagtgtttttaacatgaaaattagtaggaagatgtggttactatttggaaagtgtaatgtaacaaaactctcttttgttaccacaaattttgtgagtttagtactctacagattgccccataagagcagtagcttttgaaactcataattctctgaaataaatgaaagacatttaattcaaggatcaaaaattgtggccatctttgcaaatgactacctatagcctgtgaaaatacatttcaaaaaatgttatgtgcaatgaacactaaatttaagagcagttacagtgtgactcactcatgtttaaaaaaaatcgaagagctaaaaaatacgtctaatttatgtaacccattggaatgtatttctaggttctcttcaggattaattaaataaacatgcaatttatgaaaacatataaacaattatttatcacttttatgacccaaatcacaataaaattgtcatttaggataaactggggagaatagactgaacatatggttatattcacagttatttattaacttaaatgttattccaacattagagctaatgttaaaaagatttaaactgtaacgtctaatatttggaataatatattaaagtattagcactgtggttgattttcttgaattatgttgcatcttgtactactaagcttgtgaaaataaacatttggatgttttaaaaggtaaacattatgtttgatgaagttaaaaattcatttgtagttagatcttaagttcatcctttagaatgatcagcaggtttagatatttgagtataatcaacaccaaaggaaatggtggtaagcccatgaaatcaaatgcattttttgaaagcctgcagagtatacaccatgggatgccctgatagagatagtgaaaattgtgtttgtacaggcttaattcaaaatgtccgcatctatgcaaaataaaccattggttatcagctatcattatggtgaatctaaaagtgaagacacaaacaactgcgactggtattgctaaataaatgatccatcctcaggccatttggcagattccgcctacccagatggataatgtaggctcaatgagtactggtttaactccctgggttcttggtttgaggggcttctcaattttgagaggttatacactctcagtggaagactaaggacaattatatatgtagtgtgcaacc

SEQ ID NO: 7771 - DNA, 6000 bp, Homo sapiens
ccaaaatgctgggatcacaagcgtaaaccaccgcacccagcaatttttttttttttcgagatggagtctcgctcttgtcgcccaggctgaagtacagtggcatgacctcggctcactgcaacccctgcctcctgggtttaagtgattctcctgcctcagcctcccaagtagctgggattacaggcacccaccactacacccgactaatttttgtattttcaatagagtcagagtttcaccatgttggccagactggtcttgaactcctgacctcaggtgatccactcaccttggccttgcaaagttctgggattacaggcatgagccaccgtgcctggcctaaagttttttttgttttgtttttgttgttgttgttgttttttaccccatccactgcctccctatgtgacctcatgacatcaagaaaacagtgcatggtgcagataatctctgctgaggtttgtagtcatggtgactgcctcggtgggaagctgactgccatgctgggctaatgttttaatagcgcagatagtctttatgcagtggcgggccattggtctgtgtagcacctggggttcttctgaaaccaagtagccagagccagagaagaacttgcctgtaaggagactcttggttaatgcagcgcccaaccttaagagaaagctcctgaagaaatctggaattaacacaacattgcttaagctgcccccattcctcagcctttccattcaaaacaccacctttggaatactgtttaaaaaaataaggaaatgtcaatgaacttgttgtctttaaaggaatatcttaaaagagataatggaaattaggctgggcgtggtggctcaggcctgtaatcctagcactttgggaggccgaggcgggtggatcacttgaggtcaggagttcgagacaaacctggccaacatggtgaaaccccgtctctactaaaaatacaaaaattagccaggcatggtggcacatgcctgtagtcccagctactcaggaggctgaggcaggagaatcgcttgaacccgggaggcggaggttgcagtgagccaagatcatgccactgcactccagcctgggcaacagagcaagactccgtctcaacaacaaaaaaaaaaaaaaaaagagagagagaggtaatggaaatttatccccctttaactgtgcataacaacagcaagtaaccattacctgtgatgagaagagctacctgtttgctgaagcttatttaaggcactatgctaaggaattctcataaatggtatttgagcctcatgacaacctctttttacaaataagggaactgaggctgggagaaactaaatgagctgcctgagatcacagtttggaaagtggcagaagctgagctcggtggcacacacctgtagtcccagctatccgggaggctgaggtgggaggatgtgtttgaggccaggagttcaatgctatgagcacatttatgaaaatgtgctgctctccagcctgggcaacatagactttgtctcttaaaaaataataaatgaaaatgttttaaatttaaaaatgaaaagcatggccagaattctagcctatgcaatggctacctacctcagagacttcttacccttacagatgtatacctatgctgatagtggtagcctccatctgtataatattaaattgtcatcagataattcttgttaccttttttgttactgcctttgttccagggagaaaataagagaataaaaacatgcttgcaaggcagtgcacatacaagaggcctctgaaagctgctgccagacctgtgtgcccccagagcaggtgccctctcgtaagcatcctggggcaggtataacagcccctgataagtcctgctcagtgcgatgtgggtctcaaggaactggtccttataatggtcaaacatgagtgatttgagagtaacgtaacttaaaaagtaaactagaattcattcaaagtgatccctagagtaatgtccctctaacccactggcattccaggatgctttcttgagtttcttgggtttagagtgactccatgagccctgggaactgtgcagagcccctgtctcccagcccttggggacatgcagcaccagtatctgttggacatgtgcacatctgctcacatgttgcaatggaagaggactgagacccgctgcaaggaagtattccgtacatgtatagtgaggtcattaatgaacagctgggtgaatggctgcctcccttttggttgttattacaaggaaatagcctacaagacagggaatgcatttcagcctgtatgaagttattaacaaagttttgttcctattgcttaaaattctgtgaactactttaagtattatcttatttcacagcttattttgagtgatacaacaatgtaagcattagccaagaacatcagtgccttcattgttgattaaaattggccccataatgagtatgcgggaatgctgccatctgagcggcagccagctgtgtagtgagcccccttctccctgaaaatgttctccatagcatgtggggtgagtgaagagacccccaacctagacaagggagacacatctttgtactcagctatctgcactctctcagttggcacaagccccttggaggacaccagtcacagagtcacaccctcgtttgacagagatggagcaggagccagcaggcttcatcagcagcatgagaggtttaagggctaaggacggtgaccttgccaacaatcagcgtgtgacagccttggtggaatgaccagagaaggctgtggagcgagcatcagctaatggtacggggtggttgggattcagcctttctagaactccggtcagtcttcccatctgggttttctgggtagcagcctggggcacagagctggaatgccagccttctcgggttttggcctcaagctcttccaccacagcatgttgtagttataatgtccccatgtactgtgtgggtgaaaggcctgggaaaaaaagtttcctataaaagtaaataaattggggcagggggcaattgtcagtaaatagttaaataaattattatgtagtcataatttttgttatattattatacctcaataaagctggaaaaaactggtggtgatagaggaaagtgcttatgttatactctgtgaagaagagaatacacaactctggccacattatggttacaactgtataaatttaatatatgcaaatgaacaagcattagaaaagcacttaaagaaagaaactggcaaggtgcggtggctcacgcctgtaatcccagcactttgggaggccgaggcgggtgaatcacaaggtcaggagatcgagaggatcctggctaatatggtgaaaccgcgtctctactaacagtacaaaaaaaacaaaattagctgggtgtggtggcgggcgcctgtagtcccatctactcggtaggctgaggcgggagaatggcgtgaacccgggaggcggagcttgcagtgagccgagatcccgcccctgcactccagcctgggcaacagagcgagattccatctcaaaaaaaaaaaaaaaaaatgaaatccgttcaagtattaggatgatgggactgtagatgcatttcctcccattttagatttttaattttgctgttacattcctgcaaaaaacaaaagccaggcaggaaaagttcccatctccaggccatcccgtctggcagatgtcccaaggcaggaatggcctgaactcctctctaccagtggccaactctcctgctccaggcttggttctcaggctttgagaacctcagggcagaacacctttttccaccccagcaagcaaaatgaataggtaacaattgtgcccttgttttgagcaacaggagcagatgggacctacactggtgggctggcctgggaaaggtccagggctggcttggcccgggcagcaaggctgaggaaggtggtgtggcggggaggagaccccagggctgcaggcatgccctgcgttaccctctgcacccctttcctggcctcaggaactctctgtgggatgcgttagaagacctgccgacaggccggataaggccaatgagagagggaacggagaagaggggcacctgggttcacaggccttaagaaagaatttagttacttatttaacaaattaaacaatgtgtgtcacgcatgtaggtctgggaaatgcattattaaaaacacacagtgcagaggtgcagcaccagcatacgggtggatttgggactctaaaatggctttggttgtgtgtggtacaagggagaatgtatacatgtattacgtgtgtagttttttaaagtacacatatagaggaaaagatgagacaagtctgatgagatgtcaacagcaacaattcttagttgtgggtgctgtgaatttcccagagaggaggagagtcctttagctgggcatggtgatttcagcactttagcaggctgaggcaggatcacttgagcccaggagttcaagatcagcttgggcagcatagcgagatccccatctcaatagatggattagatggatggataggtaaatagagagagagagagatacagatatttagatagatagcctagattgcttgatgaatggataagttggataggcagagacaaatggatagagatagattagaaggatagatggatagattagatggatgaatgaatagagagaaacagattagacagagatagatggatccatcgattgattagataggttaagatagtccttgcattcaggcaagccacagcaggtgccgcctagggcagcggcctctgcccagacactcagtgctgcagaacaggagggaggccggggcctgtggcgggcgagggaaatgcggggcccgaggactggggtgagggagagaggcggcggcccagaggagcagcaggcgcgcctctggcggtttcctgtccgggctggcggggccgccagtcggcgtggggtgcggcaaggggagcggggcgctgggtcagccgagggccgggcctcgggggcgcagccggactggacggcggctcctgtgggcacttggccgggtttgctggtttttcgggaaataaggccactggggacagtcactacgttttcaggaaccgctcagcccctctgagtgccccgcagatggacctggcggcgttcctggctacggctgactgggctcccggagcgaggagcgcccctgcgggcccagcctgggccctgggcggtgggagggcctccgcccccttcccgcttccgccccgctggcgccggacccccgccctcgtctgtgcctgccaggccgggcccttccctcccgtcacaggcggtccctgagcccacccttcgtctccgagcagctggaccgccgtatacgtttgccactgattccaggatgtccccgagtatcttaggaaagggccgtgttggacaaacgcggggctcggtgtttcttccgcgccgtccctcgctgctggcgccggggccgtcggaggctcagtgatggcccagcccgcccgtttccgagaattccccaaacgcgggcccctacacgctgagttcgcgctctcccgtgacggccgacagccccgcggaccctgctgacagccacactctgggctgaaaagggtaccacgcgtactttttttcccagcacgcgtggggccttggaaagaacctttactgaggcctgtggctggcctgtcaccttgtcaatctggccaaacgtttttgaaaaaggatgctaactcaccagatgtgaagttgcatctgccctgtgaataggtggactggagaagacactcgctggaggatcctgagcccaggctcggaaagggccgtccacctgcgagcgcggacttgcgcctctgctggaggccgggcagggcacgggcgggccccgggccacctctgccagggcttcctcaacccagcctgccctcatcgggcggccactgaatgcggttggacagtcatcttgaatgtatttcaagcacacag

SEQ ID NO: 7772 - DNA, 6000 bp, Homo sapiens
gattcctgaggatctgcccaccgtactcattcacaaggaagcccctaaacatggctacattgtgccttagcttcacagccctcaaaatacttctgactcaaatgtcttagggtcagagtaatgacatttagcacatctgcctagaaactcacagttttccaatttgtaacaaacattttgcaccttttaaaaatctcattctaaaatccaaatggtaaacagctttaagaatcaatatgaaatgttttaagtgttctctgtggcttcatataaattctccctgcccctctcatcagaatttattctgactttcagggagcatattaaaggtagaaaccactgatgtacaataataagtgtgcaaccatattcttaagaatctaaattcaatcttggttagctgagaatgcttgaaacagtaataaagtgctcctctgaaagtcacactcaaattttgaattcctctttctaatgagagctcttcacccattcccatgtctcaagtacgcaaatgaaaacaaaacaaaaaaactgtaactgggatttaaaagtataacagtctttcttctctcatgtatttctttcttgtcatacttcattctggaaaaaaataatccaatctgaaatataaagtgggaaaagggaggcatccgtaggtaatgtgagttattatcattgttctagatgttgggttgagtggtgggttcatagatgttcattacattatttaaaagccattataattaactattagaaaataagagggccatacatgcacgagtgatgacagagtgtcataaatcaggaattctgattattccaatcccatgcacctaagatctgtttaaagaaaaaataataatgagatggtgatgcaggtagctaatggttagacccttctagagttcaccaaactccttcggcagggacgtcttcataagcatgcagcctgcgcagctgcacaaggtcctgcctttaggagcacccagcctttatttatgctctgctgtcgcaatcttgaaatttaaatagtgttttaccaaggtgtcctgcattcattttgcactgggaccagtaaattataaaatcagtcctgtccctaagtttccagaggttaaatttacctacagttccccataatttcgtccccatccaactttgatattttttaagtttgctacttcttatccccagattattaatgtaacagtcaggtgagcaccctagagcagtcttttttcctgtatttcctatgtttccttatttttattgtccaaatcagtgctgcctgtgctataaatggagctgcagttatatattgttcttataatgcttcttctcagatcaaaaacttcaaacagaattcattggctaaaaactaaatgcactgaagtctctatctaaattcatgttaactgctggattatacaaattcattttctaataattgcccaatttcaactacaacatataaccaaacaagacaaattctgaacaattcttcatggtagaaagaattcaaataaagatttaaggaaatcctcattttcaaaaattactgtctcaaaaaaaaaaaaattaagtaaatgtttttgcattcctgaaatgccctgtgtctacagtgatcaggtacagaaaagctacttcaagttcaaatataacttagcgattgccacatggtgcagaatctttccacccctaacactccaaaaacccaatcagacaagtggccgtaatctgactcccagcacacagggagctgcggggcaggcaatgagagctgcactctggctggggaaggcatgagtgacagacccacagcaaggcggtgggggtaagtccttctttgccttaagggaacaacgcttagggccaaaagatgaaactgtctcttttattatagatgtttgtgccttcttaggcagaatctggaaggcagctatagggcaggtgggtggttcttttagatctgagtactgggcattttcagaagagaggcatagagaaggtagaagaaaagggatgctttttagccaaatcctccatatgtttcagatctgcaaaagcccaggaaaattaccctatggaggtgaatctagctatagtacatttcttcggaaaaattactcacccagacgctcagctgtcctggagtggatgaagctgagtgttcagctagaaagtaatgtgtccgattcagtacatcaacaaacccgctttgttctggggcaaaagaagcaaatctaattgtgttgatcatttccagtgactgtgaacatataagggaacactgacaataaaagcagggtgctatgggtgacgctagggtgagccctcataaggccagagatatgtatatgctgccagcaaacttcacggttcacagccaagtgaggctggtccatctgccttggaagaagatcagatttttgtggatttaaaaaaaaaaaaaagctaaaaacattcttaaagagcatgtttatgttttgtgttggtgttttgcactgttttaaatttctctggttgatgaatatttgaagctgaaagagcaactacctctggagaggtaaacaggtgcatgacaggccaagcagggagagaactccggaaatggcagaagtgagaggtgaagggggtgagcagcggggctggccttttctgggtcccacctcttctggtgtctcctgcggggctgaaaaggacgtttcctgcccacctagcttccttagcctactgttttgtcctcctccttctcccctaaccctgaccacaaacgacagcacctatgatcgcattttgccccctttgccatcccggctacagccctgggctgccggtgagttcagaagtgactctcctaacttcttcaatatgtgacttttctgagtttaccgtctttgggaatatttttagtgtctcctccagggtgccctccctgccccattgcaaccatcgtttttgtctctttacattcttttcctctagagagtatgatgtcgttgtcatcccacctggggtttttcatacttctgagattcgcttcactggggcaggggatgcgtgggatgtggctggccacccccctgtggagccagctcttcctttatcctgccacccgggcctgggcaagaaagggtttttctctctccacctctaaagcaaagccccatagcaaactaagggctaggctgagctggaaattcccctcaccctttttggcactgcatttcctcactacccacgcagaaagcaggttcccgggaacattcagtgacatggggaaatgagggccccgcaatttgtcaaagggaaagccacaataatactaatctcttaaagtacttggctttcttgcctaaccccttacgtggtcctctgcaattagattctctggtaaatactctccatacttcttggctctcatgactatcacaggcaaaggacaagggcaaaagtcttagatgatagggtaactggggtaattgccccccccccccaaaaggggaatcctagccatttcctgccagaatgagcagttggcatcaatatcgtcaaaccaccccttctctgctccaaagatctaatgacagcaagagggatatagacgggaggagaaggcgtcctccctctcccagactccctgcccaccaccctccccagagaagctccacaaggtgagacacactgtcctataggcccatgtaacagaaagccatcaaaaagaccgtagagaaaagccgttttccatagagccttctgctcaggggcccacagtttccctaaccacacccgcttttcctgacttcccgagctctgcaccatgaaggcaggaaaggtaccggggcattgctggcacaccccagcctccaggctccctttggcaggtttatctgcattgtacggtcagggtcaaggggtgagagagggtcgggcacgaggagaggctgtccttcctcccctaaaagcatcccccactcccatctctccccacctccagcggccaggatgcaccgggccggcgggcaggcgggcgagctcgcggggccgcttctgcgtgtgcacctggccgccgcccgggagcctgccacgggccgggaatggccgctgctccgccctctgagaggtgctccaggctccctggggacggaggtttacacgtccccgtgccgcgctcccagatctgggcggtgcgcgtgtcccttgggcaggctcagctcccggactcctcccgctggcagcctgctcgttcctggcgcaaaggagagggagggagtgtcgctgtcccagctgaggccctgcctgttcccatcgcccttgctagtcaccagaagctcctctcccctcaatgagttcactttctcaaaagacagccttcagcaccctggtttcctagaaggcttccccctaatccagagtctggggggagggggagattttcagaatgccatttcaaagcaatcaaatgcaaagctagaaaagacgaccccccccccccacgcacaccttgttttaatgctttatgttcgaaatgtaagtagcatataaaatgtactcgaaacttaaaaacttgctctaagggaattaagtacaaggtaaatatattttattcttaatattttaaggaatttgatttagacatttttcctttctagggacagtttggataattttccgtgaaactggatgatctttgaatattaaatgaaaggagactagaataacagtctcttgactattcatgaaggagctttagcagaagcattctttcttggtgtgcaaatcacgcctggcagcccctgcccacagtacccgaagatggcaggccttgttcccttcacctaaattcataaacctgggtgtagtggcttctgatgctgatttgtttctcttttcagtaagtgtggacctttgtgtaccagagagaacatcatggtggctttcaaaggggtctggactcaagctttctggaaagcagtcacagcggaatttctggccatgcttatttttgttctcctcagcctgggatccaccatcaactggggtggaacagaaaagcctttaccggtcgacatggttctcatctccctttgctttggactcagcattgcaaccatggtgcagtgctttggccatatcagcggtggccacatcaaccctgcagtgactgtggccatggtgtgcaccaggaagatcagcatcgccaagtctgtcttctacatcgcagcccagtgcctgggggccatcattggagcaggaatcctctatctggtcacacctcccagtgtggtgggaggcctgggagtcaccatggtagcatctttagctattttcaaactaggactccaagcttcttgcaaactctttgctaaataatgccttggtggcatgaggcacatccctaaaatagctaatttactcctagggaatttttgatgattcttaatagtgtgaaaactgattctggcagtatttaggtatatctgtaagaaatcattgtttgctcttgagtgccttaaaaataacaaaatctaggtggcccgaaaattgtgttggttttttcctccccttctcccattccaattactatattgactttatatttagcttaatgcattttccttacagttatttgttcactagcagaaaaaaactattttcttgtcatgttcataagatgtacaatgatctacataaagggttatgcttaaaaaaatagacatccgatcctagttttgttcttagctgattaggagtatcaattgttaactcagcaccagggctgattaaaaaaaaacacacatggcttaaattttaattgaaatatatattaattaatttaaacctaattaatggatttaatcattgccttataaaatcacaaggctctcaagaaattcttttacgagttaagtgctgcagtggcacattttgcttcctttgtagaaaaggacattcagcacaaactcctgtttggtcgttgtaagagtaatcacagtcatc

SEQ ID NO: 7773 - DNA, 6000 bp, Homo sapiens
gtaccaggcaccatgttcatcattttccataaactgaatgatttaatgttctaattatactttcagaaactgagaaccaaagcttcacaaaggcgagtaagtgacgaggtcagaattcaaatccaattacaaagctcatgattttcattacaccacgtccttgatagtgcctatgtgtgatggtttaaatggctaagaaatcaagaatgagagagtcaaagttcccacatttggtcatccctgtagactttattctagctcccccagcctccagtccctcactccccacccccaacacccacacattctttatttaatggcttgaccactatagttagggccaatttccctgggcttatggtactagtgccaacttagaatagtggaatatatcaaaccaggcagccatgatgttcactatgggttcattacataatcaagccaatttcaatcaagcttgtagggttaggtcagtaacttgaaatcatcgatgtccatgctggtctgtgtccagaaataatgactttgatagtgggaggaagaagaggaattttccaaacagcccccacaattctatcctaaggactctgagaatagttgattgcacatgaggctactttataagtggagtggctccagaaattaacttacgttactgggtgtaaaagatatccattctgacattctcacttaataaatatttgggctaaggataagccaaagtcatgctggacattaacaagtcttttgacttggtgaacagtgtggtgccacacttactggcagttgaattgaaataaagttgaattgaactaaaagcatcttactttctgtaacatcttcaagaaggtgttaacaggttagacactcccttagcacacatccttaatgttttaaacattactctttgcactttttggttctgttcctaggtaatagaaattgggggcacctggtaagtccttgattagtgtcaggcaccagtgggatatacactttctctataggtcatgaactcaaaaagacggtggtctactgtggatgatcccgttagttgcctacctagatttacttcttcagccccttccttgctggcagagctattttgttcaggagctaatgggccccaaactagcccttccattctcctttctgattagtggcttaattatcttaatattgtaatgttctattctgatgatggtgatgatgatgatgaaggctaacacttactaagcatttactctgtgctaggtactttttaaagaactttaaaaggtatcaactcatttcgatacaggagttaagaagaaattgcttaggcagatagtgagggtatgggagtcctcagtaaggtttcccttttaataaaaagcagccgccaatcattttcttttctaacaaagagcagcctgtaaaatcgagctgcagacagacaagcaaactaggagcttgcacaggtgaattctggcagttgtgcccataggaatatactacctgggatgaggcatgttcaaagtggcggccccatcttctctttttgccagcaacgtgtacagtaaggagcagactagatggcactgcccaagtggaaagcccatttgtataataagattagggttgggagaccagccttccccttgctacataaacgttacacctggtcaaaccaatctgtgagccctacataaatcagacactgcctcctcaaacctgcttataaaatctgctgtggtccgcccatgtcccttttttcagacgtcttacaaggagctgctctcctctcccctttcttctggctattaaactttccgctccttaacccacccacatgtgtccctttccttaatcctcttggcaggagatgctgaaccctggatatttactccagacggtgatgccacttcaatttcattcttgtaaaccaaaagagatagttctcaatcaatttagaaagtttattttgccaagcttaaggacgcaccctgacatagcctcaggaggtcctgccgacctgtgcccaaggtggttggggtacatcttgcttttatacattttagggagacatgagacatcaatcaatatgtgtaagatgtacatctgttcacttcggtaaggcgagacaacttgagggagagcttccaaatcctaagtagataagagacagaaggttgcattcttttgagtccttgatcagccctccactgaatacaaaatttagtctggctcagtgcatttgcatttttacatgaacaatagggcagagaaagcaatcagatatgctcttgtctcacgcaagcctcagagggatgacatcgagatctgtctgtactttgtccgtaaggaattttcttgtgggcaaattgtgagggaggtatgtagctttttatctttgtagctatcttatttaggaaaaaaatgggaggtaggtttacctgacatagttcccagcttgtcttttcccttggcttagtgatttgggggtcccgagatttattttcctttcacattctcctaataaagccatgaggaaggtaccattattaaaccaaagcccagagagactaacttgcctaaagtcacgcagctagaaagcagcagctgaacccccgtagtctgattctagagtattccctcttaaccactatgtcttgtaagccaatgagacaagaaggctgctggaggaacatctgggacactttagaggtaagagttctttttcttctttggaatgttgtcatttgtacatgatacttggaactgctgcagatatcttgtgtctataataggagtcacggctgagtatgttggagtaaaaagatggaagccactaaacattttgaagacatccttgagcaaggttgaattaactaaccttggagctactctacctctggaattgtttttcatgtgagaaaatgaacccagtatcctttaatctacttgttagaactcctgttacttgtagcgaaaagcactctcaccgatacacatagaaacaagcataattctgacctaagacaaatagaaatgagcataattctaacccttttaggtaggcagaatatttgcactatgggcaagattttcattcagacaacaaatatttattgaatgccttctacttgccaagtatagtgcaagttgctgaaccaaacaatataggaagggcaggtttctccatccatggaggttataatctggtcgtaaatgtagtagtgaaagtgcgggcaggcatattttgggacggtatcttgaggactaatctggattgggagtcagagaatgccctaataaaatccagtaaaagcatgcattacagattcaaaaagaatccatataatgtctatctcatccatcaagtatttgtgacatgttttggctttagttgtataagaacagtaagtatgtgcacaatagtgttaggtgtataagtatttttattttttattttttatttttgagacggagtctcgctccgtcgcccaggctggagtgcagtggcgcgatctcggctcactgcaagctccgcctcccgggttcacgccattcccctgcctcagcctcccgagtagctgggactacaggcgcctgccaccatgcccggctaatgtcttgtattttcagtagagacggggtttcaccgtattagccaggatggtctcgatctcctgacctcgtgatctgcccacctcagcctcccaaagtgctgggattacaggcgtgagccacgcgcccggccaggtgtataagtatttaggtaactttataacaaaatacatttacattaagggccagactgtcttttccttttaaagggaaatactgaagctaatttaggagaggcaaactaacataaaatataaggcaaaggagtgggaaccaaggcatttggtatctatttctagctcactgggcagcagtcctctgtgtcttgaattctgtgatttgcgaaatatgattcataggggttgcaatggaatatttctgagtttttaaactaatgagggataaatttttaaaatccctgtgctgctgtgaatgttctagaaattattcacaagtttattatagcaaagaaaatgggcaaaaggaagggggtgggtacaggacgtgacactccagaaaagaaggcagtgacgtaaaaaatcaagaggaagtccacaccaggaaatagtgctgtgcacattagagctgttactgaataaatacttgttggaatttccagagataaccaaacaaacatgaagaaggaagtgggtttttttttcagctttattatggaaaatatctaatatgtacaaaagtaccgagaatagtaaataagaacgaccatgcagcttctatggccttacttaacggccaacttgctttatttttcacctcccgctccccactattctcaagcaaattccagacatcataccatttaacccctaaatatgtcgcacatatctctaatgcaaaagattgggaaccaagacatttggtgtctatggctagcacactggatagcagccctctgtgtcttgaattcgtaacatgtagaataagatttatagtgggttgcaacccgactttatttttaactaacagcaatataagaggaggtggctaatcctcacaaggctctccatgagggaagctcacccctataaatccaggcgggcgcttcgttacccaggagcccaaggtgcagctccgggacgcttcttttcaaggccgggacccctgcagcggcccgtaggacacctccctttccgagcacggactggtccccgcccctcccccgggaagtctccgcccacagggccccagcagcccccgcgcgccctcgctccctcccgtcagcccccgcccctcggcgaagggagcggcgtgccgtccgggtcgcctaggcctggggtcgggagcgcgcacgctgtgcgccctgggcgcgctcgggattctcgcctggcgcggctggggaaggtgaacagtgtggcccgccatgttcttctccgcggcgctccgggcccgggcggctggcctcaccgcccactgggtaaggaggctcaagctgagcccggcgctgccgccgcccttctcttgctctccgtgtctcccttagttttgggcgcaggagagccctgggctctgcacgggcctgcaggcggcggcaaggacactgcggccttagccctcttagggaggccgctgcagccccaccgtgagaagccccgagggagggttgccatactgggaagtgtactcctagtttggtcgaggaggacagaaaagaggggctgcttggtgatatatatatatatgtttgtttgtttttgctgttttgctgtagcgcagaatctaggcctgctctggccagatcagtttcgaagaccgtcgctccgaaggaggcacctctcgtttcaagcctagtgacctcgatgcttttaggttgcagcatactggagagctctggcttgcttcgtgaaggcttagggagaacttcattagggctggaaaagggtggccaatgtttgatttactgcagttgtgctttgcatatcggaaatgctggctaaataaacggtatcaaactaactctgaaagaacggcgccgcaaataacagcacccaattaaagaaccacaggattttagagattaaatgatctttttgagatccaagtacatctcatggtaggcaaggaaattgaattgcagagaagttgaaacactccttcacgttaatctaaaaatgcagatttccagaaatgtcgattataacaacagggcctgttacacaagtaatactggaaagaagccttagttttgtttgttttctaagagtgaaataggttaagtcagttctcagcaagagggagctagtgtatattcattgagaatgaattcagggctttagagttagactcgagtttggatgttagcttaactgccttttgtggctctatgactttgtgctgttaatcttcctcagtttcttcagttgtaaaatggga

SEQ ID NO: 7774 - DNA, 6000 bp, Homo sapiens
cagctgatatttacctatgatctctaatataaaaagtgctaccatgctctttctctcattaataccattttttttcctagtttaacccagtttatttcatatggtcttaaatcttaaaactatttcttctgtatagataagtaattcaaatcattggcttatttccctaccaatatgttcaaactttatctgtcaaattcattgaatggtagttcctgaacatcatatagcaagacaaaacaaacaaaaaaacctaaaacactaaaaaaaaaaaaaaccccaacccttccaatatttaatttaataaaattagtgcttttctgcagtatgatttttgtctcaataatccaaattcaggtttcattagttttagcaaatgaagtaaaataaaatgttatgctaaaaaatatacatacacaccccaaaggctgagagatataccaagctattattaatggttatctatatgcaggtaaaattttaagatttttgtttgcatgttttctttatgtaggtattcttttttaataatttttattttatttcaatagttttgggggtacaggtggtttttagttacacgggtaagttctctagtggtaatttctgacattttcgtgcacctgtatcctgagcagtgtacactgtacccaatacgtagtcttttatccctcaccctcctcctatcctttttccctgccccgccccaagtccccaaagtccactatatcattcttatgcctttgcattctcatagcttagctcccaagtataagtgagaacacacggtatttggttttccattcctgagttgcttcatttagaataatggcctccagcttcacccaagttgctgcaaaagactatttcattcctttttatggctgtgtagtatttcatggtatatatatatatatattatatatattataataatatatgatatatcatatatattatatatattatataagatattatatatatatcacattttctttacccactcattggttgatggacacccaggttggttctatatcttttgaattgcaaattgtgctgctataaacatgtgtgtgcatatgtttttcatataatgacttcttttcctttgcatagatacccaatagtgggattgctggatcaaatggtagttctacttttagttgtttaaggaaactccatactgttttccatagtggttgtactagtttacattccctgttttttctttttctatttaaagctacagtctatgtccttgagtctggcttattgctaaaaatatcctcttttttatggatgtgtcattatagctcttcttttacttcatttttctgttttttgaatacgataatttctctatcttcaagtacaccttttttgccatctcaaatctttcactgagattatgtaatacaatttatatttctcttctatatttttcaactctagaaatttcatttttatagaatcatttccctattgatatcctttatatgttaaagaattatcattatattttcctttaattctttgaaaaatgtttactttttaaaacataattataagacctactttcaagagtttgcttctgaatccagtatttgagcccaatgggtctgtttctattggttgctattttcttcctcagagtgggtgacactttactgtttctttgcataaaccatgattgttggttgaaaagcagatatttcatatattgcagcaattctagatgttttatttttcttagttttgttgttgttgttgttgttgttttatcttcctggatttacacagatttaaaatctgtctctatatggcctgtggctgctggtatctttgctctgtttttcaattcacatttttatatttaccctgactttctgggctttgtccctgtgtttgcatagctgtggctagtcaatgatttggcagtggttgcactcaaacaccttgatttgggagtcttcttccctctgctaatggatctgtgtgtggattaaggaatacattcacagttgccaccagttctcaagtctcccttggatttacttaacaggtctcttgggtcaaccccaggcagatgcatagtttcccaatcagtcagagatgtgtggagatgtaattaacaaatagagtatttctgtggggaagtagactctataaaaaaggatgatatttctagagttgaaaagtacaggctggagtgaggtggtgtgaccataactcttcaatgactcttatttctaaaatctccctgttatatttttgactggcttgccatttgccccacctgggactgtaacctcaggtaagcacagctgtgggtttgccctgttcatttccatatgagtttgtcacttttagttggcaaagccttgggtttttgaccacccgccccaaattgagtccatccctttggcagcaaagctgctagttttcttggctattcctacccacactggcaaaactgcagttctggtgcaacagggtgggagagaagcagcctcaggccagaaggccacagacatctactgtccctgctagctgtttctgaagaatagatgtttctcaaattgttttctgtatttgtttgatttccagtgctctgaaatggttgtttttgccaatttatccaattttatactggttttgtgtgcagagaattgctgactatgccacacagacatagctaaaagtcccttccacagttttttacgtaggaacctgtattagttaggacctttcagagtcatgtaaaagaaattcaactgaattagttaggacttttagaattttaatatgaactggcttaaacagtacaggaaatttgtggttcacaattctggatagtctgtaagatggccttgctcacaatcccgaatagtctataggatagtccatagaatcaaacaggtgaggtttgatactgcagctcaaatcatgccaccaaacacaaggttcttctccatctttcccgcattcatttgacagtactgacttcaaccccaggctctacttgttgctgtccctctaaactcccatccctctagggtttccccttataggaggaaaacggttgccacatttccaggcatcatatacttacaccatgctagaggagcaaggaagctacagtttactggaagcctcagccccagtctttgtgggttcattgtttctgactgggcttgtgaccatctctgctgctagagggaatggttatgttgcctggcttaaatggaaggaataaatgctcaagtggcagccaacaaatacattcaatatccacacatattggctccaaataataaatcaatgaatgagtgggctcacccacttaggctcacatgctcacagcacttaaagagctccacaaaccatgccctccaaatgaaaccacggtctacattctgccagctctttctccctttccatttctcctttcttctctttcacaccctcacctttggctaggccactcgatgttgcaagaaacacgtccatcagcaattgcctcagtagaaaactccctctgctcccctcctgcatccacatagcagcttcaggcaaggcctccataaggcccagcgtggatcagtgcctgccccttggccgaatcagtgctgtcacaggcagagaattgtcactgccatgctcacctgcccaacccagtggtcagagaagactgttctactgcgagaggagccatgagaaggcttttccgaaagtcaaagaccaatggctacctcagaccatcccgtatccactcgtgggaggcccctgaatgaatctaaggccccaggggttgaactttactgagtagggagcgcagagtactagggacaaatttaccgcccgctttgaggaaagctgatgtgggagcagagagcaagatggatagcagcggccaatctaaacgggcaacgaagtgccacagagtgctgcacgtaggaatgcgagtgacaggtagggtcgtctattccaagtccctcctctcccctaataaactgccacatttcagaaaacacgaagactgctgaagccgtttccagccttcgctacgcattagcagagcaactcaacaagcctgggtgaaaggcttctcgaagaaattcagttatctctactgccagccaaacacggactgggcagctttcctcgggggctgctcggtaactgctgagccgggggcgcgctgaagccctgcagaagcccacacccgcttcaggaattccgtggatgttcccgacagaggtttattcccgcctatccctacaggcccacggcgctctttcctccaatcccacacccagtcgaaggcggggcagccgccccacccagcggccagccgggcggcccccagtctggtttaactggttggaacgactaaagcacgctggcgcaaggaaagctctcaacttcgggagctgaggcgcaggctggccagagcgtggagaggaaagccctttccatcctcaaggccgttgcaggagatgcccgcgagccaccttcgccagcaccacaccggggtaagccgtccgtccccgaaacccgcaaggccaccgactgcgcaggcgcctgcagagcactggccctcggcgcgttctctcgcgctcttcttcagtctcctcagcgagcctggggacgaagggggcgcggtgcctcctgggtgttgtagtttgcttccttggcgagaggccttcgggctggctggacgccggggccttgggaactacgcctcccagcgcgccccgcgcgagagcccaggtcgcctgcccttgacggcttcagccgtctgagcggagaggaggatccgggaagccggctgcggcgggaggagggaatgcgcgtgcgcgctggaccgcctcgtcccgttccgtcccaatcattgtaaacaggcagaggctgggcggggtgggaatggggcgcccgaggccggcctggggcgcagcgcaggaggcggctccggtggctgcggcggcagcgtgagcgcgaggaggcggaggctgcggcggggcggacggtcgcgcggcggcaggcacaggtcagtcgcagggagcggtcgcgtgctagggtcgcggcgatacccctggagtgcccgaggaaccctctcccgcgccggcctcgcgcccgcgtctgtcaggcagcgtgtggggctcggtgctcgcagcgctcgggtttgaagttgggggtggggggcgtggctgcccctggcgtgggttcctccccggaaagcttcgccccagttttcgccccccttggccgtgcgtccctcccactggccgacgggcctcccttcgtggcgtcctcgtttgtggtgctctcgggggccgggggtggagagttaggagtccccaggcctcggggaagctcttggggggcgcctggacagaggctaggggacccagccctcacggttggtggatcgtgcccggcatagtggccaggctccagggcttacccaggggaccaggacaggctcctggtgtcgcccaccgctggcactgagcagtgggcgcctttgggtgctgcgatccttccttcaggtttcagtgggaatggacagacagatctgaagttgaaaattcttttcacaactcatgttcaactatgtgtgttgtcagaatgctcttaatgaggtcagtgttctccctcttttttttaaaactgatcgttgtgagagtgaaacaggttttacagaatatttaacacctccgtcttccctgaagtaattctgctgtttcaagttttgggattcagtattacaaagccttcctcttgagcaaggcctagtacaattcttcaaggtccctagcatgttaattcgaggtgttttgaacgtgcatatacaggaagtgcagccgtttggccgttgagttagtgctccatccagccttgttagaaaagctttcgctgaatttttaatttagtggagtggtcatgttctaatgctgcagtactttggggagtattccattatacttggca

SEQ ID NO: 7775 - DNA, 6000 bp, Homo sapiens; identical to SEQ ID NO: 3299

SEQ ID NO: 7776 - DNA, 6000 bp, Homo sapiens; identical to SEQ ID NO: 796

SEQ ID NO: 7777 - DNA, 6000 bp, Homo sapiens
tttttagcattattatttcaaaaaattctagccctcttttctccctctcctatctttctgggactctcatttcatgtttgttgggatatctgacataattttacaggtctctgaggctcttctttctttctcttattattattttaactgtcaacctgagctttattaggtaaatactgttgattttggttcatgattctctattatgtaataatttgtttcattctccggtaaaatgatgtttttttttttttgaggtggagttttgctctttttgcccatgctggagtgcaatggcgcgatctcagctcaccgcaacctccacctcctgggttcaagcaattctcctgcctcagcctcctgagtagctggaatacaggcatgtgccaccatgcccggctaattttgtattttttagagaatacaaatacagagacggggttagagacggggtttctccatgttgatcaggctggtcttgaactcctgaccccaggtgatctgtctgccttggcctcccaaagtgctgggattacaagcgtgagccgcccatgcccggttgatgtttgatatttaataaaaattataacagctgatatttacctatgatctctaatataaaaagtgctaccatgctctttctctcattaataccattttttttcctagtttaacccagtttatttcatatggtcttaaatcttaaaactatttcttctgtatagataagtaattcaaatcattggcttatttccctaccaatatgttcaaactttatctgtcaaattcattgaatggtagttcctgaacatcatatagcaagacaaaacaaacaaaaaaacctaaaacactaaaaaaaaaaaaaaccccaacccttccaatatttaatttaataaaattagtgcttttctgcagtatgatttttgtctcaataatccaaattcaggtttcattagttttagcaaatgaagtaaaataaaatgttatgctaaaaaatatacatacacaccccaaaggctgagagatataccaagctattattaatggttatctatatgcaggtaaaattttaagatttttgtttgcatgttttctttatgtaggtattcttttttaataatttttattttatttcaatagttttgggggtacaggtggtttttagttacacgggtaagttctctagtggtaatttctgacattttcgtgcacctgtatcctgagcagtgtacactgtacccaatacgtagtcttttatccctcaccctcctcctatcctttttccctgccccgccccaagtccccaaagtccactatatcattcttatgcctttgcattctcatagcttagctcccaagtataagtgagaacacacggtatttggttttccattcctgagttgcttcatttagaataatggcctccagcttcacccaagttgctgcaaaagactatttcattcctttttatggctgtgtagtatttcatggtatatatatatatatattatatatattataataatatatgatatatcatatatattatatatattatataagatattatatatatatcacattttctttacccactcattggttgatggacacccaggttggttctatatcttttgaattgcaaattgtgctgctataaacatgtgtgtgcatatgtttttcatataatgacttcttttcctttgcatagatacccaatagtgggattgctggatcaaatggtagttctacttttagttgtttaaggaaactccatactgttttccatagtggttgtactagtttacattccctgttttttctttttctatttaaagctacagtctatgtccttgagtctggcttattgctaaaaatatcctcttttttatggatgtgtcattatagctcttcttttacttcatttttctgttttttgaatacgataatttctctatcttcaagtacaccttttttgccatctcaaatctttcactgagattatgtaatacaatttatatttctcttctatatttttcaactctagaaatttcatttttatagaatcatttccctattgatatcctttatatgttaaagaattatcattatattttcctttaattctttgaaaaatgtttactttttaaaacataattataagacctactttcaagagtttgcttctgaatccagtatttgagcccaatgggtctgtttctattggttgctattttcttcctcagagtgggtgacactttactgtttctttgcataaaccatgattgttggttgaaaagcagatatttcatatattgcagcaattctagatgttttatttttcttagttttgttgttgttgttgttgttgttttatcttcctggatttacacagatttaaaatctgtctctatatggcctgtggctgctggtatctttgctctgtttttcaattcacatttttatatttaccctgactttctgggctttgtccctgtgtttgcatagctgtggctagtcaatgatttggcagtggttgcactcaaacaccttgatttgggagtcttcttccctctgctaatggatctgtgtgtggattaaggaatacattcacagttgccaccagttctcaagtctcccttggatttacttaacaggtctcttgggtcaaccccaggcagatgcatagtttcccaatcagtcagagatgtgtggagatgtaattaacaaatagagtatttctgtggggaagtagactctataaaaaaggatgatatttctagagttgaaaagtacaggctggagtgaggtggtgtgaccataactcttcaatgactcttatttctaaaatctccctgttatatttttgactggcttgccatttgccccacctgggactgtaacctcaggtaagcacagctgtgggtttgccctgttcatttccatatgagtttgtcacttttagttggcaaagccttgggtttttgaccacccgccccaaattgagtccatccctttggcagcaaagctgctagttttcttggctattcctacccacactggcaaaactgcagttctggtgcaacagggtgggagagaagcagcctcaggccagaaggccacagacatctactgtccctgctagctgtttctgaagaatagatgtttctcaaattgttttctgtatttgtttgatttccagtgctctgaaatggttgtttttgccaatttatccaattttatactggttttgtgtgcagagaattgctgactatgccacacagacatagctaaaagtcccttccacagttttttacgtaggaacctgtattagttaggacctttcagagtcatgtaaaagaaattcaactgaattagttaggacttttagaattttaatatgaactggcttaaacagtacaggaaatttgtggttcacaattctggatagtctgtaagatggccttgctcacaatcccgaatagtctataggatagtccatagaatcaaacaggtgaggtttgatactgcagctcaaatcatgccaccaaacacaaggttcttctccatctttcccgcattcatttgacagtactgacttcaaccccaggctctacttgttgctgtccctctaaactcccatccctctagggtttccccttataggaggaaaacggttgccacatttccaggcatcatatacttacaccatgctagaggagcaaggaagctacagtttactggaagcctcagccccagtctttgtgggttcattgtttctgactgggcttgtgaccatctctgctgctagagggaatggttatgttgcctggcttaaatggaaggaataaatgctcaagtggcagccaacaaatacattcaatatccacacatattggctccaaataataaatcaatgaatgagtgggctcacccacttaggctcacatgctcacagcacttaaagagctccacaaaccatgccctccaaatgaaaccacggtctacattctgccagctctttctccctttccatttctcctttcttctctttcacaccctcacctttggctaggccactcgatgttgcaagaaacacgtccatcagcaattgcctcagtagaaaactccctctgctcccctcctgcatccacatagcagcttcaggcaaggcctccataaggcccagcgtggatcagtgcctgccccttggccgaatcagtgctgtcacaggcagagaattgtcactgccatgctcacctgcccaacccagtggtcagagaagactgttctactgcgagaggagccatgagaaggcttttccgaaagtcaaagaccaatggctacctcagaccatcccgtatccactcgtgggaggcccctgaatgaatctaaggccccaggggttgaactttactgagtagggagcgcagagtactagggacaaatttaccgcccgctttgaggaaagctgatgtgggagcagagagcaagatggatagcagcggccaatctaaacgggcaacgaagtgccacagagtgctgcacgtaggaatgcgagtgacaggtagggtcgtctattccaagtccctcctctcccctaataaactgccacatttcagaaaacacgaagactgctgaagccgtttccagccttcgctacgcattagcagagcaactcaacaagcctgggtgaaaggcttctcgaagaaattcagttatctctactgccagccaaacacggactgggcagctttcctcgggggctgctcggtaactgctgagccgggggcgcgctgaagccctgcagaagcccacacccgcttcaggaattccgtggatgttcccgacagaggtttattcccgcctatccctacaggcccacggcgctctttcctccaatcccacacccagtcgaaggcggggcagccgccccacccagcggccagccgggcggcccccagtctggtttaactggttggaacgactaaagcacgctggcgcaaggaaagctctcaacttcgggagctgaggcgcaggctggccagagcgtggagaggaaagccctttccatcctcaaggccgttgcaggagatgcccgcgagccaccttcgccagcaccacaccggggtaagccgtccgtccccgaaacccgcaaggccaccgactgcgcaggcgcctgcagagcactggccctcggcgcgttctctcgcgctcttcttcagtctcctcagcgagcctggggacgaagggggcgcggtgcctcctgggtgttgtagtttgcttccttggcgagaggccttcgggctggctggacgccggggccttgggaactacgcctcccagcgcgccccgcgcgagagcccaggtcgcctgcccttgacggcttcagccgtctgagcggagaggaggatccgggaagccggctgcggcgggaggagggaatgcgcgtgcgcgctggaccgcctcgtcccgttccgtcccaatcattgtaaacaggcagaggctgggcggggtgggaatggggcgcccgaggccggcctggggcgcagcgcaggaggcggctccggtggctgcggcggcagcgtgagcgcgaggaggcggaggctgcggcggggcggacggtcgcgcggcggcaggcacaggtcagtcgcagggagcggtcgcgtgctagggtcgcggcgatacccctggagtgcccgaggaaccctctcccgcgccggcctcgcgcccgcgtctgtcaggcagcgtgtggggctcggtgctcgcagcgctcgggtttgaagttgggggtggggggcgtggctgcccctggcgtgggttcctccccggaaagcttcgccccagttttcgccccccttggccgtgcgtccctcccactggccgacgggcctcccttcgtggcgtcctcgtttgtggtgctctcgggggccgggggtggagagttaggagtccccaggcctcggggaagctcttggggggcgcctggacagaggctag

SEQ ID NO: 7778 - DNA, 6000 bp, Homo sapiens; identical to SEQ ID NO: 3300

SEQ ID NO: 7779 - DNA, 6000 bp, Homo sapiens; identical to SEQ ID NO: 798

SEQ ID NO: 7780 - DNA, 6000 bp, Homo sapiens
tttgttataacaacttttaatgtaatcttagtaactattaaatttggctttaaaacatcgaaagttttctaattaaataagagacaaagtaaaacatcatcctaccacagcgttagagcatgcaatggccattacaagagatctgaccgtggtcagtgcaaatggcagaacataaggtaacagttgtttcgtctcattgatttatctgaattctgtaatactggtatatctctgacgaatggctaaactaagccagctttacctttttcgtatcccttttatttaaagaagtttaaactcactcaagtaaatttgtttggataagcctgaccaaatgttttctgtctttgaatgccgaacaggctactgattttattttacaaaaccttgaaagagaaagctgttgtattggtctccgtaagtgggtgataacatttactagttatttcaactcacaggacagacaaaaagaaaatgcacaatttaagtttcattatgaaaagttttccaacttttccccaaaagagtatacaaaagtagaatcgttcaataaacccctatgtactcatcatcctgcttccaacaatcgctgaacagaccccaattgtagctaaagtgggtagggacccacccacttctccccacttcagccacaggattattttgaaccccacatatctcatgcaaatcccatatatcttaccatttcctccgtacaggcttcagttcgaatctccaaaagaaaatccatcacgcggaagaacagaatgttaaacttattgacaacaaattttaactaactttgattcaaaaacagaatgttcagtgttaaatagccaatgggaatatcgcacaggaaattaagaacaactcttggaaatagctctgtgactgctaagttaggaaagggaacgtttgtttactcggcagcagaaaaccaggaacccaccgaccggccagcgaaggtcgcccgtctccagcagtgcgcatcgttcccctaccccgggcgccctgaattccaatttttccagtcccaatcaggcgacaccctccctttggtgttccaccgcccgtcagtcacagacacagacaagttcttcagtgagatgcttttcactccgaaaccatttattcagcagccagggcgagcgcagcaatggactgaaggagaagtgttccgaagcgacagccccagagcgcaagccccttcctgtcgccgcctcaggtccgcagacgcccgtgtgagccccctccgccgcgtcccgcgaccctccctcgcccagggggcactccccctacagtgttcttccttccacagagactccacaagcgccctccctcaggagacgtctcctcctctttcctcgccactctcctttcgccttttctcggctgtcacaggatgggacaaccctcgaaaagacaccctcctttccgtcctaactcacccctaaggccccaaaataaaaataaaggaaaacaaaaacaaaaaccgcacacttccacagctctccgccgaaagctcaggcctgttacccaacgcgagacaccacaaagcatccccaacccggacaccgccccgcctcaggctcggctcactcgcagcttcctccgcagtcacagcagagctcgacacccgcgctcgctttcaaaccgccccaacatggcgccggcctgcggtgcgcatgcgcggcagtggggcgccgggcgcgagcggagatgagggagcggccggagaagagaggatgctgttgagcgttaggtcgcgacccctgctggaaggtgctgtttctccctcctttctggggctgggaatggggggatgtgggctgcatccaagtcgctgccccccacgcccttccaacctccgtcacagctattctcggccagtttgcgcggggacttgctgatctcccttcagccggccccggggtctgcgggaggggactgggtggggagggagacttaagggcgctggcggctgtcgttccggtcgctgagagtctgccccacagctccagtttttccaagtgagttcagcctccccgcttccagagcatcccccgccaaaaataagatatcgtctcagctagtaggcagtcccccctcaccacttctttcactccctcttcagtgcctttcctctcacaccccggagcctctcacacacaaagcagatgggagattggagacccgagtttagccagggatgggatttaacaaactcctaggaagccttgattcccagggaagaatggcagtgaccccgcacggattggggacccagtcaggcagctcagaaagagggtcattgtacaaacagatgtaaagactcactaacatgtgtgaacctgtctgtaagtctggaaggaatccagtttcaaccaattggtgtatcaaaaaaagaggccatcccaatgttggtttatgtttattttccactgaccctatgagtgaagatatccttgaccatgagtccatctgaatatgttccagctcatccgacgttccaccaccatgtaatacaattgtagtcttactgtttgcactttcttctttttaccctttgtagcctactaaattttaccttcccttttctcttagcaaatgaaaaagtccggaagctataacgttcagtttagtggttaaacacaggtctattgtggcagtaatagttggtgatttgaaaataagacataccctgctagtggtatgtcccaataatcttcaaagtctctagatcaattaatatcaagtaggtttccaataggaaatcaagaacggtgttttatatgctaagacgagccctggtcggggattaacaatccttgttaattgttagtgacgtaagcttaaaaacttaaatttttgtatccacgttccacctaagtgtctttttaaactgagttcctttaaaatagtttcttaaagattctttttataaacagtatcttttaaagttttttgtactatatttttctttcatcttggggcatatatgtagcaaatgtttcctaatgaagacaaagtatagataaaggacactgagaagatataaagaaaattatcaaatatattgacctaattcatggatcaaaataattctacttctgccttgtttcctcacaggttaagagatatggagatttccacaaggatttggagaggagccccagtagttactaaaattctgcattagatctgtcaggaaaggtaaagaaaccaggactctgctaggaaagaggaggttataataatggtttactaaaacttttcaaatatagagactatcaactacctgttgtgccttgctggagaattaaataagagaaaatagatttatgatccaacctgaagagttttaagtgagagctaaggaagaaatgttccaataattaaactttaagaaggtttatttaagtgcttaaggaagcagatctttggagagttttttaaatgatggatttatatgtgtccatttttttaaagagaaactaactattttgataacctagtatagggctccacactgtttaaagcatttttacatatattaactcaactaatccttataatgattcggtgagatagatattattatccccattctatagatatggaagttgaagttcaaaggttaagcaatttatccaaaataatatagctgtactaagtgacaaagtcaggatttgaatccagttctgttttcaccttacctgccagcttcccctaactgaaagctggatgatgacccgaaggaccagtgagactgcagcttccggaactcattcacagcagtaatagttatgtctagtatcttactcaactgttgttgctacatctaccacagtgcctgtctcagtccttttgggctgccataagaaattaccaaagactgaatgacttgtaaacaataaatttatttctcagagttctggatcctggaagtctgagatctgggtgccagcatggttaggttctggtgagggccctcttctggttgcagactgctaacttctggcagtgtcctcacatggaagaaggggccattgagctccctggggtctcttttgtgagggcactaatcccattcataagggctttgccctcatgacctaatcatctcctaatatcaccctgggagttaggatttcaacatatgaattttagggagacataaacattcagtccattgcagtttctaacttcaagcagggttcaatgtgtttaaattgagttgatttaaacttgatcctatctgaggaggtgacatttaagcaaagatacctatgaaacagtcagttatatgaacacattgcagaagacagtgacaagcagaaggaacagcaagtacaaagaacctgaagtcagaaattgctttattgtatgtgaggaacagccaggagatcaaatgattggagctaagtggacaagaagaagactggtaggaggtatatttgaagaggaagccaggggtcagatcgtgtagtgccactgctacgcactttaaataatcctcaagaacacataaccaacagctcataatgcttcacaagacaaaggacgtgtgattaaactgttagaaattaaaattatttattgaatgactatcgcatgccaggcactggatagaaccttaagcatatcatctcatctaatcctcacgctaattctacaagacatatattatcctaattttaccttgagagaaatggaaaaacagaaatattaagtaacatgcttcacacaataggtggcagagacaagatatgacccaggtttctgatttcaaagtctagatttttccactataccacagtttctcatttgaaagactgtaaggagagaggggttcatgcatacatgcattcatcaagtaattatgttcatttctatgtgacaggcattatagaaataatattaaaatgtaagatagcactttttaagtttttatatggttatattcttaccagttgtttgtttttaaaacttgcagatagatggacttcaaggcaattgcccaacaaactgcccaagaagttttaggttataatcgagatacatcaggctggaaagtggttaaaacttcagtaagaaaataagttaaattatgtttcaagactttgtttttaagtaagaaacaattcattgtaaagacttttttaaaaaaatattttctgttccaggtgcagtggtgtgcacctatagtcccagctactcaggaggctaacacaggaggactgcttgagcacaggagtttgaggctgtcatgcaccatgattgtgcctgtgaatagccagtacactacagactgggcaacatagtgagaccctgtctctgaaaaatatatatatatatttttttcttttacaaaccagaaaaaaaagtgtttttacttttgttagtttttcattttcatttttcctgcatttgacagctaattatttgtggatttttattcccctttgagaaaaagataactgtttccagtaaggcttctagaaaattccatggaaatctgtgagtacaatcttctatttacaattactgttttaaattcaatgccattgatgtatctggaatttcagtgctgcttcattagctataataaattattttatagtaataaatagaaattattaagtcactaggcagaaatgtgataataataaaatacagcaatcagataccatctaatcttctattttcaaatctgatgacaatcagataaaaaatctcttctaattactaattcactaaataggaaattttcacttcaagaaataattactataaaagcagattggtattttcttgctaacagtaatattttatggaattttaaacccttcatgtgtccattaaatgaaccactaacaagtaaagtgtatttcttcattttattttattttcttgagacagggtcttgctctgtcaccaggctggagtgcagtggcacaatctcagctcactgcaacctgtgccttctgggctcaagca

SEQ ID NO: 7781 - DNA, 6000 bp, Homo sapiens
cttgctcccagggctccaactcaggatggattctattcagggtcaacaattttcctcatctaatctctttggtctaggggtgaaaccagttttccactattgcttctcccagttaattcatcaaaaatatttggctttcttatttccatccctacctctgcaaacagctcctgaaactctcttcagttgaacgctttaagtatgtcatctttttcctatcaagatacccactgggggaggggtgtggtggctcacgcctgtaatcccaaaactatgggaggccgaggcaggtggatcacttgaggtcaggagttcgagaccagcctggccgtcatggcgaaatcctgtctctactaaaaatacaaaaattagccgggcatggtggcgggcacctgtaatcccagctacttatgaggctgaggcaggagaatcgcttgaacccaggaggcagaggttgcagtgagccaagattgcgccactgcactccagcctgaatgacagagtgagactctgtctcaaaaaaaaaaaaaaaaaaagacacccactggtgtaacttcatacttatggacttatggcaagtatttcattgtgtcctaagtaaaaacaagctgtttccctatatgtctccctctcctactaaacttcctagagggcagacactatgccttagttatactgatattctccataaaccctattgttaacttttgcatgtaattgaaactgaataagcaattcagaaatggagccaggagaggttagaattaggaaaaaagaaataaatattatttacctaagtgggtaggtgatgaaagaggagttttcaagagagacggagtaggtaaaggaagagagctagttgatttagtctgaaccttaagggaggaaaaaatttacaaggagatggtgtgaaaactgcctgttgttgaatgttatggtttggctgtgttcccacccaaatctcatcttgaattgtagctcccataattcccatgtgttgtgggagggacccagtgggagataactgaatcatgggggctgtttcccccatactgtccttatggtagcgaataagtctcatgaaatctcatggttttataaggagaaaccccttttgcttggttctcattctctctcttgccttctgccatgattgtgagatctccccagccatgtggaaccgtgagtccattaaattgagtgagggtgaggagatggtgttatcagtgtgagttattaactgtgagggtgaggagaggatatgaacagtgtcagtgattagtgagggtgaggagatgctgttatcactgttagttgttgagtgacggtgaggagacggtgttgtcactgtcaattactgagtgttaggagatggtgttttcactgtcagtagttgagtgagggtgaggagatggtgttgtcactgtcagtagctgactgagggtgaggagatgctgttgtcatagtcaggtggtgagtgagagtgaggagatggtctcactgtcaggtgttgagtgagggtgtagatgatgatgtcactgtcagttgttgagtgaggctgaggagatagtgttgtcactgtcagttcttgagtgagggtgaggggatgctgttgtcactgtcaggtgttgagtgagggtgaggagatgctgttgtcactgtcaggtgttgactaagggtgaggagatggtgtcactgtcagttgttgagtgagggtgaggagatggtgttgtcactgtcagtagttgagtgagggtgaggagatggtgttgtcactgtcagtagttgagtgagggtgaggagatgctgttgtcacagtcaggtgttgagtgagggtgaggagatggtatcactgtcaggtgttgagtgagggtgtagatgatgttgtcactgtcagttgagtgaggctgaggagatggtgttgtcactgtcagttcttgagtgagggtgaggagatgctgttgtcactgtcaggtgttgagtgagggtgaggagatgctgttgttactgtcaggtgttgagtgagggtgaggagatggtgtcactgtcagttgttgaatgagggtgaggagatggtgttgtcactgtcagtagctgagtgagggtcaggagatggtgttgtcactgtcagtagttgagtgaggctgaggagatggtgatgtcactgtcagttcttgagtgagggtgaggagatggtggtgtcactgtcaggtgttgagtgagggtgaggagatggtgttgtcactgtcagtagttgagtgagggtgaggagatggtgttgccactgtcagttcttgagagagggtgaggagatattgttgtcactgtcaggtgttgagtgagggtatagatgatgttgtcactgtcagctgttgagtgaggctgaggagatggtgttgtcactgtcagttcttgaatgaggctgaggagatgctgttgtcactgtcaggtgttgagtgagggtgaggagatgctgttgtcactgtcaggtgttgagtgagggtgaggagatgttgtcactgtcagttcttgaatgaggctgagatgctgttgtcactttcaggtgttgagtgagggtaaggagatgctgttgtcactgtcaggtgttgagtgagggtgaggagatggtgtcactgtcagttgttgagtgagggtaaggagacaggagacggtgttgtcactgtcagtagttgagtgagggtcaggagatggtgttgtcactgtcagttgttgagtgagggtacactgtcagttgttgactgaggctgaggagatgctgttgtcactctcaggtgttgagtgagggtgaggagatggtgttgtcactatcagtagttgactgacagtgaggagatgctgttgtcactgttggaagttgagtgagggtgaggagaaggtgttatcactgtcaggtgttgagtgagagagaggagatggtctgtcactgtcagatgttgagtgagggtcaggagatgatggtgttactgtcagtagttgagtgagggtcaggagatggtgttgttgctgtcagttattgagtgagggtgagaagacggtgttgtccctgtcagtagttgagggtcaggagaaggtgttgtcattgtcagttgttgagtgagggtgaagaaatgttgttgtcactttcagttgctgagtgagggtcagaagatgttgtcactgtcaggtgttgactgagggtcagatggtgttgtcactgtcagtagttgagtgagggtgagaagatgctgttgtcactgtcagtagttgagtgagggtgaggagacggcgttatcactgtcaggtactgagtgagggtgaggagatggtgttacagtgccagtgctgtgagaatgagatggtgttatcaatatcagttgttgaatgtgggtgagagatggtgtgaacagtgtcagcggctgagagtgaggtagagaaataatgggtgaggccattgtcaattaggaggccattggcgtcttttgaaagtagttagtgtctgtggagtggcatgtattcaggttacatgaaaagcagctgagaagcaaactggcaatcagagtggcagcaacaaattaagaatattcatattcataaagaccattttttataatgaaaaagtaatacatgcagatgggggaagatcacctgaaccttgagaggtggaagatgtagtgagccgtgatcaaaacattacactccagcctgggtaacagagaccccatctccaaaaaacagaaaagaaaagcatttataagttcatgttgaacagtgtttcaaacacatagacaaaatttatatgtcatgaaaatggaatatcagaaaaacattgtttaaaaaaacacaaagtgagtaaaccattaatacgtgaggtgagcggtgcatcagcttgccggcttccagctgcagcgggtgatggaggtggaagggagctgtcctcgggacaggaaatgaaacaaacccaaccaaagccgtgtattcgtttattcaatatcgttttgctttcttgtgtagactgagggtgtaaacctcgtttctgacagtcgcctataggacttttcagcaggctgtgggcctagaggtgggggatgtggaatcaagctaaagacccagaaccagagaaagaaggaagcagcagtgaggaagcaggacaagaacatctcggaaattcagcccggcgcggtgggcgcgcctgcagtcgcggcgctttgggggcccgggccacgtagcacgaccctgcctgtgaacgcacagacaccagcggttccaagggcgcgggcaggaagcgggcaccgaaggcaggctggagaagcgcggggcggaagcaagaagccgcgcggcgaggagggcgcgtggggccccacacagccatggggcgcgcgtactactggcagcgcaggctctggaccgctaaggaggccgcgcgcgcccacgcgtgtccccggcagagcttccaggagacggctgcgaggcccttccacccgcggaccagagcgcgccgggtcgaaccacgacccacgtgcaggccctcgcgcgctaccggaaggccagcctgtggcgcacgcgcgccccgccccgccgatcggtgacgtcatcgggcccgtcacgaggcgggggcggggcctcggaacgcgacgccccccgtcccagctttagccactcgtgacgtcattgcccggactccactgcctcctgcgccgcgcttttgccaccctgggcacgtcatcgtgcgccgacgccaaacgagggcggggcctagggacgccacaccttccgcgccgccgctcgttacgtcatcggacctcgccgcttggcggaggcggggaaggcccgcaggcggcgcctcagccggggttggcgctgaggggagagggcggggaaaaggtggcgaattgaggggaaagtgggaggggcgggaaaggggcggtcggaacatggcggaccagatcccgctttacccggtgcgtagcgcagcggcggccgcagccaaccgcaaacgcgcggcctactacagcgccgcggggcccaggccgggagccgaccggcacagcaggtaaccgaggcggcactggccccgttccccgccgacgctccccggggcccccagcccaccgcaggaacccggagccgggcgggtctggggtcgctaccggcgcgccccatctgttcgctgggagccgggagtccttggcgttctgagcgcgccgcagctgtggcgtccgccggtggtgagggccgcgggcagctgccggggcgagcggctgcatccccgggacgcctgggccgagcgtaggagccagaacgggagcagagaaccgcggtccagtgttgaggggtggctgctctcctaaagtaaacggggatcaaaagtgctaacttctcggatacttcagagtctccgaaacttgttcttgtagccctgtgaattgtgaaggtgacggatgtaacttttaattgctttgttaaaaacacacttcttattgaaatgacttctcttcgacatttcgatatctttgctaggcacactttttgtttaaacatatatatacaaagtgctttttgtcgacaagtaattttgcttttacgaaagggaaatggggtattgagaacggttaacttgtttagtggggtcacaggttagcagtagaattagtgtacagacctttcatactcgagattgcatttagctcatatttaacatttctcattcaaagaaaagaaaattttaaaaagtgttgcttcttatagtttttgaagttttattccagaggaattgtcgaaaacataatttcactcaatatgtagttgcttcagaatttgagtttttgaataatttttgttttcggccatttgagagactaacatatagctcaaagtacatactggaatgttataacgctgatttgagtgtttacccactagcgatttactctcgggtaacttatttaaactcaagccatggtttcctcatctgtaaaatgctggataatattttttcttacg

SEQ ID NO: 7782 - DNA, 6000 bp, Homo sapiens
ccttttttcaaggttcttagcttccttgcattgggttagaacatgcttctttagctcggaggagtttgttattacccaccttctgaagtctacttttgtcaatttgtcaaactccttctctgtccagttttgttctcttgcaggtgaggagttgtgatcctttggaggagaagaggcgttctggttttaggaattatcagcctttttgtgctggtttttccttatcttcgtggatttatctgcctttggtctttgatgctggtgaccttcagatggagtttttgtgtggatgtcctttttgttgatgttgatgcagttcctttgtttgttagttttacttctaacagtcaggcacgtctgttgcaggtctgctggagtttgctggagatccactccagatcctgtttacctgggtttcaccagcggaggttgcagaacagcaaagattgctgcctgtttcttcctctggaagcttcgtcccaaaggggcacctgccagatgccagccggagctctccggtatgaggtgtctgttgacccctgctaggaggtgtctccagtcaggatacatggcggtcagggatccacttgaggaggcagtctgtcccttagcagagctcaagcgctgtgctgggagatacacagctctcttcagaggtggcaggcaggaacatttaagtctgctgaggctgtgcccacaacctacccttcccccaggtgctctgtcacaggaagatgggagttttatctataagcccctgactggggcagctgcctttctttcagagatgcccttcccagagaggaggaatctagagaggcagtctggctacagtggctttgccaaggtgtggtgggctctgcctaggtcagacttcccagcggctttgtttacactgtgaggggaaaaccacctactcaagccacagtaatggcagacgccccttgccccaccaagcttgggcatcccaggttgacttcagactgctgtgctggcagcgagcatttcaagccagtgaatcttagcttgctgggctccgtgggggtgggattcgctgaggtagatcacttggctccctggcttcagccccctttccagaagagtgaacggttctgtcttgttggcattccaggcgccactggggtatgaaaaaagactcctgcagctagctcggtgtctgcccaaacggccacctagctttgtgcttgaaatgcagggccctggtggtgtaggcatcgaaaggaatctcctggtctgcggattgcgaagaccatgggaagtgcgtagtatctgggccaaaatgctctgttcctcacagcacagtccctcagtgcttcccttggctaggggtggggaagtttgcctgaccccttgtgcttcccgggtgaggcgacaccccactttgcttcagcttgccctccttgggctgcacccactgtctaaccagtcccagtgagatgagctgggtacctcagttagaaatgcagaaataactcgccttttgccttgatctcattgggagctgcagaccagagctgttcctattgaccatcttcttcttttttttttttttttgagagggagtctttctctgttgctaggctggagtgcagtggcgccatcttggctcactgcagcctctcctggcttcaagcgactcccctaccttagcctcccaagtagctggcactacaggcacgtgccaccatgcccggctaattttttttgttttagtagagacagggtttcaccatgttggccaggatggtcttgatctccggacttcatgatccacccgcctcggcctcccaaattgctgggattacaggcgtgagccactgcgcctggctcagtttttttttttggaatattcatagataaatgtaactcaccaaagtcagtgtttgaacatgttcatcatgtccaaaagaaagtttgtaccccgttgggtaccccgggtatgagtacccctatcattttcctaccaaccctatcccatcattttccattccacctatcccccaaccaccatatctatagagttttttcactgtggtaaaatataggtaacttaaaatttaccattttaactatttataacaagtcactaatttcagaatggcacacatttcccaaaatagaaatattagaacatgacaattttgctataaacttaattcacttcccaatttaaactttgggaagtgtgtgctatataatagagtaaaagtaaaaaaaaaaaaaatgtaagcgtattgtcttaatttacgagaaacagaattttacattatgcagcctagatatccacattggcggttgaaaactaaatagttattagaaaaacagctttcatatgagctttacatcgctttgtgagcattgaaagcttccttccttgaccatttgaaaatgacattttgctcttatgtataaataattgtacttattgtattttaaaagttctcaggttttccttgaagtggaattatttttatttcattataatcatactactttaggacacagtgtatttaaaagataacgttggttagttgttaaaacttgtataaaaattttcatgactgggcttatattttataaaaatttccaagggaagaattagatgtgatttgagtatgatgttagtccattcttgcattactataaagaaatataatacttgaggctgggtaatttacaaaaaaaaaaaaaaggtttaattggctcgtgcttctgtaagcttttaaggaagcatggtgctggcatctgcttctggtgaggcctcaggaagtacacaatcatggtggaaggtattggagagccagcatgtcacatgacgaaagggagcaagagagagaatgggaggtcccagacttttataaacaaccagatctcacgtgaactgagtgagaacacacttatcaatcaccatggggactcatgagaggaccaccccctaccccatgattcagtatctcccactaggccccacctctgacattggggatcacatttcaacatgaaatttgcaggggacacacatccaaaccatagcatatggttaaggaagattaagaaattcaatagcacattgcctttattatcatcgaggatgaagatgttacggttttcatatgtcattaagtaaacaaaatgacgtgtgccacacatagtagctcatagttcactgggaacgcagttacttgttcagtctgttttctacaaagtcatgtgagatactgatttttccttcgcattgttgatatctgggtgaaaataaggtatttgttaaattggtatttcccttttttgtgttttaagtgatagtggtgtcattcaacttatctttgcagttgaatgaagaatgaatgacattgagcattattgttttgtttatccatgtccattattagtttttctttgcttttgccagcagtgtgactattggccctgcccagagccatttgcaatcttacaatagttaagtgttagcactgaaagatactaatgttaagaacagatgtctactgtctgattattgggaaaatattagtgtttcttagtagaagcaacacagttttttttaatactagatttctcattctgagtctatacacaattttctatgaatcataaaactttgataattatgatagtctaatattttactagttgtaaaaatgaaacttattttgctgtgatgtttcacaattgaaaagccttttttttttttaaggcgtagtactaattcttaagacagtgtttatctaattgtccagtcccaggattcattggaatcagagacattttcttagggggtctataagaatttcctttaaaaggcatccgtaggctgcgtgcagtggctcacgcctgtaatcccagcactttgggagtccaaggtgggcggatcacctgaggtcaggagtttgagaccagcctggccaaggtggtgaaaccctgtactaaaagtgtaaaaattagctggacgtggtggcgggtgcctgtaatcccagctactcaggaagctgagtcagaagaatcgcttgaacttgggaggcagaggttgcagtgagctgagattgcaccactgcactccagcctgggagacagagcaaggctctatctcaaaaaaaaaaaaaaaaaaaagataaaatctcaagtttaaaaaattatttacacttgccagaatagaaatgttttacttatttttttttttacacctaatagtattagcatgaagacagagttgatagtagggaacatcacaattttaggtaactgaagtatgtatcctgagctaattggctatatagcttcaaatttttgggtttgcatttatataacattggatattgtaccattaactctaattcagaagtttttctcaatttatgtatagcagtgttatttcttatttcaagaaattggtgttcagttttcttgtagaacattttagaaatcattagctccaaggttattgtatatatgattcccatgggggaaatgacatctcagctcaagggactatttccatgttccttttcctgggttttgctactaaagtcaaggcatatttttcaggcagccatccctttaaattttatttattcatttgtctgctgggttatttatttattttaacatcttgccctttgtcttagttcattttgtgctgctgtaacaggatatctgagactagataatttataaagaacagaaatttatttctcacacttcttgaggctgggaagtccaagatcaaggtattgacgtctggtgaggccttcttggtgtgtcctcacatgggagaagatgggagggcaagagaggatgaatgtggtttcctcacatggcagaagagcaggagagagcaaacccattgcaatatgctctctttatgatggcattaatgcatcatgagggcggaactattgtgagctaaatgcttcccattaggcactatcttctaagactgttgcattgaggattaagcttccaacacatgaatttggaggggacaaaaacatttcaaccgtagcaccatttgtctcctttgctgctattggagggagagtcccaatttctcattagtttatgcagcttgctgcttagtaatgacttatcaatgacagttgaaacttgtagttgtatttgatgaaggaaatatgcacatttctttatagcacttagttttttgctttgtttttctactttattaacatgcaggcaaagtgggagtgtttatttttaaagaagctttgagcattagacatgttttaaatctatttcttcgtttaatatcagttgtcttctaagaagtgtttctcatcaaaatggaaacaataaggcttagatatttaagataaaatgtaagttttaagctagttattgtaatgatttacttagtaacttttacttagtaacttatgtgtaacttatgtgccttccagtacttgagagttcctaattttttttgaaacctttggctgcagttcagatagctgtccttgtttcttagcatggcagtgctcttgggtttggtatcatccattctgtcatctttgttcataattgtttttactcattttaaaaatatgtttccagaattatagttaattgctggaaacgttgatttttcttgagtgacaaaccaattaagtgtgtatgacaccaggcaacaaagacacttaagattctgcgcttttcctgtctctgaaaaaaatccattattcatcatcttattgtttttaaatactgaggtaaaattttcagtacaataggaaaattgccttggaaatggaataaattgcttgccagttcaaaggctccatttctggagttgaggttacaaaacatgatgttgcttatattccttatctttcagaactcgttgtgctgcgtttcccgcattaaacttgataggattgtgacttttactaaaataagacataactgttgaataacttaatgaaaaagatcaaaagtctcatttagggt

SEQ ID NO: 7783 - DNA, 6000 bp, Homo sapiens
gtttctcatctcctccatagcaacattcatttcatcctgcccccattccaatccctgatacctagttgcatgctctggataggcacctggcaaatgttggggatcagctgacagcttgtctgtaatccaagaatatttgtggagtccgggcttatagtatttttgtttgatagtgaattagatgcattttcattcacttatgttcctgttcttccaagagaagccaagaagcgttgattgtcccatcagccttccttgtactgtcttcttttcataagccatcacttccatttgtattgttgccagttgtgcatggtttagggctcactcacacatttttcaggggatgattgtgcaagaaatgttgatgttttccagtacttttttggtctcctcaatggtttcttcttttggcttgtgcaagaaaaaaatctttacccctgtcctcactcccatcaacacacatccatacatgctttggggcctctctctgcccttctcttctggaatccactgacaatgagcaaagaactgaaaggcagaatcctgtcttctctagacaggcacttttcagcttttacttatcattgttttgaggtgtcaagagttttggagatttttttcccctcctctttctctctcaagtcaggcccctccagaagcctgcctctccccttggcaggtgtggagaattcacctgctttttcggtcacttcctgtgcactctactgccttccctggctgctcagaaaacatgggccttggagcaacttccctcgacttcctctctcctctagattcctagccagcagccggtcaagaggcagccccacagtcctctgggcggcagtggccggtgattaagtagccaggtctttagctgattccatccttgtttgtcataactctgctgcaagttattttggtctctgtgacttgtggcggcaccatgattagggtttgattactatcaccaaagcgactaaaagatgaaaatagaagccacaacaggaaataaacaactgcaaatgagctattttattccatattccctgccagcaaatgattagaatcaaactcattcacaatagtttggtgaactcttaaacttttttcttaagggtcagaatagtctgaaactgcgtgtttgttggcctcctttgtgcctgtggaagggaaagaaagaaactacctttctaggcacaccagcctgctgggaattcctctactgccaggcttctggcttctttcttggagaggagagggataagaatgtgatggggtggggctatcaggaaagctgggatgttaactgattcaggggatgccagggagctataaagcagcaccaatcattgtagctacttgctcagcaccgcacccagcttctacctagggtagcaaaatggaagaggaaagccgtgtagagaggggtgacacctgaattaatacacctacaattacactatacgggaacatatctctgcaagtacatgcatgttccacccagacaaaccgtgacgtcagactccactcttgaaacacccatgaaacctacctgccctgtgtgtgctccggcctctcattacagagccttagcactactggccagatctccaaaagattcttcagattctccatttagccaagaaactgaattagaattatgacctctactttctctgcttatttaagtcctttctgttgctatgaagcctggtctgaccactctcaataagtgaagatcttttagggagatccagaacagagagggaatgggaccctagagagcggaaacttgcccagaaaatcttataaactctgccaagtgctcgcctaacgtggggattgctgttggccctagttgcttaaccagtgagcggcaacgccccagcctggaatcaggttttctgacctctagtctggtactctttctaagcctttctaaggtgaaaatatgatacatttcccagacaccttaaaaatcccatttctgggccgggcgctgtggctcatgcctgttatcccacactttgggaggctgaggcgggtggatcgcctgagctcaggagttcgagactagcctgggcaacacggtgaaaccttgtctctgctaaaatacaaaaaaattagcgaggtgtggagtgcacgtgtagttccagctactagggaggctgaggcaggagaattgcttgaacccaggaggcggaggttgcagtgagctgagatcatgccactgccctctaggctgggtgacaaagcaaggctccatctcaaaaaaaaaaaaaaaaaaaaaaatcccacttctgtctctttcgtcttcccttgcctatcatgataggcctcccaaagtgctgggattacactccttctccattctctcctgtgctttctcagctgctgtcttcacaggttgcttcttagaatgtttttttaatacacacacaaggtttcaatgcccttttatacaagccatattttaatttacaacaaaattatgatgttatacaactgcagcttatgtggccttacacagtaaatgttcagaatggcagcttctgtccgtccagtagggttctgcactgcttggcatcctactatcttccaagtcaataagtgttaggatctccttgcctggaaatgatcatgtaagcaatgttgctgatttcctcttgaatttatattaccaaaggtacttttggtggggtggaggaagggtccaaatgccccttaagccctaagtgttgatttctaaatatttattaagcatctactattgtactaatatgttagaaatctttttaattgctagagggggagaggacttgagctctaaaggcggctaagattcattcctgccttttccttttaagaacatataatttagccggcaagatgtacatttcatctttacttttctttttttcttttctttttttgagacagagtctcactctgttgcccaggatggagtgcagtggcgcgatctcagctcactgcaacctccgtctcccgggttcaagcaattctcctgtctcagctgggattactggcgcgcgccacccgcctggctaatttttgtatttttagtagagacgggtttcaccatgttggccaggctggtctcaaactcttgacctcaggtgatccacctgcctcagcctcccaaagtgctgggattacaagcgtgagccatcgcacctgggcacatttcaccttttctaaagattattttaaggccaggtgcagtggctcacgcctgtactcccagtactttgagaggctgaggcaggtagatcacttgaggtcaggagttccacatcagcctggccaacatggttaaaccgcgtcactaccaaaaaatacaaaaattagccagatgtggtggcgcgcgcctgtagtcccagctactccggaggctgaggtgggagaatcgtttgatctggggaggcagaggctgcagtgagccgaaatcgagccactggactctagcccgggtgaagagtgagactctaaaaaaaaaaaaaaaaagaaagaaagaaagaaaaaaagattctttaaagcccccaacgagtttcactgctggcctgatctcacaattctcaatggctttttaaaaaaatcgtatttcactgaatatgaagtgaggttagatcaccatgccaactagtggcctcatcaatactgatgtgtgtgtatttaaatcattacgtttctcggagccatcagctttcacgctgtaaatgcgtttatgccctagcaatgccatgcccgtttctatgcagtaacccgccagcttgggtatatgtttcttcgggacctggggtcaaggaataaactctctgactctaagcaccttgaaagctacgaggcccagaaacagggcctgcatgcaaatgaatgccctaggcaggtctgctcgctgggtaaccttcccgcgccgggaggcagggtggcgggtggcggaggtcttccgggcccgggaggaaacctgcccgcggcgcgcaggcgagcccccacccccgctccccttctcccgccgggatgctgcccctcacagctcgtcagccggccaaatgcattccagagctgtgcacaagacacacttctccaggcagtcctagaaaccggagcccggagctgagagggcgggagggagcgcgcggccgccgctgaggtcatattcacgccgcctccccgccctcggcggctgttcccctcagcgcacacttcccagggcctcggtccagtccggtataaatgtcttttaaaccgagacagcgctctcctccccttgccctcgggcgcggccaagggatccaccgccagggcctttaaaacaaaaccaatgaatgaagcgctagggcgagcgcgcgcgagatggccaccgcgaaacccagccgggtcgaaatcgggccaccgacccgctcgctcagctccaaaactcgcggcgaagcccgctcggtgctccctgcttttccaatttctccatggctccggccggggctcaatccattctgggagcttctctgccccccacctatctctctcccctccatcggtaccccctctacagacccgggagggggtggcggtggcggggggttggggggagaaatagcttttagaaacccgatctgttgtttgcgaaacacaatcgctttttttttttttttaaagcgacagggtgtctagacggccacgtgacgaggccggagccgggcgcgccactgcgcagtggaaccagccgagcagagggccggagggggggtgcgggggggcggggaggaggcggcgcggctgcggcggctgggggcgggggagggaagggggaggaagggggagggaagggggcgggggcgggaggccttgcgggaggcggtgagccccgggcacactcgcttgctgctcggcgcacggaagatcctgtccccgagccgcgccagccgagccagccgggcgccgtgctcggtccgctcgccgcgcgggagagagctgcccgagacagagccagtccgtcggcgccgagccgccgagcgcccggcccctgagcccctgagtgcggcgcggcgagcccctggcggcggcagaaggaccggagcgccaggagagggcggaccggggacaaggaggctcccgggcgcgacgaggagagtctcggaggaggaggcgccgagaggacaccggggcctcctgccgccgcagctgggtcgaggcgagcagcccatgcggggagcctcggcggccagccgcggccaggggaagggacatcggcggcccctgcactagcaagcagcttgtgcccggggggggcgagaacgcgcgacccgtctggggccctccgccgccgccgcgccaccctcccccgcgctgtcagccccgccgggctcagccgccgccgcagcatcttctgcccctgcgcccgcgccagcctcgaggaagtccccgccgaggacctgggcccccaggagcgcagggggaaagaccagagactcccctaaaccacccagatgcgcaggattgaagcggtctagccaaagctttctgtggattaaaaaaatacacgatttttttttttttttttggcagaagaaaaggagaggaagaccagcggggctttgcaaggaaacggggggatgtaactcgtggatacatttttccacccatcaaacatcttgttatactttgtaaacattttctttttttaaaccccagttccagccggacgcccccagacctctgaggttcgaggaggtggtggttttcatttggggctttgcatatttggttgttaggttttgcgagagccttcttattttgccagacgtctcatgcggggtgaagtccactcggccccctcccctgagtcttcgtgtgcgcggaattcgaggagatccggttactaaggatatagaggaaaaaaataaatcgcttgcttttttttttttaattgcctgcttctccccacccccaaattaagttgcttagcaagggggaaag

SEQ ID NO: 7784 - DNA, 6000 bp, Homo sapiens
cccaccctaccagaggcagcccccagctgcctccagaggtaatcactattctgttgtctatttttgaacttcatataaaatggaaacatatagttatgctcttttggatgtagcaccatttattgaagacacattactttaagcctttgtgaaatacacacacacaaagatacacaccggatgactatatgtgtgaacctgtttctggactttgtttagttccactggtcagcttgccttggtcagcttgcctttccttgcgtcgataccacatatctttataagagatcttgatatctggagggataatgtcttccagatctgttcttcttggctacttttggcccttgagttcttctttagactctattctgttccattcttctatttgtctatcttcacactaagaacacgctgttttaattatcgtagctttagagtaaatcttattatctggtgaggtaaaacttccattttcttcttccttaagattattttggctattcttggccccttgcatttttatttgtaaatggtagcatcagcttgtcaatttccactacaaaaatatggtgagattttgattgagattgcactgaattcatacatgactttgagaagcactggcaactttacaatactaaagtttccaagacattacatcgtatatccttccatttatttagctcttctttcattcctctgagtgatatgttgtggttttcagactagaggttttgctaatcttttgttaagaatttttcggaatagtttatattccaatgtttaaaaattttctagttgctgttgctatgtagaaatacaactgctttttctgccgggcgcagtggctcacacctgtaatcccagcactttgggaggccaaggtgggcggatcacgaggtcaggagatcaagactatactggctaacacggtgaaaccccatctctactaaaaaattagccaggcgtggtggcgggcacctgtattcccaactacttgggaggctgaggcgggagaatggcgtgaacccaggaggcagaggttgcaatgagctgagattgcaccgctgcactccagcctgggcgacagagtgactccatcaaaaaaaaaaaaaaaaatacaactgctttttcttatattgactttgttttcaaagacatctctaaattcaatttttttttctaatttttttatttttagagatggagtctcactatgttacccaggctggtctccaactactggcctcaagtgatcctcccactttgacttcccaaagtgctcggattacaggtgtgagccactgcacctagcctaaattcacttattaatctaatagttgacctgtagattactttggattttctatgtgtacaatatattggctataatatcaactttgtttcatcctttccaatcattataccacttcttaattttcctcacttgttgctataactatacagtatagaacagaagtgatgatagtggccatccttatcctgtgtccaagctcaagtgcgggtgcaatcactcagaaaactgttcagcagtgtatgatgaacatatagatacactgcaatccagcaatcccactcctagacatatgcccacaagaaatgagtgtatgtctaccaaaagacaaggacaaacatgtccttaatggttctcttcatgagaaggccaaactggaaacaaccaaattcagaacaaataaatggtagtagactcaaacaatcatatgctatttagcagcaagaatgaacaaactattcctacaacgtggatgactctcactaacttgagcaaaagcagtcagacattaaaaagcacatattatataattaaacaaagttcaaaaaaggcaaaactaatctacggtgttagagggcttggggctggttactcaagggggaggatttaggatggcgctccaggggctttctggaggagagataaatttcctgttcttggcctgagtattgatagacagctatgttcactctgtaaaaactccctgagctatgcacttgtgatttgtgtgcatttttgtgtatatttcaattaaaagtttattaaaaactacatatatttaactgaagttcattctcactgtaatctgtacaatctgaatttgtataacaaatgtctgcccagctctataaatgtacagctcttgtagacaccaggcttttaggctgtattttgatatgcttgtgcctctgaagttctagctataagggtagtctgtttgtgctgctataatgaaatagctgcaactgtgtcatttgcaaataacagaaatttatttctcacagttctgaaggctgagaagtccaaggtcaaggcaccagcaggtttggtgtctgctgaaggcccattcctcatggtgccacctaggggccttcacatggcaggacagaagggcaaaaacggcccaagctaattccctccagtccttttatgaggcactaatcaaattcatgagagcagaaccctcataacttaatcacttccccaaatgccaacctcttaatactgccaccatgaggataaagtttcaacgtgaattttggaggggacaccattattcaaaccacaggaggggctatgggtagtaagtagagttttctctgaaaggggtataaattatacattgaggggagagagcctcttaaacagtatactaaagtgcagaaggcaggccttgttccagtgaaagaagggactccaaactctcgctatgcttcatttcctttggtctagagcagtggttcccaaacagggattgaaggggccaaggagtaagttgaagacattgctatgaatccaaatatgtaatccaccaagcattatctgtaaaatgagtatctcatacatatatgtactattatttaaaaatacactttgctacttaatttcataattcttttaaatgaatttgtaattttttaaattaatagactttgttcattatatatttcctcaaatatataaacagtatgcacataaaagtatgcctactatcaaaggactttgaacaatttgggggcaatagggaagcctgacattttaaaatcctgagaacttctgatcttgacttcaaaaggggcaaaagtctacatttggggtcctttagaaacagcaagctaggaactagttgggttgggagtcacatatgtcggagagaccaagtcatatcttgtcagcaggatatctcgaagcaagttaacctctgttttctttttacccccgggcttcagtgcagccctgtataggtattcttctggagcaatcattctcaaactctgggggggcacaggcatccccaggagagcttgcttaagtagtctcctggggccccaacaccagagattctgattcagtagtttggggtgaggccttcaaatttgcatttcaaagaagctcacactggatgcaaatgatgctggtgtgagaaccactgttctagattcttcgctgcactcagcaaactaagataggcaaatacagctcccggaaccagagaggctgacaaatgaattccaaagagatgctgaatacttggcgataagaactgctgctttgagataaagatgctcctcctttgtagaacacagtattttttggttggaaagcaatctgatgagcagactaatgcgaacattcacaggatattctgggagataccatgcctttaatcaaaataatcagattcaatgacagaatttcagaaccaaggaccattagacattgtggggtctttcgggggaagctttcctgtatctctaaatcatactatgtaagtagaaagcttgctgactgcttttttgttaatacgatttcttctagcttccgtagccaacttttttttttttttttctggctagggttttcattattttatgtgattaaggacacttttctgccccaagtattgtaatcctctcggccggctctgtccaaaagaactgtcttcgatgatagaaacgttctacatatgtactttgccacatagcagccactagccatacatggttatggcacacctgaaatgtggctggtgccactgaggaattaagttaatatttaaaatttaaatcccaatactggacagcacggctaaacctttcctaacccttcacgtttcttatgaagattatatagcaggatattacaagcactaaaaaagaactatcttaaatctgaagcaagatgatttccctaactagtacgtttgtttggtaaaagaggacgtgctattttttacagttaaatctaattcgtaagttgtagaacgttttcttaacaaggtatccctctcccaaattccgggagaggctggctgcctttccttttgctccagcggtttatttggcataaaatctgcaggcttacaggagctgacaccagggcagaaaagaatgaggaatttgtttccaagttggtcacaggccgctaatctgacctagatgatgtttaaaataatattcaaatacagcactttaaaaaactatgaaggctgagaagaaaacgagaaatgggaagcaagaaggaaggcggagcgtgccggcgacttctcaggggacttcctcagggagtcccattccagtaaccccgcgctacccacggaccaccgcctctctcttgtcggaagacgcaagcccaaggggcggctcacctcgtgccgcgcgcagggaccacggccgccgggtggtcccctggccccgccccctcccacctgggcaccccgagccccgccccccgagcgccccgccccgccccgccgccgacttcgcgccgcgctcgggcgccgagtctgcgcgctgacgtccgacgctccaggtactttccccacggccgacagggcttggcgtgggggcggggcgcggcgcgcagcgcgcatgcgccgcagcgccagcgctctccccggatcgtgcggggcctgagcctctccgccggcgcaggctctgctcgcgccagctcgctcccgcagccatgcccaccaccatcgagcgggagttcgaagagttggatactcagcgtcgctggcagccgctgtacttggtgagtcgcggacccacgcggcagtcgccgacctcctccgagacccggactcgtgccctgtccgcagggtccctcccgcctcccccgcctctcgcctctagcctctcgctcggggcggaagtggcggcgcggtccgcgtcaggggcgcgcctgcgctgaccgctctcttgctccttttggtttaaaaaaaaaaaaaaaaaaagcatacttgagctgagcagctcatggttagcgcaagcgcagttagttctggagggcggtgccacagcggcttcttggggagcgcgtggatgcgccaccagcgttgcgcggcccgggtctgggggtccttgggaaagccgtgggggcgctcgggcgcgcgcccccgggccgcagcttcgccgtagctcccacgccgctgtgcttggttcttgctcgcggacagctctttctctggccgggtgttttgtggccgggtgggcagctggcgtccccgggagcggtgagggcgggggcgggcgagccgggccgcggcgtccgggtccagctggcgcccgcgcaggacctgtgggagcaggccgctctgggcgccgggccggccgccgcagccctctgcgaggcgaagctcgctctcctggcggagccgcggtggttgggggtggctcgtggcctctggcgagggcagcgctctcgggaccctccgtcttcattttcccccgtggcccagcagcgcccagcgtgggttcggcccccatagaaccttcccggaacgaaagaggctttgcttgtgttcgtccagtgatagcgtgtcattctctttatagttttccttactgaggtatactttccctacagtgaaacgcagctttcatgtgtgctcccagacgggtgtcacaaatgaatcccctcttgcaagccccctcaaatcaaaatagcctttccttgccctg

SEQ ID NO: 7785 - DNA, 6000 bp, Homo sapiens
ggccgggagcagcggctcacatcagtaatcctagcactttgggaggccaaggtgggaggatcatttaaatccaggagtttgaaacagcctgggcaacatggtgaaaccctgtctctacaaaagatacaaaaattagctgagagtggtggtgtgcccgtggtcccagctacttgggaggctgaggtacgaagactgcttgagctgggaggtgaaggttgcagtgagctgtgatcatgccactgcactctagcctgggcgacagagtgagaccctgtctcaaaaaaaaaaaaaaaaagtgaggaaaaatttttttttaattccttgttcagtttccttgatactagttttggtaaagtctaagactaagacagtattggcaaagtgtgtaggagttaggaaatgtgatataaatagatatatgcttagcaaaagaagtaaagtggcttggaaaacatctgggaggcctgagcactgttatagggagagaggaagtaatcagtgggaaggaaaagagagatattaaaatcagtaaagtctaatgggttcagagacagatgtgaaaggattaagaagacaggtgcttggaactaaactcaaggttacatggttggtccaaccaggttggaatgctctttgctaaaattactaggatatatcatatggttcttaattatgtttcttaatgaagtgcttttttttttttgttatgtgtttatcagctgtttagattcaaaatcagcttagctgtttagatacaaaaaatttaccatctttcactttataaatttacagagtacactcatacacctgatctatcagatcaggtatctcatcctgagataggtgtagtcatttttcttttccagattagaaaaattaagttgagactttgctaaagttacacagctagtaaatggaaaagctactcctgagatttttgacttcgtgtattaaaatcttatgacactttatgccaggcgcagtagctcatgcctgtaatcccagcactttgggaggccaaggcaggtggatcacgaggtcaggagttcaagactagcctgaccaagacggtgaaaccccatctctactaaaagtacaaaaattagctgggcatggtggcgggtgcctgtaatcccagctacttgggaggctgaggcagagaattgcttaaattcgggggggcagaggttgcagtgagccgagatcgtgccactgcactccagactgggcaacagagcgagactccgtcccaaaaagcaaaaacagaaacaaaaaacaaacaaacaaaaaaacttaggacactttaatcacagtacttataatgaatcttctaatttggagccattttaagacggtagcctagtcaggtaattgcctggagattcaatccataaagagcactaaaacattttaccattggaaatgtaataaagaaaaaggatatatttaatagaattcctctggtagaagagttcagcatgtggctggcactggtactttgatatgtggccttttgtgagtgataagattactgcacctccctccttctccactcccctttaagggtataccacattactatgttataaggaagttggattcaagtaagtgcagggatttctttttaatgaggatatataaatctagaccagagcagaaatgatcacaacagtgaagagaaacatgccctttctaccctttaccactcagccattcctttgaacatatattgaatgattattggggagtatagattagaaaaaatgccaaattaataatctggtctggtgagacaaagtagcaccctatttcagaattctttctattgcaactaatagaaatctcaactcaaacaatctaaaaccttacaagaaaggcattggctcaagaaaactggccagtacagaggcagagtgagtatcaaagtcaatgctgagattttgtgtgtgtgtgatttttctgctcacaagaagggttggttctcaggttggctcttcactgtagcaaaatggcgagtgttccacatgccagaaagtcttatctctaatcactgaataaatgtcctaggcttccctctgattagcctaccttagggcacgggtccacacttgatctacttggcaaagcctataaatgctcagtactaatcagatttatatgcccagttgtgatctaatactgtggccagaatgacataacagtccttaatgactcaggccagtctagggcagcacctagaactctttgcagtcaaacctacccaacccatccaggagctgctacacattgaggaaggggcagaatgaatgctgggaagcaactacaaagaacactgcacgtaagtttcagtggggctttgcttttcttttcttactgttttgtgtttatgttggtcctctttatgggtgtaagctcctctgtggcagggctgtattgtactctattcgtctattccccgaaaactcctcccacagtggcattcacttaaagcctactaaacaatgttaaattctactgaggtgtaaatcaaggtctacggagaataaatcaagagtaagaataagccaagcgaagatcacaaagttaatggtggagagacagatttagaacctggacattgttcattcattcctttattcattaaacaaatacaaggccaactatttgttaggcatttatcagccattatagtctagtgggtttacaattttttaacataaaattttaaaataataatttttattttttgagacaaagtctcactctgttgcccaggctggagtgcaatggtgcgatcgcagctcactgcaacctccacctcctgggttcaagcaattttcctgtctcagcctcacgagtagctgggattacaggcatgtgccaccacacccggctaatttttttttttttgagatggagtttcgcttttgttgcccaggctggagtgcaatggcgctatctccgctccctggaacctccgcctccagggttcaagcgattctcctgccttagtctccggagtagctgggattacaggaatgcgccaccacgcctggctaattttgcatttttggtggagacggggtttctccatgttggtcaggctggcctccaactcccaacctcaggtgatccgcccgcctctgcctcccaaagtgctggaatttagagcgtgggccacagctcctggcctaatttttgtatttttagtagagacagggtttcaccatgttggcctggctggtctgcaactcccgacctcaagtgatccacctgcctcggcttcctaaagtgctgggattacaggcatgagccactgcacctggccaaaacaatatgtgtgtgtgttgtgtatatatacacaacacacacacacacacacacacacatatatatatatacacgcacacacatatatatcaaataaacaattacacaaatacctacataattaccatggagacatctcaggaagaaaaagttcagggtcctaggagaggtcataacaggggaatttgaattaaaatgtgggatgtgggtgagggatggtcttcctgaggaagtgacacttaaagtgaaacctgaaggatgaacaggagttaggaacaaagaagagagtgggaaattattcttggttcaaggatcaacatttagaagccttaaaacttgaggggaggccgggtgcagtggctcacgcctgtaatctcagtactttgggaggccgaggcgggcggatcacctgaggtccggagttggagaccagcctgaccaacttggagaaacctcgtttctaccaaaaatacaatcgcagctactcgggaggcggaggtaggagaatcgcttgaacccgggaggcagacattgcggtgagccgagatcgtgccattgcactccagcctgggcaacaagagcaaaactccgtctcaaaaaaacaaaacttgcggggtgcgggggcaggggagtggaaggaagacctggaagtgcagtgcggatgaaacgaggggtagtgggaagaggcggtaggtaggaggctgattaaacagggccttaaaagttacattgttttaaagacctctcgtgtgtgggttccacccaattcttcaaggaaattgaaccctggacaccgtccagcgatttttctggccatcttgactcagcatcttccttcatcctatatcagcacattacgggggggccatcaagcttccttctatctacttactctgccttggcgtttgactccttcctagctatcagatttccccgactttttagcatggcccttctgagcgctcttatttcacttctccccgcccccaaccccaccgcctaactctcccaactctgcagtccgtgaccttcaggtgcccttcaaggtcagaaaaactcggcaaggttggtacttgcaggacattagcaattcaaagaggtgtcacacaacctcaccattagatgggaacaatagcttacccaacacccatatttagattattccgccacaactactctgggggatggttttatttgcggcggctttctccgtccataggcaccgcgtgaagggcaccgtaagaatcttcccgaatgctcctgtcacgcgtcccggccgcctcttcttcctccccgccacttcccgaggccaggcccgcggataacgcctcagttgcgacccagctctaggcagtccgcaggggcctccgccggggagggaaggcacgacctggggccgagcggggccaagccgcggggcagcacgccggggcaggcgcgggcgggcgctgtcgccgcgcggactgaaggcgcgggcggaaggcggtcgcgcgggtgggcagggggcaccgctaggggcggggcttcggcgcgtcggaggcggagctcccgcgccgttcacgtgacgggcccggctgtagcggcggcggccgcggcgtcttaagcggcgcccagtgcaggatggtgctggaggcggcggcggccgtggtggcggcagcgtcgttggcggcagcgggagtgggtgcggcggcagcggcggcggcgcccgcgggtggtataaaatggcggatttcgaagagttgagggtaagcgggagtggagagcggaggccgcgggggaggggatgggagaggaggtggggaaaccgcaacgtcgccggccgccgcctgctcgtgcctctggggccggttggcggagccctgagccccggcccgcggacgaacgggcgccgagggcgcgggggaggggagcgggccggcggagggcacgcgggcggcgcgggggcggcgggcctgggccgcggcgagccggctcctgagtgctgccagtggtccgcacacctggcgcggggggtcggggcgccctccaggaggggcacatggggacccgacatcccggttcgcagtgagggccgatgtgggaagcaacgtttgatcttgcaccttcaccggggtgtacgtgtctgtggctattcacaagtctgcatgctactcacttggtggaggactgttttctgaaagctgaagttgcgtttaggaatctctcctcttcttatggctgatgctaccgtttagtcaggtctgtcacgagaaaaggccccttctcccacccttgcctcctaacatcttcgaggaacctaatgtttggggatccctgccttcaataatcggccttaaacctcgatattttcttagtgttttagtaagaaatctgcaaagtctatgttgtgaggtttgtgcaccccttttactcttgaggaaaaatatttttttcttctcagtcttaaaacaagatcataactttattgttgatacccttgtatagcagaggtctggaatagggctgtgatgggggtagaacagaagagactttttccccccagactgataacctttaaagtcctaactaagtgtgacgaatgagatggatttgtgtgtatcgctgaattactggcgacataaatgagatgtttacggacagaaaccctgattttttttttttttaaatgta

SEQ ID NO: 7786 - DNA, 6000 bp, Homo sapiens
aattgtattgtaattttccaaataatatttgaacagtcactgagttatccaatgatctattcatctaatcattatttatccatttaagtgtagagataagaaatataatagtaagatgcctggagaatgatgagaaatataatttgttttgccatatatttttgtctttatccgagccaacttctcttttaatctctttctctctttaattataaaaaatcctgtcttattttttttgagtgactttggccaaagagtgagaattttccactatgatcaaccaatgcttctgtggtaggtgcatgacagacacctgatgaacacttgttacatttgaagtttttttctcatatatgccttattcctgtctcctgcatttcctatcagatgtgaaatactatttctttttagcaaaaactaacatgaataaggattgtgtgttggggggggcgcatatgttcaaatctgcaacataaattcatttggaacctgaaatttcattgtatcaatataaatatctagctggtgttggatttcttccttattatttacaataaaagtaagcccatgcatttgttctttaaaatttttacttatctcatttaatcagggtcctctcagttgcaaataactggatctttccttaagatgtagtaatgctcactgcaatttaatcccactaggatgagcaaatgatgttgaaaagagacccaacagttgtatggagggccactataaaccggaagaatgggcgcaaagctgtgtagaatgtttgcagatctgtgacatgtttttcttttatacaaatgctgtatttcatctttcttcaattacttagtattttggtaagggtaggggaagacaagtgaaaataagttgtccttgtccttcaggaacttacaatctagatggggagacaatatatatacacaggagaagctggaaaaaaaaactgctcaagactaaatgaatggtatgtatatcatcgtaagtataagagagaaaattcatatgtgaatggtatagctttgggctggggaagccagaaagggctttaaagatttaccagaaggggagaatatgagttgttttttgaaagatcatgactgtgtgtgtgtggtgtgtgtgtgtgtgtgtctttgtatgtatggatagagagttcaatgaataaatgagggtactgaagctctatacagagcttccaaggatgagcagaggttggtcaggcaccatagggcaagtgctttctagcagaacaaagagcacagcataggcactggggaacgagagaacatggtgattagggaaactgtcaggagttcattctggctggggaaaagggagcaaggtggggagtgttgagatgtgacactacagagactggcctgggatggatcattaaggatcttttaggttatgctaaacagtcttgattttaccctggggaaaaaaaaactggaagaaggaaactatcaatcaaggtagtgatatcagatttacatttagaaaatatgctattaaaaaaaattctggcagcaggaaggaggatgaattggaaggcagcaagagtggaggcaagaagaccagctgaggagctaaagcagtacttccaatgaaagacaatgaagtctgaaccaaggcagtgagctttttcaaaaaaatcaaactacagaagaaataatgatgaaatttaaattttccacttatgaccctcaggctctttccagaagcaaccaccattatcatttttctttcgtgtctttccagtgcacttaactacttttgaattggattctgaattgatttggatgtaattgattttgcagtgtcatgtttaatgaagggttaaacttggtctctatccatataaaaataagactcattcaatctaatttatacaatagggacctactgatagatcttgaggtaccctagtggatttccaagctgtttgttgccatagcaatccctgctctatgtgccttcagtttctgtcttgacccactttggtttagatgcatttctagcagaggggacagtaggcatgctcccatttctaagccccttggggactgcattggtagccagattgtcccttctccctcttcctcaattgtagatcctggaaggcttcctaaatggaagagttatggacccaaagtctgagactttggagaaatggtctaacttagacctcaggcgtactacccacttaattaatgtaacctcaaagtacctaacttccatactaggagcacattctggaatcccagccaggcctgctttggttcctatttctactactcaggtggacacccaaatccacaccctgttcacacaggagaaaatacttgtgtgaccagggtagcttttaatatgctacttcatattacaactgttgacttgtattagcaggaagacagaccaaaaacaagaaacagccttcctacttgtaagttgaacagcctttgccctggaccgtcctccctagtggctctggaaagaggaaacaaggcagaggaggtgggacagctccaccaaatggcttcctgggtgtccttcacaaacttttttatttttattaaggggttagtagagctgcctctaaactaacaatggaagaaaccaccctggaagggaatttttggaggaagaatttctgctgagtaggttcgtctcagcataaatgttcgcacgcaacagaagagaagttaatgatcactgactttccttgaacttcaaagccctatgttatttactttcatatttattatttaatcatcacacaactatatttaagtaggtatcgttgcaggtgagttccatttgccaaagattacagatctggaacagagtcgtactcaaagctacaacgtgcctgactcctgggtttatgctcttcatcgcaaccttcccgtgagaaaagttcctctatgtgtgaggacagagacggtggaaaggacagagattttgaaaggacatctggaaaacttgtatgactcaggggatggccacatctctcttaaggtccatctgaaggcaccctcctctgggacacgttcatttctcagaagaaagcgtatacttcaaaaactcttactgtttggagtgctcatttggtacttcctgattaccgatttgtattgctagtgcttctttcccgcttatttgaagtccccaattaaatctataaactaagccacacatgagaatgaattactggacaggcagccaaaaaaaaactgtgttctagtcttgtctctggcacctgtgtgaaacctaagtttcttttcaactttagttctacggtactccctgcctgtgtcacagtgggtgcatagtaaacacctgatgtgattagttgggctcaatattttgtcagcagaggcttgggtgttcctaagggtaaccgcaacaaggttttccctgggtgcagttatgttctgggcagccgtaagtttagggccttgctgcctcctgtagggcagatgtgcaagttggggcctaatcgtcgcaacagtggagaaaaggggaagggaagatatcccagccattaagggacatcgtgacagatgtttcttttagacttcacaaagacccttcgggacatggattattgatatcatttttactgaagacggaaccaaaatttaggttaaacacttatacctggcatcccctacccgggccctaagtgctctccaaagaccccacctctgggcttatttacatcgcgaacccgccctcgttcagcaacacgagggccccgcccgctcatttgcatagggcgcgcccagtcacgggccgggtcctcgggcttctcccgaaccccttttctctctcaggcgcgtcctccgcgctgcgcggggcctccccgtgggatgagcacgtgtccgctgccggcctcacgacggacggtggacgaggcggcaggcccctacaggccccacccacgacgctggcgagggatcgggcggtcaccgggaatcgtcttaatgcgcggcaaggcgcgggcctctccctctccgcccgtgagccccggtgggagcgcgccggcgcccaactcaagcgaaaccgcgggcgtcccgccccgcccggccgcgccccgcctcgcctcacgctagactggggaggcgggaccaatcagcgagcgacgtctcccttccgattcgaggcccccgatgcgcggctcacaccccgagcttccctcgtgctgattggctgcgggcgccgccggtccggccgggaggcggggcgggccgtaggcaaagggaggtggggaggcggtggccggcgactccccgcgccccgctcgccccccggcccttcccgcggtgctcggcctcgttcctttcctcctccgctccctccgtcttccatacccgccccgcgcggctttcggccggcgtgcctcgcgccctaacgggcggctggaggcgccaatcagcgggcggcagggtgccagccccggggctgcgccggcgaatcggcggggcccgcggcccagggtggcaggcgggtctacccgcgcggccgcggcggcggagaagcagctcgccagccagcagcccgccagccgccgggaggtgggtgcgtggcgccgcggcggccggcggccgagggcggagggcggaagcggaggtgggctggcgggggagggcgcggccgtgcgggcggccggtagggctgcgggcgcgcgcctgaggggaggaggggcagcgcgggcgcgcgcgtcctcaccccctccttccccgcgggcggcggccaggctccctcccctccccttccctctcctcccctcccctcccctctcttcccctaccctcccgcgcgcccgggccgccggccgggcccgggcctgggggcggggcgggaagacggcggccgggagtgttttcagttccgcctccaatcgcccattcccctcttcccctcccagccccctccatcccatcggaagaggaaggaacaaaaggtcccggaccccccggatctgacggggcgggacctggcgccaccttgcaggtaaagcctgggcgcccgcgggcctccagctagggaagtgtttgcgtgcgtccgcggccggggcgatgggccgtgtcacatggccgctgcgggtgggggctggggtgtggtgagttcgggggctgtgggtgcgccggcccgggcgtgcgggttcggggccggagagccgggaagggacggggctcggttgcactgcgctgccgcccaggctgacgggggcgggggctgcctgcgtcccttcccctcgctgctctcacactccatagtttgtggttctgatttttaaagccgaagggccagagctcttgtttcaggagttgtggggaagccttgttagggacgcgtaatactttgcctccactttttttttttggtctcgtaacctttgttaacagtggtagtctcgggttttccatggcttgtgtgtactcacaaacacgcacacagctgataactctgtgatcatccttcactcacttgtgaaagttgttctgcgggtggagcctattagtttttatcacacgcctttggaaagccctcgaagtgatttctcgtatttcaaacttggtttttaaaattgcaacttactttgttctcttggagggggatattgtctttgggtcaggtacttttgtcttttacttatccttaaaatgtccttttgatcctaaacagaaaaagaatgcctgggttggttttgttattcctttctcttgaccctttaaaagcaaaataccaccagtgtgttgtcaaccatacctttaaaaaagaaatttccaggtaaaacgaatttgcaagcagcattttccatcaaagtcatgtcttgtttgttgcaatttggactatcttaaatttgggtttgtgaaacttttaaaacgacatgtgtaaaataattgttaataaataaataacttggaataattacatctttttagaaatggtctttgaaatgtgatttaatttccaaaattcttt

SEQ ID NO: 7787 - DNA, 6000 bp, Homo sapiens
acccagacaaaccgtgacgtcagactccactcttgaaacacccatgaaacctacctgccctgtgtgtgctccggcctctcattacagagccttagcactactggccagatctccaaaagattcttcagattctccatttagccaagaaactgaattagaattatgacctctactttctctgcttatttaagtcctttctgttgctatgaagcctggtctgaccactctcaataagtgaagatcttttagggagatccagaacagagagggaatgggaccctagagagcggaaacttgcccagaaaatcttataaactctgccaagtgctcgcctaacgtggggattgctgttggccctagttgcttaaccagtgagcggcaacgccccagcctggaatcaggttttctgacctctagtctggtactctttctaagcctttctaaggtgaaaatatgatacatttcccagacaccttaaaaatcccatttctgggccgggcgctgtggctcatgcctgttatcccacactttgggaggctgaggcgggtggatcgcctgagctcaggagttcgagactagcctgggcaacacggtgaaaccttgtctctgctaaaatacaaaaaaattagcgaggtgtggagtgcacgtgtagttccagctactagggaggctgaggcaggagaattgcttgaacccaggaggcggaggttgcagtgagctgagatcatgccactgccctctaggctgggtgacaaagcaaggctccatctcaaaaaaaaaaaaaaaaaaaaaaatcccacttctgtctctttcgtcttcccttgcctatcatgataggcctcccaaagtgctgggattacactccttctccattctctcctgtgctttctcagctgctgtcttcacaggttgcttcttagaatgtttttttaatacacacacaaggtttcaatgcccttttatacaagccatattttaatttacaacaaaattatgatgttatacaactgcagcttatgtggccttacacagtaaatgttcagaatggcagcttctgtccgtccagtagggttctgcactgcttggcatcctactatcttccaagtcaataagtgttaggatctccttgcctggaaatgatcatgtaagcaatgttgctgatttcctcttgaatttatattaccaaaggtacttttggtggggtggaggaagggtccaaatgccccttaagccctaagtgttgatttctaaatatttattaagcatctactattgtactaatatgttagaaatctttttaattgctagagggggagaggacttgagctctaaaggcggctaagattcattcctgccttttccttttaagaacatataatttagccggcaagatgtacatttcatctttacttttctttttttcttttctttttttgagacagagtctcactctgttgcccaggatggagtgcagtggcgcgatctcagctcactgcaacctccgtctcccgggttcaagcaattctcctgtctcagctgggattactggcgcgcgccacccgcctggctaatttttgtatttttagtagagacgggtttcaccatgttggccaggctggtctcaaactcttgacctcaggtgatccacctgcctcagcctcccaaagtgctgggattacaagcgtgagccatcgcacctgggcacatttcaccttttctaaagattattttaaggccaggtgcagtggctcacgcctgtactcccagtactttgagaggctgaggcaggtagatcacttgaggtcaggagttccacatcagcctggccaacatggttaaaccgcgtcactaccaaaaaatacaaaaattagccagatgtggtggcgcgcgcctgtagtcccagctactccggaggctgaggtgggagaatcgtttgatctggggaggcagaggctgcagtgagccgaaatcgagccactggactctagcccgggtgaagagtgagactctaaaaaaaaaaaaaaaaagaaagaaagaaagaaaaaaagattctttaaagcccccaacgagtttcactgctggcctgatctcacaattctcaatggctttttaaaaaaatcgtatttcactgaatatgaagtgaggttagatcaccatgccaactagtggcctcatcaatactgatgtgtgtgtatttaaatcattacgtttctcggagccatcagctttcacgctgtaaatgcgtttatgccctagcaatgccatgcccgtttctatgcagtaacccgccagcttgggtatatgtttcttcgggacctggggtcaaggaataaactctctgactctaagcaccttgaaagctacgaggcccagaaacagggcctgcatgcaaatgaatgccctaggcaggtctgctcgctgggtaaccttcccgcgccgggaggcagggtggcgggtggcggaggtcttccgggcccgggaggaaacctgcccgcggcgcgcaggcgagcccccacccccgctccccttctcccgccgggatgctgcccctcacagctcgtcagccggccaaatgcattccagagctgtgcacaagacacacttctccaggcagtcctagaaaccggagcccggagctgagagggcgggagggagcgcgcggccgccgctgaggtcatattcacgccgcctccccgccctcggcggctgttcccctcagcgcacacttcccagggcctcggtccagtccggtataaatgtcttttaaaccgagacagcgctctcctccccttgccctcgggcgcggccaagggatccaccgccagggcctttaaaacaaaaccaatgaatgaagcgctagggcgagcgcgcgcgagatggccaccgcgaaacccagccgggtcgaaatcgggccaccgacccgctcgctcagctccaaaactcgcggcgaagcccgctcggtgctccctgcttttccaatttctccatggctccggccggggctcaatccattctgggagcttctctgccccccacctatctctctcccctccatcggtaccccctctacagacccgggagggggtggcggtggcggggggttggggggagaaatagcttttagaaacccgatctgttgtttgcgaaacacaatcgctttttttttttttttaaagcgacagggtgtctagacggccacgtgacgaggccggagccgggcgcgccactgcgcagtggaaccagccgagcagagggccggagggggggtgcgggggggcggggaggaggcggcgcggctgcggcggctgggggcgggggagggaagggggaggaagggggagggaagggggcgggggcgggaggccttgcgggaggcggtgagccccgggcacactcgcttgctgctcggcgcacggaagatcctgtccccgagccgcgccagccgagccagccgggcgccgtgctcggtccgctcgccgcgcgggagagagctgcccgagacagagccagtccgtcggcgccgagccgccgagcgcccggcccctgagcccctgagtgcggcgcggcgagcccctggcggcggcagaaggaccggagcgccaggagagggcggaccggggacaaggaggctcccgggcgcgacgaggagagtctcggaggaggaggcgccgagaggacaccggggcctcctgccgccgcagctgggtcgaggcgagcagcccatgcggggagcctcggcggccagccgcggccaggggaagggacatcggcggcccctgcactagcaagcagcttgtgcccggggggggcgagaacgcgcgacccgtctggggccctccgccgccgccgcgccaccctcccccgcgctgtcagccccgccgggctcagccgccgccgcagcatcttctgcccctgcgcccgcgccagcctcgaggaagtccccgccgaggacctgggcccccaggagcgcagggggaaagaccagagactcccctaaaccacccagatgcgcaggattgaagcggtctagccaaagctttctgtggattaaaaaaatacacgatttttttttttttttttggcagaagaaaaggagaggaagaccagcggggctttgcaaggaaacggggggatgtaactcgtggatacatttttccacccatcaaacatcttgttatactttgtaaacattttctttttttaaaccccagttccagccggacgcccccagacctctgaggttcgaggaggtggtggttttcatttggggctttgcatatttggttgttaggttttgcgagagccttcttattttgccagacgtctcatgcggggtgaagtccactcggccccctcccctgagtcttcgtgtgcgcggaattcgaggagatccggttactaaggatatagaggaaaaaaataaatcgcttgcttttttttttttaattgcctgcttctccccacccccaaattaagttgcttagcaagggggaaagaggctttttccttcttccaacagcccagccgaacgcctttcgttttttgcccccgcggaccttccatgtaggaagccgaggctggcgagcccgacattcgggagccactgcgggggggcctctttttggggaggcgccgacgggggcaggctcggccgtccccagggaagcggcggccgggttcctccggggcgcgccggggccggagagccgcgcagggcgcgggccgcgcggggtggggcagccggagcgcaggcccccgatccccggcgggcgcccccgggcccccgcgcgcgccccggcctccgggagactggcgcatgccacggagcgcccctcgggccgccgccgctcctgcccgggcccctgctgctgctgctgtcgcctgcgcctgctgccccaactcggcgcccgacttcttcatggtgtgcggaggtcatgttcgctccttagcaggcaaacgacttttctcctcgcctcctcgccccgcatgttcaggaccaaacgatctgcgctcgtccggcgtctctggaggagccgtgcgcccggcggcgaggacgaggaggagggcgcagggggaggtggaggaggaggcgagctgcggggagaaggggcgacggacagccgagcgcatggggccggtggcggcggcccgggcagggctggatgctgcctgggcaaggcggtgcgaggtgccaaaggtcaccaccatccccacccgccagccgcgggcgccggcgcggccgggggcgccgaggcggatctgaaggcgctcacgcactcggtgctcaagaaactgaaggagcggcagctggagctgctgctccaggccgtggagtcccgcggcgggacgcgcaccgcgtgcctcctgctgcccggccgcctggactgcaggctgggcccgggggcgcccgccggcgcgcagcctgcgcagccgccctcgtcctactcgctccccctcctgctgtgcaaagtgttcaggtggccggatctcaggcattcctcggaagtcaagaggctgtgttgctgtgaatcttacgggaagatcaaccccgagctggtgtgctgcaacccccatcaccttagccgactctgcgaactaggtgagaagttgtccccctacccccaacattttccggagcgccagtgctggaagaaaagcccctagggcagtgcgtttgtgcagccatccctccagggggagtgtgcataccctcctgggagagtgtgcataccctcctgggagagtgtgcataccctcctgggaagagactgggggctgaaagtagagaagggacaaggggaaactcaaagggcattccctgggggttcccttccaggttttctcctgtgttgccccgaaggggtctacgggcactgctcctgcagtctgcggttaaaaattagacgccttcatttccggatcaacaagggggtgcagagggaggtgggggggtcacgcctccccgcacccggaaagacgttgaggtgtgtggccgagttg

SEQ ID NO: 7788 - DNA, 6000 bp, Homo sapiens
tgccctctctcaccactcccattcaacgtactgttggaagttctggccagggcaatcaggcaggagaaggaaaaaaagggtattcaattgggaaaagaggaagtcaaattgtccctgtttgcagatgacatgattgtatatttagaaaaccccatcatctcagcccaaaatctcctcaagctgataagcaacttcagcaaagtctcaggatacaaaatcaatgtacaaaaatcgcaagcattcttatacaccaataacacacagacagccaaatcgtgagtgaactcccattcacaattgcttcaaagagaataaaataccttacaaggtattgaatccaacttacaagggatgtgaagcacctcttcaaggagaactacaaaccactgctcaacgaaatacaagaggatacaaacaaatggaagaacattccatgctcatgggtaggaagaatcaatatcatgaaaatggccatactgcccaaagtaatttatagattcaatgccttccccatcaagctatcaatgactttcttcacagaattagaaaaaaactactttaaagttcatatggaaccaaaaaagagcctgcattgtcaaatcaatcctaagccaaaagaacaaagctggagtcatcacattacctgacttcaaactatactacaaggccacagtaactaaaacagtgtggtactggtaccaaaacagagatatagaccaatgtaacagaacagagccctcagaaataatgctgcatatctacaactatctgatctttgacaaacctgacaaaaacaagcaatggggaaaggattccctatttaataaatggtgctgggaaaactggctagccatatgcagaaagctgaaactggatccctcccttacaccttatacaaaaataaattcaagatggattaaagacttaaatgttagacctaaaaccataaaaaccctagaagaaaacctaggcaataccattcaggacataggcatgggcaaggacttcatgtctaaaacaccaaaagcaatggcaacaaaagccaaaattgacaaatggaatctaattaaactaaagagcttctgcacagtgaaagaaactagcatcagagtgaacaggcaacctacagaatgggagaaaatttttgcaacctactcatccaacaaagggctaatatccagaatctacaatgaactcaaacaaatttacaagaaaaaaacaaacaaccctatcaaaaagtgggcaaaggatatgaacagacacgtctcaaaagaagacatttatgcagccaaaagacacatgaaaaaatgctcatcatcactggccatcagagaaatacaaatcaaaaccacaatgagataccatctcccaccagttagaatgtcgatcattaaaaagtcaggagacaataggtgctggagaggatgtggagcagctggaacactttgacaatgttggtgggactgtaaactagttcaaccattgtggaagtcagtgtggcgattcctcagggatctagaactagaaataccatttgacccagccgtcccattactgggtatatacccaaaggattataaatcatgctgctataaagacacatgcacatgtatgtatgtttacagaggcactattcacaatagcaaagacttggaaccaacctaaatgtccaacaatgacagactggattaagaaaatgtggcacatatacaccatggaatactatgcagccataaaaaatgatgagttcatgtcctttgtagggacatggatgaaactggaaaccatcattctcagcaaactatcgcaaggacaaaaaaccaaacaccacatgttctcactcacaggtgggaattgaacaatgagaacacatggacacaggaaggggaacatcacacaccggggacggggactgttgtggggtggggggaggggggagggatagcattaggagatatacctaatgctaaatgacgagttaatgggtgcagcacaccaacatggcacatgtatacatatgtaacaaacctgcacgttgtgcacatgtaccctaaaacttaaagtataataataataaaattaaaaaaaaaataagttgagatcttactaaaggtctaaaaaaaaaaagttctgtatgttgataagaatttttctatatggactgaagtgtttacttcagatctaaggatttaactatattatatatacaatatcatatataatattatatattaaatatatattatattaatatgatattatatattaaattataaatcttatacagataaccatactgctatgctttcgaagtttatgtttcaactttttattatttatttatttttgagatggagtttcacttttgttgcccaggttggaatgcaatggcatgatctccactcactgcaacctctgcctcctgggttcaagcgattctcctgcttcagcctcccaagttgctaggattacaggcatgcaccaccacacttggctcattttatttctttagcggatagacatgaggtttcaccacgttggtcaggctagtctcgaactcccgacctcaggcgatccacccacctcagcctcccgaagtgctgggaatataggtgtgagccaccgcgcccagcctcaactttttattttttaattatttggtttttttttttaaaaggctagtcaagtgatgcagtgaaagtggagaagaaacaaatttgtgattaaggttttcagaataaaaagttgaggccgggagcagcggctcacatcagtaatcctagcactttgggaggccaaggtgggaggatcatttaaatccaggagtttgaaacagcctgggcaacatggtgaaaccctgtctctacaaaagatacaaaaattagctgagagtggtggtgtgcccgtggtcccagctacttgggaggctgaggtacgaagactgcttgagctgggaggtgaaggttgcagtgagctgtgatcatgccactgcactctagcctgggcgacagagtgagaccctgtctcaaaaaaaaaaaaaaaaagtgaggaaaaatttttttttaattccttgttcagtttccttgatactagttttggtaaagtctaagactaagacagtattggcaaagtgtgtaggagttaggaaatgtgatataaatagatatatgcttagcaaaagaagtaaagtggcttggaaaacatctgggaggcctgagcactgttatagggagagaggaagtaatcagtgggaaggaaaagagagatattaaaatcagtaaagtctaatgggttcagagacagatgtgaaaggattaagaagacaggtgcttggaactaaactcaaggttacatggttggtccaaccaggttggaatgctctttgctaaaattactaggatatatcatatggttcttaattatgtttcttaatgaagtgcttttttttttttgttatgtgtttatcagctgtttagattcaaaatcagcttagctgtttagatacaaaaaatttaccatctttcactttataaatttacagagtacactcatacacctgatctatcagatcaggtatctcatcctgagataggtgtagtcatttttcttttccagattagaaaaattaagttgagactttgctaaagttacacagctagtaaatggaaaagctactcctgagatttttgacttcgtgtattaaaatcttatgacactttatgccaggcgcagtagctcatgcctgtaatcccagcactttgggaggccaaggcaggtggatcacgaggtcaggagttcaagactagcctgaccaagacggtgaaaccccatctctactaaaagtacaaaaattagctgggcatggtggcgggtgcctgtaatcccagctacttgggaggctgaggcagagaattgcttaaattcgggggggcagaggttgcagtgagccgagatcgtgccactgcactccagactgggcaacagagcgagactccgtcccaaaaagcaaaaacagaaacaaaaaacaaacaaacaaaaaaacttaggacactttaatcacagtacttataatgaatcttctaatttggagccattttaagacggtagcctagtcaggtaattgcctggagattcaatccataaagagcactaaaacattttaccattggaaatgtaataaagaaaaaggatatatttaatagaattcctctggtagaagagttcagcatgtggctggcactggtactttgatatgtggccttttgtgagtgataagattactgcacctccctccttctccactcccctttaagggtataccacattactatgttataaggaagttggattcaagtaagtgcagggatttctttttaatgaggatatataaatctagaccagagcagaaatgatcacaacagtgaagagaaacatgccctttctaccctttaccactcagccattcctttgaacatatattgaatgattattggggagtatagattagaaaaaatgccaaattaataatctggtctggtgagacaaagtagcaccctatttcagaattctttctattgcaactaatagaaatctcaactcaaacaatctaaaaccttacaagaaaggcattggctcaagaaaactggccagtacagaggcagagtgagtatcaaagtcaatgctgagattttgtgtgtgtgtgatttttctgctcacaagaagggttggttctcaggttggctcttcactgtagcaaaatggcgagtgttccacatgccagaaagtcttatctctaatcactgaataaatgtcctaggcttccctctgattagcctaccttagggcacgggtccacacttgatctacttggcaaagcctataaatgctcagtactaatcagatttatatgcccagttgtgatctaatactgtggccagaatgacataacagtccttaatgactcaggccagtctagggcagcacctagaactctttgcagtcaaacctacccaacccatccaggagctgctacacattgaggaaggggcagaatgaatgctgggaagcaactacaaagaacactgcacgtaagtttcagtggggctttgcttttcttttcttactgttttgtgtttatgttggtcctctttatgggtgtaagctcctctgtggcagggctgtattgtactctattcgtctattccccgaaaactcctcccacagtggcattcacttaaagcctactaaacaatgttaaattctactgaggtgtaaatcaaggtctacggagaataaatcaagagtaagaataagccaagcgaagatcacaaagttaatggtggagagacagatttagaacctggacattgttcattcattcctttattcattaaacaaatacaaggccaactatttgttaggcatttatcagccattatagtctagtgggtttacaattttttaacataaaattttaaaataataatttttattttttgagacaaagtctcactctgttgcccaggctggagtgcaatggtgcgatcgcagctcactgcaacctccacctcctgggttcaagcaattttcctgtctcagcctcacgagtagctgggattacaggcatgtgccaccacacccggctaatttttttttttttgagatggagtttcgcttttgttgcccaggctggagtgcaatggcgctatctccgctccctggaacctccgcctccagggttcaagcgattctcctgccttagtctccggagtagctgggattacaggaatgcgccaccacgcctggctaattttgcatttttggtggagacggggtttctccatgttggtcaggctggcctccaactcccaacctcaggtgatccgcccgcctctgcctcccaaagtgctggaatttagagcgtgggccacagctcctggcctaatttttgtatttttagtagagacagggtttcaccatgttggcctggctggtctgcaa

SEQ ID NO: 7789 - DNA, 6000 bp, Homo sapiens
acagaggcttcctgaaaaacgaagcctaacagaattagaaattagagatagagggacttgctggtaacaaatcctggcctttggtccttgaagccattatttttgcagctcttccttctttcctgtgacctttatcccatctctacctgtagttacatgagccattaaattctctagtttgctgacgttagtataaatttaatttgccttttttgtttttgagatggagtcttgctgtattgcccaggcgggagtgatcttggctcactgcaacctccacctcccaggttcaagcgattctcagcctcccaagtagcttagactacaggtacatgccactatgcctggccaatttttgtatttttggtagggacgggtttcaccatgttggccaggctggtctcgaactcctgacctcagatgatttgcctgcctcggcctccaaaagtgctgggattacaggcatgagccactgtgtgcctggcctaatttgctttgttttgacattgaaagaatcctgactaaaaggtctgctactatggtcacagtaaatattgtcgacaaaaagtatcaaactctttaaaacatttaaagaggattattctttttttttttttttttagacaaactctcactctgttgcccaaactggagtgcaatggcgtgatcttggctcactgcaacccccacctcccgggttcaagtgattctcccacctcagcctcctgagtaggggactacaggcacgcgccaccatgcctggctaaaattttggtatttttagtacagaccgggtttcactatgttggctaggctggtcttgaactcctgaccttgtgatccgcccaccttggcctcccaaagtgctgggattacaggtgtgagccaccgtgcccggccctgaagaggtttattctaaacaaaatatgagtgaccaaggcctgaggcatagtcccaagaggtactgagaatatgtgcccaagactgttgggttacagcttggttttaatacaatttagggagacataacacaccaatcaatacatttggggtatacattggtttggttggggaaggtgggacaacttgaagagggtttgggggagggcttataggtcataggtggattaaaagatttcctgattggcaattggttgaaagagtgaagttactatttaaagacctggaataaacagaaaggaatgcctggattaagataaggggtggtggacactaaggttcttattatgtagatgaagtctcctaggtggccatccttagagacaatagatggcaaatgtttcctattctgacctgtaaaaggggctagactctcagctaatctcttcagaattgggagggcctggaagggggaaacatctaattatgttgatagagattctttttttttttttttttttttttttttagatggagttttttgctcttcttgcccaggctggagtgcaatggtgcgatcttggctcactgcaatctctgcctcctgggttcaggtgattctcccgcctcaccctccagagtagctgggattacaggagcccaccactacggccggctaaatttttagtagagacggggcttcaccatgttggccgggctgacctcaggtgatccacatgcctcggcctcccaaagtgctgggattgcaggtgtgagccactgcacccagccaacagagattcttaacagatgcaattacctctctccccacaaaatagctttgcaggggcatttcaaaatacggcaaagaaatatattttgaggtaaaatactttgatttcctttatctgtcatgtgatgttatgccagagtcaagttggaaagtaagccatattatataagtttacataaaacccatctgataacttttcttttttttgagacggagtctcgttctgttgcccaggctggagtgcagtggcacgatattggctcactgcaacctccacctcctgggttcatgtgattctcctgcctcagcctcctgaggagctgggattacaggcacacaccaccacgcccagctaattttttgtgtatttttggtagacggggtttcactatgttggccagactggtctcgaactcctgacctcgtgatccacccacctcagcctcccaaagtgctgggattacaggcgtgagccaccgcgcccggcccatttgataacattttatgttttgtagggtgtgactccacaggccccttagataggaattcggggaggaggggaaaaatgtcagagttaagtcctcagtatcatctcctttaaggtgtttccacagttcaaacagtaccttgtcaaaagaaagaagagaccaggatagactacgaaagaattagatttacacagtgaagttactcactggaaacactgtgtatgggtgtggtattagattgtgaagtcaggctgggtgtggtggctcacacctgcaatcccagcattttgggaggctgaggcagaaggatcaccagagcccagagtttgaggccagcctgggcaatacagtgagccctcatctctatatattaaaaaaaaaacaacaactgcaaagtcaatgcataagacaaaaatccatttaggctcagccataaaaaggaatgaagtaatgattcatgttacaacatggatgaacctttaaaatatattgatgagtgaagtaatatgtgtacaaaggccacatattgtataatttcacttatatgaaatgtccagaataggtaaatctacacagacagaaagtagattagtgattgccaggagttggagggcatggcagggtgcagaatgataaaagcctgtacaagccttctttttgggatgaacatgttctggaattagatagtagtaatggttgcacaacttttggaataaactgaaaaccaatgaattgtacactcatctgaaggggtaaatattatggcatgtgaattatatctcagaaaaatctattttggctaaattaccattgaaagtccttttcaaagagtctaattcagctgtttttactttcagcataaaaataaatggcctttgaaactttttagagtactagataaatagtatgtttgcatttgggagtcctgttataaaaaatgtatcttataacttgagtcacactaaattatgtgagattctcacattataaagggtaaggaagtgaatcagaagcattgaaaagggattgtgtgtaacatgttatctcttgcaaaaggaaattaaattttgggaccccaaactgatttagccaaagggaaaagtcacgctgggactggtcacgcaaatctgcctcccccttttggttcctaaataagattgctgcaagatgaaaagctacatctctcccccgtattttgcccacaaggaaattcttagtgtgctgttaaaacttcatggcaatgcaaattgatagcttatctttacaggtggccaccccagcccgccagacacaaatgcctatctgattgttcccctaccccattttgtctgttatcttatgaaaaatgcagactcccacattcttcctctgcccattttatgtcatcttatgtaaaaaatgcagattcactgagccagagaaaggcaagaattactattttctcctaccgcccccttacatgaaaacggtgtgcttctcaatatcccgccctttcccctttaaatttggagcactcaaaatcatcttcgaagaaaggcatagacctgtttcctgggctcgtacttaacttcggcaaataaatctcctaaagtgatggactctcttataaattaatctgtagccaaggcatgtcatcaatatgtcctactgtgccttcctacctcccatttatcaacttacatgagaagcacacatcttacttgtcataaattattaccttagtgaaaacctgagggtgtcaagaagtcgaaaaatttgagacattgacgttggggaagacacctttaattagagcaccataaaatcatgatagaatgatacatttttccttgccttatatttttggcatgcaaaacagaaggagctcaaacaattgagtgacacattagtaaaattcctttcattcatttctacttacaaggcacacaccattgacctcaccccgtccccccctttaaaacaatatttgacccgcgcccccccccctttaaagcaatctttgaaaagttaggaatgaaagccggttcaggacagtacacagtacacaaatactggcttcccctacctccaccacaagcaagtaaacatcctagcacagtgtaaaaaggaagaggctgaggacgaaccacgcggacatttgcaggcacaccccttccctgcgaccaacaaaaatgcagtagcgcaattacacttgaaggaattgcagcactcacaaaagcacacattctgttcaatggttgagtccacataaagtgacagtccgtttctaaaagcatggctgtatttaaaggacacatggtctgttcaggtccgcttcagcgaaaccccaagcacttccgagagatccactccctctctccgagcaggtgccactagctgctccgccggcgagcgtaggaagcagcgcgaccaaccaaatcggttgcccacaacagccagggacgtcaaaaaggccaaactgcgtgggaagcgagcgtgcgcctccatcaccacgacagcacccgtctcgaggctccacctgccgctagtaggtggctctcagctctgctctgctaagggcgagcttgagaacccggcctacagttgtgcacctccccccgcccccgcccccgcccccgcccccgcccaccgcacttgtagccccgccccgcccagggagcttccgtcacaacacttccggctccagcctcccaaccggcctccgtcgtttttcacttccctctcctcagctctcttcccttgcccctaccgtctcctttaacacagtcacgtgagggacgcgcgcgggggcagctgggagtagtactgccggttggtcagggttcggcctcaacatggcggttccggccgggcagtgaccaaggttttgccgtccgaaggactaagtggtgactgtcggcgtctccacctatcggggtggaatgcgagcacgcggggacgagcgctgagaagcggcggtgacgggaaggggggggtcagtggattgtgccccagaaaccgaagcggcggcgtctgttccttcttgtttctaggctccagtgcgttcggggccccgcccggccgggccaggccggcgggcggcggcggtagctgctgcagccgcaggataacctcgcagggtgggccggagggcgggcgccgccgctgcctgtgctgcggcgatggcccagtgtgtacaatcagtgcaggagctaatcccggactccttcgtcccctgtgtcgctgcgctgtgcagcgacgaagccgagcggctcactcgtctcaatcacctcagcttcgcggagctgcttaagcccttctcccgcctcacttccgagggtatgtggtatcctcccttttccagtgggctcccgcaaagccgtggtcgggagaaggaagttgcgggcgggcagggaagagaagggcagtgtttacgtcctggagccggtaccgtggcgtctggggctgtggccccgcggtgctccgggggcggctggaggagggaccgtgaggttgtcaagacagcgcagtcctaagctccagtttctctgggcacttcctttcttcctcggacaacctaggtcgttaagtaattggtgcaaagataaacgtgagtcttcgagaacggcattgagactgttctccacggccatagcgaaggaattaggcacttgcaaagcagctaaggtaggaaaatgctgcctcttagaccgacagggtctgagtaaggaagacctgtcatcctcccttggatgttaaactggactttgaaagtagttgtggatgttattacattcttgtagcgttgagggtcatctctgtctgaactaccgtgtagct

SEQ ID NO: 7790 - DNA, 6000 bp, Homo sapiens
aagtgctccaatactgttctttttcaaagttcttttagttcttctagatcttttgcaattccatatgaatttttgtcagcttaccaaattctaccacaaaatcttgctgggaattttgatgtgcaccgtggtcaatctatagatcaatttggggagaaactgcatctcccccaaattcatgagaaattcacaagtattttgatgcatgaatttaagtcttcttgatttatttaggccttctttaatttctctcagccatgccttttatattttcattgtacaagtcttgtacatgttttatcatatttatccctaaatatgatagtttttcatatttttaatggcattgtaaatgatattcttaaaaattcaaattattgagcatttattacttgcatataaaaatacaattgagttttgtatgctggttttgtatctgcaagcttccaaagttcatttataacttctgacagccttattgtagattccaccggattttctatataggctgtcatatctgccgcatggttttgcttcttgctttccaatctggattttgtgtgtgtgtgtgtgtgtgtgtgtgtgtgtgatggagtctcactctttgtcacccaggctggagtgcagcagcgcaatctcagctcactgcaacttctgcctccagggttcaagcgattctcctgcctcagcctcctgagtagctgggactataggcgcgcgacaccacataaggcattttttttttttaagacggggtttcaccatattggccaggctggtctggtatctaactcctgaccttgtgatccacctggcccagcctcccatagtgctgggattacaggcatgagccaccatgcccaacccaatccggatgtcttttatttttacttattttgctggcctgggattaggatctagtatcaccattcactggctgaatgactttggggagatcacttttctttctgggttgtatctatcttaatctgcaaaattaggtaataggcttggaaagcgttttaaggtgtctttcttctctgaaattaagagtttctgtgaaggttggttttgtactgaaaaatgtattttatgtattctattttaaatacctacaaacaatattcacaacactctcatgaaaaaattataatatttgtacaagcagtggcgttcatctgaattattattatagcctgggctatatttaatctcccaatatatggtgtggaatggagaactgggttattgtgtctcttctgggtaacaatcctttatttagttctactgtagactcaggaaaaagtatcccaattctactttcctttaaaaatatctgcattgtcaccatttattattataaagcaataattttataattagaatttatttttaataataatttttataattattataaagcaataattcctatactgaaatcgaacggtcagaacctaaacactcaaacaaaagcagccattaggctctggctactgttagaagcaatttggattttctcaataggaattacacttgaactggtttacttatgagccacatacgtaaaatccattttttttattactttctattcattcttcccaaatgatattagcctgcctgtttgatatgttattcataagacttggctacaaatgactcagaggtgtgatcaaaagatcaaattttctgttaagcatgaagattttcagagatacctgaggatgtttaaaatagtacatcattgaccgggcacagtggctcatgcctgcaatcctagcactttgggaggcccaggcaggaggactgcttgagtccaggcctctgagaccagcctgggtaacataatgagacctcatctctacaaaaaataaaaataaaaaatagtcaggagcggtgatgtgcacctgtatccccagctgctctggaggctgaggcgggaggattgtttgagcccaggagttcaaggttgcagtgagctatgatcatgccactgcactctagcctgggtgatggagtgagattttgtccctaaaaacaataaataaataaataaattttttaaaaaactagcatgtcacagtctgggagtgcagttccagaggaggctttcagagccacagcagatgatggcagcttcactggattaggtatgtggctccccaggccagtgacgaagagttatagtttgcttgtgtacataaaatcagatatgcttattaaaaattcctattcctactacatcatatggacaaggccacattcaccttctgcagagccttttctttcataacctgacaaagcagatatttcccatttataaaactccactttgtttttctttgccgaaatgaccagatcatttgttcatccatgagcaccaactgtcataaacactgttttgcctggaggcgtgaggtgggagacagtctatagagaagtgttatctgaacagagatctcgagagtaaggaggaagtagactttgggttggaggctggggagaagaaggctgggagggagcagagcttggagatgccaggcacactggggaactgaaggtcaacaccctttccttagggttctaggtgacagagggaagcacagcagccactttgaaggatcttaccagccctttcctgacagcttctggccaccctgaccagcagcactagttgtattaacagcagcagagtccagcaggatgggtctgcgtgcttctcttaccacaagctgagacattgctaggtgctttcaaacctcgctgcagttaacccccaccagtctcctatgtggagactctatcatctgctccccaaccctctccctctatctcttcttctatccattaagcatcctccatttgttcatctatttctctcatgacttagtctgtgccttctctccctctcaaaaatgcccccaagaccatattccactttacctccacctctgctaaggtgtagagagaaacacagcacaaataccctaggtttgttcaggttattaaggctgtcaccgttgttatttatagaaaccttatttctacaaatgtagataatatgtaattaaaatatttttgaggaatcagttcacactttggatttgcgttgactattgacccaaacctttagctcttcctacccgtggtgctgctgtgccaaggctctgcctgtggccagcagttctgctgtgcaatgcatgcgagtatcacctcaggaaacacagttgcatggaggcaggttggtgcctctggcttctgaagaccttacctctcagtcacaccaggtaagatgaagaacatccagaagtgaattccgaacacaagaatgacctggaagatgacctttcccagtacagtcttcctgaggtagagggctcggtccaccaccatggttccaaactgaatgaggaccatcaccaaaaacggccccgggacctggtcctctgacagtgaagaggtgatgtctgcagctgctgagtgtttctggggaagagacaacaaattcatgcccaagagaggcaattcatggcaggaagcgccatcgccatgggtcagggcgggtgctgtggcctttgccccaacctaccccaaaggcccaaaagccgaagacaatgatgatgaagtccacagtgtcagccaggaacatgagtacatacacgtcagtcacggcgctatactccgggtggatgaggttgtaaaagaactgtttgatgggcacatagatctccagcgtcctgcaaaatggagacccccacccccaacccacttgtttcaggaagggcaggatggcagaaatgaccagacactgccatcatgccactcctctgcattcctctttccagtcaggtcccaccttcctctctctgcctcaggatagtcccgctgtggacagctcctgttctaacggagagcgtatacacatttactgccaagataggtactgcagccctctctgctgatggcaccacagccctctcctcttgcttgaagcataatagaatggtatgatgccctgggaacgaggtgttgggtttgtagcctgattcaattgctcaccaccggcgagaaccatgagcatgctatgtaacctctgtgtttagttttctcatctgtaaaactggagtgatgagaagacctgatgcctagggccaaggtgggaagtaaatgagggaatgcatgagggcgctcagacttggagtgcttggtccatgcgcgtttgaatgtgcaacgcccctgctcctcctgttttagggcctgtgtccatgctggctcccacatactcccctggccttttatctatgctttgctctgtgccttagtgtggtgtcctgttggctcttgcttgtctgtctaacctttgccctatctttgctctgggacctgccttcagttcaacgccacgttcaggtgccactggctctcctgctctcagagcctctgtccagggctccactcccagctggcagtcccagtcccatgcaccacttccatccccagcaggtggagggacctgtgtagtgtgctgggtaacaggtgtatgaccatggacaaagcatttccccaccatgcacttccatccccttctcaggataagagtgcaggtctaaggcccttccagcattgacactgtattcctctcagtctggctggacttcaccatgataatgcctaagaatacaatccatgagcccttgaaatgacccatttactctgttcaaatagaaaaagcatgtgcataaatgcaatggatataaaatgaatcacacttacagaaaaatgatttttaaaaacaagacaaaaaggggtaatttcattctgccttacgcagataacatttgtgacacgagaagttacttctctgctctgctcctggtttataggaaataataaagcccaaaaccctacaataaagcacacatgccatatgttctcatggactcacttctttatggtaaaggcttttgctttgattaaatgttcttgaagcttttccatataaagttcccttttgcctttttgcttaatactcaaaacactgcttcctttttgactgctgtttcgggtgcttgtgctgcctagaaataaaaagagatcataagatgggtggtggagcctggggtttgttcacctaaatatccaagaagcagaacccagagcccacatggtggagggatagctcaggactgtttgggaggatgagtatgcacggccttgggatttgtcctcaactctgctcccatcgcaggcctgtggggtttaacaccccatggtggctctttcctggattgctatgcaatctttgtttcagaagtaaataaactggaaggatagtttttattgtgctaactagggtactaggatgcaggtgttccagataggatgccccatgtctgttttcctattctagtttctctaattgtaaaatgaatatgacataatctgccagtatctgcctcaaaagcaggttctgaagatgactatacaccactgcatggaaagcttcagacaggagccccgtaagtacaaaagcttcagacaggagccccataattataaaagcttcagacaggagccccataattacaaaagcttcagacaggagccccacagatacaaaagcctagtgattccaagaggggcagctgtgaggcatatctactttctgattgtactcgttgtttgggaaaaaattaattactagactaggaaataaccatagtttggctaaaagttctcatcaattacatctaaatatgtttaaaaaatacattgtgattgatagcactctggacacgccctgcagatttttcgcatgtaacacaaataaattatcatgagcctggcgtttattaggtacaaggcagtgtgccggccatttttcacaattatctgaaacccttgtcctgagatacaataaggtgttttgggtaatggggtcacacagctgaggcaggatttgaactcgggtttctctgatttcaaagccctttcttt

SEQ ID NO: 7791 - DNA, 6000 bp, Homo sapiens
gaccaaattaaacttttccaactgcaccctttgttttgctgttcttgttttagagacaggatctcactctgtcacctagtctgtagtgcagtggcacaattatggctcactgcagccctaacctcctgacctcaagtgatcctcccacctcagcctcccaaagcgctgggattacagggatgagccaccgcctggccagcactctttcacgatcaattcttccacctgtgtgctcttggtcccattgactcttgctttctaagatttctggctccaacaatcatcccttctatttcaacctccacctctctctttaggttcatccctgcaatcacataaatatatcaagttgccctttcctcgtaaaaagtcattcattcagcacatattttcaagtgcttactaagcacctgatactgtgcaaagcactggcagtgccttcatgaaactctgaagaagtaataaaaaatataaactcagattaacagagtctgttctgctccaacccaataattcatttctaagaaacctcctattatcaaactcatgaaataaaagacacttttcaaaaggagcaaaaaggaataagggaccagagttccagactcaaaatactaaattcatttttcccgctagaatttcaacaaggtatcaagttctcctaccactaagcaagtccagcttttagttgtactcagtttttgctcaagagcaaagcctttcttttcccagctccatgagcattaccaaaaaaagcacaactcttcaaaaacattatcagaaacatcacccactgctgtgctaaacaaagcagaaagccaccttaaacacttttttcctactcaagctgtgttactttcaagatagtggtttgcttaatgcaaattgtgttcccgaaatcatttgctgctgtatgacatccaattcccgctatgaaaggggaagtcttgggatgctaaagaagtacgcaacaggggctcatacccagcatgggcaggtcaagaaggcctgccaaggaagtgagacttcagggatgagtaggaggcagtttaagcaagaaaggaaagagaaggggggaaagttgtgccaaggcaaagagaacaacatttacaaacgccctaaggggagaatggacacacacacttccaagaatacaacacagtggaaaagagggaggaaagtgataggggaaatcaagcaagagacacaggccatgaggtcttgtgagccggaggaggggctgaatttacactgtgagcaacggaaagccgttcaagggtttaagtgagaagtcacacaatcttgcttcattttagctacctctccccacttcttcaagttgggcttctaaaaagagcagtgtacacttggtagtttgcatttcctcctaccttctctcctgaactccaggtatctgtcttgtgtagtccgctgacacaactccctttaaggtatctgttaatctagctgctcaatgtcatggccctctcaggctggcccttacctgtcaggtggccctgctcaccctcaactccctccactgctttcctccccacttctgtggttgttcctcaccagtcttttttgcaagttcctctttctccacccatccttttaaatgttgtctgtcaagattctgtccttggcctttgatatttccaaacgctctgtatcttccctagatgatctcatcaatgtctaagacctcaaatatcacccatgtgttcatgatttccaaaatcacatttactcagaccctctctcccgaactccaaatttatacattcaactagcttcatttcagtgtctcgcaggtacctcaaacagaattaaagtttcaaaaccaaacttgtacataacgtatacccctttaccatttcatttcaaatctgtatctcccctccatccctcctgccactgcctaacagaagctcatcatgtctcttcaggtttactccaaccgactactgccctgtgctgcgtgcctacactttcctcatccagtctgctagcagtcagaacgatcttgctaacaagtaaatatgatcagcccagagcagtggctcatgcctgtaatcccagcactttgagaggccgaggcaggcggatcacctgaggtcaggagttcgagaccagcctggccaacatgtcgaaaccctgtctctactaaaagtacaaaaaaatcaaccgggcatggtggtgtgtgcctgtaatttcaactacgcaggaggctgaggtaagtgaatcacttgaacccaggaggcagaggttgcagtgagctgacgtcgcaccactgcactccagcctgggcgacagagcgggactctgtcaaaaaaaaaagaagcaaatatgatcatggtatttccagacttacaattccacaatgagttcctattaaacagctcaaattccttagtctgatctaggctctgccttactctccagcatctcaacttcacaccagtctccaggctaaactgtgggtggttctctcagcattccctcagtgcctttgtgcactccctccttgctggaacagtaattctcttcacctcccttgtcctcttcccctggccaatgtctttcaagacttaggtgaggtcctccctccctcgagaagcttcaccagaactcccatgtgtacccctttttgggaaatacaggactcctaggtaactcaactccacaagaccctgtgcttcaagctagctttacatgtatcactttaacgttttcatcagcttacctatttacagggctgcatccttaaaaactgggactcctgtcttttaacaagaatcctcagtgtctaacactagcacataacaagcatgttatgaacgaatgaatgaaaatatggaactacaatgaggccccaaaagaataagccctagagtgagcacctcgagggtaggaaacttgccaggagcattctctgctgaatccccaaggccaggagcaaaagctgcaactccactgggggtccgggcatatttgtggaatggctgaatggatgttctaaggccacaggagaacacatagctcaaacttcctgacttgctttccattactaactttcttggtttgtgacctacttttactgtaacaccagtgtgcatgccatggtttctactgaccaaactaatggtcttgttttcaactaggaaaaaataatatgagcattgaccaaccaaggaaactacaggattcctcggtaagaatctatagaaggatttccttatctttttgaaaatgcatgtgaaatctccagtggatgcgagttaagttcatttttctggaaagaggaatcacaattctcattgaattttcaaggatattaatgataccaaagaaaattaaatttcttaaaccaaaatgttaagctgaattaagttatattcacttttctcttttcaaatctatttcgatatataacctatcccttagagagacagcagcctctgctaaaacaaatgtaactggagaagatgcagctggcaggctctctcacatgaagattcctaccagaatttgcgtttcagattgtctataattggaagagtccttaccagcattctttaaaacttagatccctattctaacatactctgtatcatgggaatcagaatatttatacttcccactaatgtgttcaagaagaaaacgttactttctgaacacatttttcactgccatctaattaaatggaaaggggaaaaacccaggatcatccatttacaggaaagcccgtcttttactttacacagagagaaccaaacatcagaagcagcattaacttaaccgtcaccaaattcaatcttgggaataatacgacaaggattaaacgaaggggaaagcagttacatcattttaaaagagataaagttttgtttgaattaaaaggtagtctagttgacataaaaaaagcgaatcacaggtgtttatactacatattgcatctatgtgagctgaacaggcacgattagggcgataggcatcggaacaccgtgcccccggggaggggatgagggcactttctcagggcaaggaaaggctattttgatttgagggggcttgcaagaggggattcatttgtgacacccgtctgggagcacacatgaaagctgcgtttcactgtagggaaagtatacctcagtaaggaaaactataaagagaatgacacgctatcactggacgaacacaagcaaagcctctttcgttccgggaaggttctatgggggccgaacccacgctgggcgctgctgggccacgggggaaaatgaagacggagggtcccgagagcgctgccctcgccagaggccacgagccacccccaaccaccgcggctccgccaggagagcgagcttcgcctcgcagagggctgcggcggccggcccggcgcccagagcggcctgctcccacaggtcctgcgcgggcgccagctggacccggacgccgcggcccggctcgcccgcccccgccctcaccgctcccggggacgccagctgcccacccggccacaaaacacccggccagagaaagagctgtccgcgagcaagaaccaagcacagcggcgtgggagctacggcgaagctgcggcccgggggcgcgcgcccgagcgcccccacggctttcccaaggacccccagacccgggccgcgcaacgctggtggcgcatccacgcgctccccaagaagccgctgtggcaccgccctccagaactaactgcgcttgcgctaaccatgagctgctcagctcaagtatgctttttttttttttttttttaaaccaaaaggagcaagagagcggtcagcgcaggcgcgcccctgacgcggaccgcgccgccacttccgccccgagcgagaggctagaggcgagaggcgggggaggcgggagggaccctgcggacagggcacgagtccgggtctcggaggaggtcggcgactgccgcgtgggtccgcgactcaccaagtacagcggctgccagcgacgctgagtatccaactcttcgaactcccgctcgatggtggtgggcatggctgcgggagcgagctggcgcgagcagagcctgcgccggcggagaggctcaggccccgcacgatccggggagagcgctggcgctgcggcgcatgcgcgctgcgcgccgcgccccgcccccacgccaagccctgtcggccgtggggaaagtacctggagcgtcggacgtcagcgcgcagactcggcgcccgagcgcggcgcgaagtcggcggcggggcggggcggggcgctcggggggcggggctcggggtgcccaggtgggagggggcggggccaggggaccacccggcggccgtggtccctgcgcgcggcacgaggtgagccgccccttgggcttgcgtcttccgacaagagagaggcggtggtccgtgggtagcgcggggttactggaatgggactccctgaggaagtcccctgagaagtcgccggcacgctccgccttccttcttgcttcccatttctcgttttcttctcagccttcatagttttttaaagtgctgtatttgaatattattttaaacatcatctaggtcagattagcggcctgtgaccaacttggaaacaaattcctcattcttttctgccctggtgtcagctcctgtaagcctgcagattttatgccaaataaaccgctggagcaaaaggaaaggcagccagcctctcccggaatttgggagagggataccttgttaagaaaacgttctacaacttacgaattagatttaactgtaaaaaatagcacgtcctcttttaccaaacaaacgtactagttagggaaatcatcttgcttcagatttaagatagttcttttttagtgcttgtaatatcctgctatataatcttcataagaaacgtgaagggttaggaaaggtttagccgtgctgtccagtattgggatttaaattttaaatattaacttaattcctcagtggcaccagccacatttcaggtgtgccataacca

SEQ ID NO: 7792 - DNA, 6000 bp, Homo sapiens; identical to SEQ ID NO: 797

SEQ ID NO: 7793 - DNA, 6000 bp, Homo sapiens
gcgcttttaagtatttcattctttctcttttttttgcaatttttttccattatagctgggaagactttactttcaattatttaaacaccatattcactacaccatgctgactttaacttgttccacataggcaacctctatatacagtgtattctgctgcaatctgttagatacagtgtctaaaatagtgcttcaaaaaaggaaaagactattattggaggcctagaaccttcagttagagatgttttacatctcttatctttttacagcagatctgtgctattctttccctagtctttatgaaagatgtaataaagtgagggtcaaggttggagaaatgcaagagaaagtagtaggcaaaataatgaaaaataaaagagccccacaggtaattgtcctcaactgtaggaagatgggaactatcaatatgagggttacccaatggttttcccaatttcccatgataactgcaggtccaaaggatcgggcgggattcatgctggcaccagtataattgatctataggaaacaagaaaacaacttcagacattgctgaaacagggctactagcaagtatcattcattgcaatttgctgtcatttgtcacttagaggaacctcaagatattagcagctatatcaacattctcattgagcagttggaaaaattataacctaaaatggacagtcatggctggatactaaagagctactgctgtaaaacacaacatcttcaggccagctagagtgaggataaatgaggtgggattgattatttaaatggacttggaaacttactgcaaataaatgtccaattgcaacagaaaatccaattgctaaagctattgagccagtgacatcagtccgtttggaatcacagctggcaaagatagtaaacaccaattgaaatgtgattatcaactcaaccaggagaccatgaccagcggtaagatttccatgaacctagagaaagaaaaatattccatcagaattgaagcaagagtattttcgatgacaatgtattaatatcattgtgaaaggcacattttatctgtgtaaaaagtaaaggtaagtcttctaccccaccttcaactgagaatttccttctctcaccccccaaaaagaaggaataaatttatattcattttgggtcatcacagatgactgtgattactcttacaacgaccaaacaggagtttgtgctgaatgtccttttctacaaaggaagcaaaatgtgccactgcagcacttaactcgtaaaagaatttcttgagagccttgtgattttataaggcaatgattaaatccattaattaggtttaaattaattaatatatatttcaattaaaatttaagccatgtgtgtttttttttaatcagccctggtgctgagttaacaattgatactcctaatcagctaagaacaaaactaggatcggatgtctatttttttaagcataaccctttatgtagatcattgtacatcttatgaacatgacaagaaaatagtttttttctgctagtgaacaaataactgtaaggaaaatgcattaagctaaatataaagtcaatatagtaattggaatgggagaaggggaggaaaaaaccaacacaattttcgggccacctagattttgttatttttaaggcactcaagagcaaacaatgatttcttacagatatacctaaatactgccagaatcagttttcacactattaagaatcatcaaaaattccctaggagtaaattagctattttagggatgtgcctcatgccaccaaggcattatttagcaaagagtttgcaagaagcttggagtcctagtttgaaaatagctaaagatgctaccatggtgactcccaggcctcccaccacactgggaggtgtgaccagatagaggattcctgctccaatgatggcccccaggcactgggctgcgatgtagaagacagacttggcgatgctgatcttcctggtgcacaccatggccacagtcactgcagggttgatgtggccaccgctgatatggccaaagcactgcaccatggttgcaatgctgagtccaaagcaaagggagatgagaaccatgtcgaccggtaaaggcttttctgttccaccccagttgatggtggatcccaggctgaggagaacaaaaataagcatggccagaaattccgctgtgactgctttccagaaagcttgagtccagacccctttgaaagccaccatgatgttctctctggtacacaaaggtccacacttactgaaaagagaaacaaatcagcatcagaagccactacacccaggtttatgaatttaggtgaagggaacaaggcctgccatcttcgggtactgtgggcaggggctgccaggcgtgatttgcacaccaagaaagaatgcttctgctaaagctccttcatgaatagtcaagagactgttattctagtctcctttcatttaatattcaaagatcatccagtttcacggaaaattatccaaactgtccctagaaaggaaaaatgtctaaatcaaattccttaaaatattaagaataaaatatatttaccttgtacttaattcccttagagcaagtttttaagtttcgagtacattttatatgctacttacatttcgaacataaagcattaaaacaaggtgtgcgtggggggggggggtcgtcttttctagctttgcatttgattgctttgaaatggcattctgaaaatctccccctccccccagactctggattagggggaagccttctaggaaaccagggtgctgaaggctgtcttttgagaaagtgaactcattgaggggagaggagcttctggtgactagcaagggcgatgggaacaggcagggcctcagctgggacagcgacactccctccctctcctttgcgccaggaacgagcaggctgccagcgggaggagtccgggagctgagcctgcccaagggacacgcgcaccgcccagatctgggagcgcggcacggggacgtgtaaacctccgtccccagggagcctggagcacctctcagagggcggagcagcggccattcccggcccgtggcaggctcccgggcggcggccaggtgcacacgcagaagcggccccgcgagctcgcccgcctgcccgccggcccggtgcatcctggccgctggaggtggggagagatgggagtgggggatgcttttaggggaggaaggacagcctctcctcgtgcccgaccctctctcaccccttgaccctgaccgtacaatgcagataaacctgccaaagggagcctggaggctggggtgtgccagcaatgccccggtacctttcctgccttcatggtgcagagctcgggaagtcaggaaaagcgggtgtggttagggaaactgtgggcccctgagcagaaggctctatggaaaacggcttttctctacggtctttttgatggctttctgttacatgggcctataggacagtgtgtctcaccttgtggagcttctctggggagggtggtgggcagggagtctgggagagggaggacgccttctcctcccgtctatatccctcttgctgtcattagatctttggagcagagaaggggtggtttgacgatattgatgccaactgctcattctggcaggaaatggctaggattccccttttggggggggggggcaattaccccagttaccctatcatctaagacttttgcccttgtcctttgcctgtgatagtcatgagagccaagaagtatggagagtatttaccagagaatctaattgcagaggaccacgtaaggggttaggcaagaaagccaagtactttaagagattagtattattgtggctttccctttgacaaattgcggggccctcatttccccatgtcactgaatgttcccgggaacctgctttctgcgtgggtagtgaggaaatgcagtgccaaaaagggtgaggggaatttccagctcagcctagcccttagtttgctatggggctttgctttagaggtggagagagaaaaaccctttcttgcccaggcccgggtggcaggataaaggaagagctggctccacaggggggtggccagccacatcccacgcatcccctgccccagtgaagcgaatctcagaagtatgaaaaaccccaggtgggatgacaacgacatcatactctctagaggaaaagaatgtaaagagacaaaaacgatggttgcaatggggcagggagggcaccctggaggagacactaaaaatattcccaaagacggtaaactcagaaaagtcacatattgaagaagttaggagagtcacttctgaactcaccggcagcccagggctgtagccgggatggcaaagggggcaaaatgcgatcataggtgctgtcgtttgtggtcagggttaggggagaaggaggaggacaaaacagtaggctaaggaagctaggtgggcaggaaacgtccttttcagccccgcaggagacaccagaagaggtgggacccagaaaaggccagccccgctgctcacccccttcacctctcacttctgccatttccggagttctctccctgcttggcctgtcatgcacctgtttacctctccagaggtagttgctctttcagcttcaaatattcatcaaccagagaaatttaaaacagtgcaaaacaccaacacaaaacataaacatgctctttaagaatgtttttagcttttttttttttttaaatccacaaaaatctgatcttcttccaaggcagatggaccagcctcacttggctgtgaaccgtgaagtttgctggcagcatatacatatctctggccttatgagggctcaccctagcgtcacccatagcaccctgcttttattgtcagtgttcccttatatgttcacagtcactggaaatgatcaacacaattagatttgcttcttttgccccagaacaaagcgggtttgttgatgtactgaatcggacacattactttctagctgaacactcagcttcatccactccaggacagctgagcgtctgggtgagtaatttttccgaagaaatgtactatagctagattcacctccatagggtaattttcctgggcttttgcagatctgaaacatatggaggatttggctaaaaagcatcccttttcttctaccttctctatgcctctcttctgaaaatgcccagtactcagatctaaaagaaccacccacctgccctatagctgccttccagattctgcctaagaaggcacaaacatctataataaaagagacagtttcatcttttggccctaagcgttgttcccttaaggcaaagaaggacttacccccaccgccttgctgtgggtctgtcactcatgccttccccagccagagtgcagctctcattgcctgccccgcagctccctgtgtgctgggagtcagattacggccacttgtctgattgggtttttggagtgttaggggtggaaagattctgcaccatgtggcaatcgctaagttatatttgaacttgaagtagcttttctgtacctgatcactgtagacacagggcatttcaggaatgcaaaaacatttacttaatttttttttttttgagacagtaatttttgaaaatgaggatttccttaaatctttatttgaattctttctaccatgaagaattgttcagaatttgtcttgtttggttatatgttgtagttgaaattgggcaattattagaaaatgaatttgtataatccagcagttaacatgaatttagatagagacttcagtgcatttagtttttagccaatgaattctgtttgaagtttttgatctgagaagaagcattataagaacaatatataactgcagctccatttatagcacaggcagcactgatttggacaataaaaataaggaaacataggaaatacaggaaaaaagactgctctagggtgctcacctgactgttacattaataatctggggataagaagtagcaaacttaaaaaatatcaa

SEQ ID NO: 7794 - DNA, 6000 bp, Homo sapiens
agagaagattagcatagctcctgcacaaggatcacacaatgtttttcaagaattcaaaaagaaaagaaaaagaaatttaagaaaactggagatattaaatagccttcaaaagttatatcctagtctacttttttttgttgtttttttgagacagagtctcgctctgtcacccaggctggagtacagtggcaaaatcttggctcactgcaaccttcacctctcgagttcaagtgattctcctgcctcagcctcccgagcagctgggactacaagcgcccaccaccacaccaggctaattttgtactttcagtagagatggggtttcgccacgttagccacgctggtctcaaactcctgacctcaggttatcatccaactcagcctcccaaagtgctgagattacaggcctaagacactgcacctggcctactttttaatccctttagtaaccttaatttcaaaataaaataatatataacccacatacttccaagttagtgtttaagtgaaattttcttaaaacttacagaacatctaaatgatatattgcaacattgtttagaactatcaaagaactatcactaagcaaaaacaaggcttaattttaattttttgttgtttgcttgattaattaatattaataccacgactctttgaaacatggccagtggaaattctttgagtattaggatctcaaaatttgtgtcaaacaatgactacattaactctcaaacatacatcaagcataacaatcacagaaaatacatataataaatttaattatatattttaatataatttaattttaacataatttaatactcttcaggttttaaaatgtctctaaggaacctaaaatggctctccgttgtgtaatacatcaagtctaaactgtattttgaaggccctacacacaaatagtactcaaatctcttctaccaaccctctctttggtatagctttaaaccaagtgttttctactaaaatctaaaaataagtctcctgacaatacttggcactgtacttgacactccttgaaaactcagcagtcaaggcaaagttctaccctaagtaaaggcatacctacaggccagaaattgagtcttcttttttaacatattttttctccctctaaggaaatgttagctggttttagtcagttgtattcttaaattacattgcctgaaattatattctcatgcctcacttgctaaagaaaagctgttgcctagctcagtggctcatgcctgtaatcccagcactttgggaggccaaggcgggcagatcatgaggtcaagagatagagacaatcctggccaacatggtgaaaccccatctctaccaaaaatagaaaaattagctgagcatggtggcacgagcctgtagtcccagctactcgggaggctgaggcaggagaatcacttgaacccgggaggcggagcttgcagtgagccaagatctatctcgccgctgcactccagcctggtgacagagcgagactccgtctcaaaaaaaaaaaaaaaaaaaaaagctgtctttgaagaatccccacacttgaaacaaaaagtagctgttctaggtggtaaagaattctaaaatgtatttataccagcaaaaaactaaaaccaagaaaaattaagtcctctttgccaaatttctaatgctactatcatagtccatgttcatcttgaaatgtaaaacttgtatctacttatatctatccttataaaccacacaactcactaatctccaaaactttcaactcattaatgtccaaatgtttcagaccctcaagaatctactcacatttaccattagacataaaatcgcaaatccctttcctagaattcaaggtcctccctttatctaagcatcctcttactactctgtaccccagtaagagtttcctccctgtttcccaaccattcagtcataatttagaccttttgcccataccattataacctcataccactccttcatagggaatgactgccctcttgctttctaccaactgtctacctgtccactaacgtccaactcattatactccttcactaggctggacgcagtggtccgagacgagcctgggcaacaaggagaaaccccatctctacaaaaaatttaaaaattagccaggcatgatggcatgtgcctgtagtcccagctacttgggaggctgagacaagaggatagctagaacctgggaagttgaggctgcagtgggtgagggagctatggtgatacaattgcactccagccctcccagcgtgggtaacagagcaagaccttgtctcaaaacaaaaaacaaacaaacaaaaaaactccttccctaatcttccccagtctcctgaaggaaatcagaagtgtactgacaatgagccgctatcacagcactgtccaatacagtaggcaacagctgcatatggctactgagtacttgaaatgtgactagtacaaattgagatgttaagtataaaaggcacaccaaatttcaaagactaagcaataaaaaagaatgtaaaatatctcatgaatatttttcacattgattacacattgaaatagtaacattttggaaatactgagttaaataaaatacagtattaaaactaatttcggccgggcacggtggctcacgcctgtaatcccagcactttgggaggcggaggcgggcggaccacgaggtcaggagttcgagaccagcctggccaacatggtgaaaccctgtctctactaaaaatacaaaaataagccgtgagcgcctgtaatcccagctactcgggaggctgaggctggaaaatcgcttgaacctgggaggcagaggttgtagtgagccaagatcgcgccactgcactcccagcctgggcaacagggcaagactccatctccaaaaaacaaaaaacaaaaaaactaatttcacttgtttctttttacttttttaatgtggctactaaaattttttgttgttgttgtttgtttggttggttttgagatggagtctcactgtgcctcccgggttcaagtgattctcctgcctcagcttctcgagtagctgggactacaggcgcccaccaccacgcccagctaatttttgtatttttagtagaaacggggtttcaccatgttggccaggatggtctcgaactcctgacctcgtgatccacccgcctcggcctcccaaagagctgggattacaagcgtgagccaccgcgcccggccgaaaattttttaattatacctgtgactcacattatatttcaattagacagcactgctctatggtgtaaatacataattctaaatactgtcaggagataagatgattaagaacacaatgtcttgagtcacactgcctgtttcaaatctttcccagacgcaaaactgtgaacaaattaacacttctatgcttcaaggtcctcaaatttaaaattgcaataacaggattcaatgaggactaaaaaagaaaagttacacaaagcaagtatcaggtattagcattattattatttattaagaaagaaggaaagagtacacatataaaagtaaaactagctcaagtgtttgtgtttttttaggaattcaaggccgggcgcggtggctcacgcccataatccccgcactttgcgaggccgaggcgggcagatcacctgaggtcgggagttcgagaccaacctgaccaacatggagaaaccctgtctctactaaaaatacaaaaattatccgagtatggtggcgcatgcctgtaatctcagttactcagaaggctgaggcaggagaatcgcttgaacctgggaggcggaggtggcggtgggctgagatcgcgccactgcactccagtctgggcaacaagagcgaaactccatctcaaaataaataaataaataaataacaaaaaaataaaaaacgtagggcattttgttgctcttaagtccaacactgaaggaactgagactgatggctacgatacaggctaaagaaaatccaaaagtttccaaactttgtttttttggacagctccctctctccgctaaaaacaaaagctaatttataatggaactattctcccaaaaaacatggtagcgcaaaaatggtacagcactgattttttttgtggataagtcatattaagctaacaaacatcacagtcgtttgcctgacacaggcttattatgaaacccttcagttcttaccgaccttaacaaaaaaaactttacttggactttgttgtttgcaagatattggctaaaacatgcttgaagctttaccacattattttctcctaataaaaaaatccaaaactggagaaaacgggtagcttcttaacaagacattcattaacaagagaagacatttccatccctataactatagataactccaaatatccaggttaaattaaccacaacttgggcttgcttcctcttccttagggcaaaaagctgcttcaagttttattcttcttataatacttttaattttcttgagaggttaagcaaaataccgtatagctaagaatatattagtaaaacagctacacggtagttcagacagagatgaccctcaacgctacaagaatgtaataacatccacaactactttcaaagtccagtttaacatccaagggaggatgacaggtcttccttactcagaccctgtcggtctaagaggcagcattttcctaccttagctgctttgcaagtgcctaattccttcgctatggccgtggagaacagtctcaatgccgttctcgaagactcacgtttatctttgcaccaattacttaacgacctaggttgtccgaggaagaaaggaagtgcccagagaaactggagcttaggactgcgctgtcttgacaacctcacggtccctcctccagccgcccccggagcaccgcggggccacagccccagacgccacggtaccggctccaggacgtaaacactgcccttctcttccctgcccgcccgcaacttccttctcccgaccacggctttgcgggagcccactggaaaagggaggataccacataccctcggaagtgaggcgggagaagggcttaagcagctccgcgaagctgaggtgattgagacgagtgagccgctcggcttcgtcgctgcacagcgcagcgacacaggggacgaaggagtccgggattagctcctgcactgattgtacacactgggccatcgccgcagcacaggcagcggcggcgcccgccctccggcccaccctgcgaggttatcctgcggctgcagcagctaccgccgccgcccgccggcctggcccggccgggcggggccccgaacgcactggagcctagaaacaagaaggaacagacgccgccgcttcggtttctggggcacaatccactgaccccccccttcccgtcaccgccgcttctcagcgctcgtccccgcgtgctcgcattccaccccgataggtggagacgccgacagtcaccacttagtccttcggacggcaaaaccttggtcactgcccggccggaaccgccatgttgaggccgaaccctgaccaaccggcagtactactcccagctgcccccgcgcgcgtccctcacgtgactgtgttaaaggagacggtaggggcaagggaagagagctgaggagagggaagtgaaaaacgacggaggccggttgggaggctggagccggaagtgttgtgacggaagctccctgggcggggcggggctacaagtgcggtgggcgggggcgggggcgggggcgggggcggggggaggtgcacaactgtaggccgggttctcaagctcgcccttagcagagcagagctgagagccacctactagcggcaggtggagcctcgagacgggtgctgtcgtggtgatggaggcgcacgctcgcttcccacgcagtttggcctttttgacgtccctggctgttgtgggcaaccgatttggttggtcgcgctgcttcctacgctcgccggcggagcagctagtggcacctgctcggagagagg

SEQ ID NO: 7795 - DNA, 6000 bp, Homo sapiens
gacatttcctgttactcacaggacaaaaaaagcatgggacatgtggccagtaagggaggcccagaaaaaagagatgcccaataccatggccctccatgatattcggataccaaatccgaactcctgaaatgggccatgcagatcagagcactgggtgaataaaactgaaagacctttgaaacaaagcagactattaacagctccaaagaacacagccaggcccacttgccagggccaggaggctaaagggctatgataagaaagctgcagggttaactagctaccttctgtgctagcccaggaagaaccccagccaaaatgccagagggactctgaggaaaggacctaagatacctctcccacaacatacatgcttgcacatagaccccacactttgactacccatcgccatcagctccaccatttccagcagggcacacaccccagggaggcccaaataacaaagcactcagccagataattcctccaagggcccagaggaagtcagaccaaagtggcccaaccagatttcacctctacccagagagcaaaacagcccgtcagtgtgtctaggaaaggtcagggcttctggtgagtcaaatggacagtgaaatccccactcccagggaagttatgtaatctcctcccattatatagccccactgattacaggcactatcaatttattttgtaatcacagaagctttgataaagctgtatgaacaaagaccagtctctctctgccaggaattttagagacctcaagcatctgaacaccatggctggacactggagccccagagacctttcaaaacctggcccatgtgccactccaagccctaagcagtagctggatggagctactcccattttctagaagctttgctcatgctgttccctctgactaggatccctttgctcagtccagataaatctcatccattacatttcaaccactttctcctctggaaatccttaaccagccctcacttcccaccacatgccttccaaggatttactacagcagttttatggggctcagcccattgtactatgacggaagaaaatgagccttagtcatctatcttccatacctcaatgtccagcctctcttgggtgcacaactcctattgttgaatgaacttgtaagtcagctcatctttgatatgacagcaagaaaatgactacgttatattggaagttatattaataaaggtttcctattaaatgcaattctgttctcaatccagccaagtcaaaaccttggagagaaactgcactcatctttgcaatcatgcacaaaggtagacacagaataagaaataatttatggctctggcctctaggggtgggctacagcaatctgtccatggacttcctatggtgtggtgatggggcaggtgtctgccatccagtttccctgagtactaaggtttataatgtaaagactatccctgtgtttcctgtatgcattagacacttcaagaaaaatggttccttgaaaataatgagctttgagttctatggaactcactgtagttgacccaaatagtccagaaatagactatttcagaggaacatctgaaaacactggaaactaaacagattacgctgcctacaactgtgtgatgtatctgctcaagatggcaaagaagaggaactaaaatgacagaagatctacctgggaagaaagcccatgacatacacagggctcaggacagaaaacaagtagggaaagagaattaaagtttaccaaacaggttgatatggtaggattaataggaatttcttaacagaggagatttgaaacgctttttagggcacataaaaagtacttacaacatacattttagtcataaacacattttgccccaagatgtaattcaggctaaaatatgaattattttcttgaagttattatttcaagaaaaatccacatacatcgaataaaaactagttataagaacctaattacttctggatatgtctcataaataagaaatctgaagcacttgtgcaattgattgattgctgcagtatggactcaacaagccacatttttcatggaacatcatttttacttgaaagaacaactgaaaaactatggttaaacttgtgcatctgacctacattttctcgaaaatgagcaaagtgagcctgacacttcaagaaaaactgacagtatttgttgccaatgataaaattcaaactttcaagcgaaaatctgaattttggaaaactgcttcccaatacttaaagatacaaaagattaaaaaggaggctttttttggctaaatggtacagggttttggaaacagattcagcttgacaatttcacagcattttgtaagtttttggtttgcactcttctaactggttttaataacttattatcatttataagacctacaaaaacagagtaggttaagccacatcaatctaattgcctacaagacacgtgccaacatttttacattatatcagtgaccgttctatggcaaacattaagcattcaaataaggaaaatttattagtgtttcacacaagttgaattaagaatctacaaataatatactgacgcactaactttaaaaaaaaagggatgactagaattctgatttcctttggttagctttttgagtaatataactttaacatgttactcataatactaagaaagtgggaaaattgttatgtaagtgtgaaaaaaactttctccaaaatctttcaaagttaaattcctagtaaaaaaacataccccaaagatgtccaaacttttaaagagttacatgagaaagtaaaaattgctatagaatgaagagttaatttataagactccaaaatggcaaaaaataaagaaagctcttgttgagtatctagataatatcaaatccactaagctaccactgtcatttgtactataggcttcaaggggtaggtttttgtgaggttttttgttttttctggcctaaaggaaaactgcaataatgttaaaatattcttcaaactttaccctaaaacttctattttgggatacgtcaacgtttcacaatgcatttcttcttaaacatcatcatctgagtttatacacctcactgaatccaaaaattaattattaaagaaaaagtctcatagtaattttaagaaatgaagcagtctggattaggtttccatcttccttccctgctgcaattcactgcaataatctactacactcaagacaatgccctgatcattccatctgaaaattctgcaggtgttttcactctgtaaggggcattacatttttagctaactcggaacaaagagcactggctcaaacgaccacagtgtgtaaggagaaatgagaggagatgctcactgttactaagtaattgaacattaaatacgtaatagccaggaaaaactcagaaaagttttggaaatatgacatattttaatatgcatgtgaagttcataattctcattcactagaattaacgccgcattggctccttttcaacaaatgggggacgaggaattcggatatttaataaagaagttaattcaagcagttttacaaaagtgtattttgcaccaaaggccaaaaaatgataaaccggttaacattttaaactacaagttcccttagataacggttattttaatcactattttctcagaagtcatcctaacaggtagcaaaggcaacgtacccttgaaaataacacccaagcagactaaaataatggagcattgtttttacaagacaactcatcgccttaaaattccccaagtatggcacaaaaagaatggggtccactgaccccattctaaaaaagcgacctaggaccctagaaaacacacattgttggactcaatcacattccctgctgctggctcctccatatttttacaaccagttattatacccgagagtgtttgaataaaactacgattaagcactcagtttaggcttaaagacttaacattaaatggataaagctgtcatgaacactcaagaaagcgactagggcatcccgggccatcacactaattttgctacgtctatttaatgcaatcttttacgttattaacaaacatgcattaacaaaatgcatgcattaacaaaactcacataccaaagccatgccctgaagcagtttgacacgtctgaaataacatttaaaacaaaacgcttttctgcgggcccctgtttgaacagcttccaaatcccagaagtaacatcggataacagcctgcgctggctgtggtgtgaccaggggaagcgagggtgtgtctcggtgcttaccgatgcctggggccacatagatgaagtacagacaggacgaagagagggagaagaagaagatgaaggcgaggagagagcgattggaaacccgcatcatccgcctgagcacagacatcttcctcttccctgccagcagcccaggctgcgctctcaggccggactcggggccactgtccaggccctaaacttccataaatgtgctgagaaccccgagactgcagcggggtccgcgcggggaggctctggggagagggcccgagcggaaaagaggaaatgggagggagcggacggaatgaatgggaggccagagagtcgggggaggggaggcgcggaggccgagggacaagaggtggaggggggagaggggactgggggctaggggcccggggacggcaggacggaagaaagccggggaagggcgaggaggagcgttttctccgccaagcagcggcgggaggaggggctgcaggtgggaggaggcgcaggctgcgcgccgcggcgcccctgcggagaggggcagctaactgcagcacgcccggctccgctgcccgcgcccggcggggtcccgccgcgaagccccgtgcttaaggtccgggccgcccgcgtccgctcggcaggccctgcgccgcctcctactccgggccgcggcgtctcctgcctgcgcggggctagcgtgggcgccggggccgcaaccagcgcgcgccacgcgcgggggcccgcgggggccctcggggccgaggagctgggcgctcgcctgcaccgagccgcctcctcatgccgcgccgggccccggcgccccgcggccgccgcgggagctgagcacaggccagggcggcgtcccggccagcgacgaacgcgctccgactccggccgccgccagctgcctgcctggccgcaagggcggcagcggcattaccgccgcgcgcccggggtgaggcgcccccgccgggcccgcggacaccaggcgaagagcaaccgggcgacgcgcgctgcgggcagagccggggagccggaagagcagaggccgagcgccgtcggagccgcgtctggttggagaaagaggcggacgtgaaggggcgggggagccgcggaggaaaaccgggaccggcgggaacgtctcgagacccctgcgcgcttcgcgcgctcgctcggaactcggcaggcggcgctgcgccgggccccgaggaaacctggaggtccccgccctccccgcgcccgaaacaccgcgcgtcctgataggcccgcgcccagcagccccctccccgcgcccgccgcaccggggccccaccgcctcctgcgtcaccgccgcccccgcccgcccggggaccccgcggtgaccgcgctgctgggggttgagggacgcgttgcgagccccggatacattgtaccctgggggtacataatgaaggatgctgtacctgaaaggaaaagggcatctccaaaaggggacttcgcgggtggaatttccttccaaaatcctcgaggaacaaggtgtatttccgacctggattaatgaatcccccctcctatcccgcacttcctgtggaaacagtgtcaggatgtggcgcggacctatgtgcgtcccttataccaggacttgccttcaacgctgaaggtgaaccctgggtcatcctcgctgtattcaggcggcgctgcaaaggcttctgggcagccaataggcccttgagcgcctcagccccatcttgctt

SEQ ID NO: 7796 - DNA, 6000 bp, Homo sapiens; identical to SEQ ID NO: 2000

SEQ ID NO: 7797 - DNA, 6000 bp, Homo sapiens
aaccttcatctgtgtttggggacttttcaacaaatgaagcagcatgcatgtccccccacagacactgaaaatgccagatatttgttttcctacctccacagctgggaggaaggtgagatacaacctagactgcaccagtcagttccattcacaacagactttgaataaataaggatacagtgaaattaagaagcagggataatccattgtagtgagggggcagaagtggtaacaccctgtttccagaggcaacagtgtcagggatttagaacacagccttgtgcccagcatagctggtctggatgccaaaaaccatgcagtgtagccgagagagagcaggagtattgtcatcacaggaccagcaccacgactttttttttttttttttttttgagacagtctcgctctttcgcccaggccgtagtgcagtggcgttatctgggctcactgcaagctccacctcctgggttcaggccattctcctgcctcagcctcctgagtagctgagaccacaggcacccgccactgcacccagctaattttttttgtatttttagcagagacggggtttcaccgtgttagccaggattgtctcgatctcctgacctcgtgatccgcccgcctcggcctcccaaagtgctgggattacaggcgtgagccaccgcgcccggcctcgccacgacttttaaaggcattgttcccaacttctaagccttgttctctggcccttctggagtttcatcagctatcacataccattgtaataaatttcctttctgcatatggtaagcccaaattgacttttgctgtttgctactaagaaccctgtgtacctgctgcatctggaaccatccccagacaccacactttttgtaatgtaactgcttactcctctgttgccacactagactctaagtattattatgattggatcctcagtgccctgtaatcacccaagaagacactgattgaatgaatgaattaaactttctgagctctcatttcctcatgtataaattgggaataacagttacttggttttttgggttttttcaggcagtttccctctgtcgcccaggctggagtgcagtggcatgctcttggctcactggaatctccgccttcccgggttcaagcaattctcctgtctcggcctcctgagtagctgggattacaagcacccaccaccatgcccagctaattttcttgtatttttaggagagatgcggtttcacgatgttggtcaagctggtctcgaactcctgacctcaagtgactcaactgcatcggcctcccaaagtgctgggattacaggcgtgagccactatgcccagccaaaatagtagttctaaagaaagatggagaatgtttttctaacaggaaataaacttggacaacctccatctcaatcatctcattttacagacaaggaactgaggcccccaaagagtaaatgatttgcctaagtttggtggataagttcagagctgttttttactcctaggtcagtacattttctacacaccatgatggccataaaatattataggcatcaatgtttgtatcccccgcctccaccttcacatgttggagccctagcccctcaaggtgatggtattaggaggcacggcttttgggatgtagttaggtttaggcgagataatgaggacagggtccctatgatggaattggtgcctctaaaagaggaggaagagacatcagagcttcctgagaagccatctgcaaggcaaaagagggccctcaccaaaacccaaccacatcggtaccctgatctcaaacttccagcctctagaacagtgagaaatacatgtatgtttaagtcacctaggctatggtattttgttataatgcccaagctcagacaaacattttattcgataatactttcactttaaacttaaactgggccaggcacagtggctcatgcctgtaatccccgtgtgtccagaattagtgggttcttggtctcactgacttcaagaatgaagccgcggaccatcgcagtgagtgttacagttcttaaaagaggggcgtccagagttggttccttctgatcttcggatgtgtttggagtttcttccttctggtgggttcgtggtctccctggctcaggagggaagctgcaaaccttcgcagtgagtgttatagctcataaagacagcgtggacccaaagaatgagcagcagcaagatttactgcaaagagcaaaaggacaaagcttccacaacgtggaaggcgaccccagtaggttgcctctgctggctcgggcagcctgcttttattcccttatcggccccacccacatcctgctgattggcccattttacagagagctgcctggtctgttttacagagagctgactggtccgttttgacagggtggtgattggtacatttacaatcgctgagctagacacaaaatttctccaagtccccacagagcactgattggtgcatttacaaaccttgagctagacacagggtgctgattagtgtgtttacaaaccttgagctagacacagagtgctgactggtgtatttacaatcccttagctagacataaagattctccaagtccccaccagattagctagatacagagtgctgattggtgcatttacaaaccttgagctagacactgagtgctgattggtgtatttacaatcccttagctagacataaaggttctccaagtccccactagactcaggagcccagctggcttcacctagtggatcccacaggggagccgcagctgcccaccagtactgccccgtcagccccacactcctcagcccttgggcggtggatggaacccggcttggcagagcagggggcagcgctcgtgggggaggcttgccccgcaggagcccacagtggggcggggggtgcggctcaggcatggcgggctgcaggtcctgagccctgccccgtggggaggcagctgaggcccagcaagaattccagtgcagcgctggcgggctggcactgctggtggacccggggcaccctccacagctgctggtctgggtgctaagcccctcactggccagggccggcggtgccagccggcgctcagagtgcagggcccgccgagcccacacccacccggaactcccgctggcccgtgatcgcggggcacagcagccccggttcccgcccacgcctctctctccacacctccctgcaagcagagggagctggctccggcctcagccagcccagagaggggctcccacagtgcagcagcgggctgaagggctcctcaaacgcggccagagtggatgccctggcctgaggaggtgctgagagcgagcgagggctgctagcacgttgtcacctctcaccagcactttgggaggccgaggcgagtggatcaggagttccagaccagcctggtcaacatggtgaaaccctgtctctactgaaaatacaagattagctgggtgtggttgtgcatgcctgtaatcccaggtactcgggaggctgaggcaggagaatcacgtgaacccgggaggtggaggttgcagtgacccgagatctcgccattgcactccagcctgggcaacaagagcaaaactctgtctcaaaaaacaaaacaaaacaaaacagaacaaacttaaactgaaatacgcatgcatttattggtaggtagtgcagaaggctggtgcaggggttatgaagaatgctatgaagtttcaagtatggcaaccagcatatgcattcacgtttgctatgtgtgctcaggtgtgagagccagagcgtgaaaattacttctgctcacggggagtccagtatatacactatcttgtcctctcgggaactctataaagtagaaattgttacgctacagattattaaaacaagaaaaaaacaggctcagtaaaggtaattgaattattttgggtgctgcagccaaccaccaagttgcaatgaccaaatcggagccaaataaattgctcacttctggtccgtctcatgtccccatctaaattacatcattaatttacaatcctttggcatttttcataatctagacagcactttcccttctttcgtctgtttaagtcttgccattcttcctacctctctgaggaaggagttcataagagtaggaataggctattaaattctaaccatttcagataaccataagtatcctgatttatcatattgccataaataagcctaggagaccctacttcataaatggtttcttgtctgtacattaggtaatcggtgtgaatttccataagtctctaaattcaaagcattaatgaaccacaaataggcttttaacaattgaatcccggttgctattcttgaccttttcatttattttcagagaccacttctcatttaagtgacacttagcaactaaaaagattcacagagtgattcagagtcgagtatgatgtcctcactgttgaatgctcatagaatattttttctctttccatagtcttgaggaccaacgcaaacgtctagaggatgtgggattcttacctgctaacatatctttggcattaactccccaaatctttgaatgcaaggcacgcttacctgacaccctaaactgctagtttagggacacccgccgcagagcggaatcgttcaaggtcactggggctgcaggtgcggggccttaaccagcgctgccgatccgtcagctctcggcccacccttggggatccccatcgcccactgcgacctagctgggagaacccagtccgcccgccctcccggtggccggtcttggaaccgcgcttctggaaggttcctgagtggctggcagtgggggcggctccaggaagccggggcggagcgggcggcgttggagtctcgggctacgcctccctgggccgctccgccccgcccgttgtcggaagccgcgctccgccaggcaggagacactgtggtcgggagtaggcagcggcgccgcgtccgctctcgcccgctctcgcccgctcgccagccggctctcctcccgccgcaggacccgcgcgccgcgctcgggggccatgcagcgcctggccatggacctgcggatgttgtcccgggagctctccctctacctggaacaccaagtccgggtggggttcttcggctcgggggtgggcttatcccttatcctgggcttcagcgtcgcttatgccttctactacctgagcagcattgccaaggtgagccgggggtggcgcagggccgcgggctgctgggccaggagctagggtagcaggcgcggcgcgaggctgcgcggccaggggcggtcggcagccccggggataggcggcgagctgctcccgagcggcagcccccagcgcgcgcgggaaagccaacaggccccgcccgttcgcccgccccctgggggtcccggccgggtggtcctcggagcgcagcctgaacccggctgacttctgcgctgcggcgctgcccggtcaccgatcgcgaagccggcggcgcactcgggaacgccgtggcgcttttgaaaatgactccgggcagggcacggtggctcacgcctgtaatctcagcactttgggagcccgaggcgggtggatcacctgaggtcaagagttcgagaccagcctgaccaaaatggtgaaaccccgttacaattacaaaaaattagccgggcgtggtggcggacgcctgcaatcccagctactcgggaggctgaggcaggagaatcccctgaacccgggaggcggagttaaaaacaaacaaactcccttatcgcgattctcgccttcccctcggggcattggcgaaacccccgtttcagtcctctgtgactgtgaattttttgcgtcagccctccagaaagagttgtaatcggaggaagcgcgcgcgcgagcgacaagtctttgccggtttctggtttacggttggcagaaactttgctctgggcccttctctgatactgcttttcccttcagaaaccccagttagtgaccgggggtgagagtttcagccgct

SEQ ID NO: 7798 - DNA, 6000 bp, Homo sapiens
taattgactactgatttaaaacagatatacaatttacaataaaaatgtctttacttccaaggaaatgttctatatgaaacgttttatataaaatgaatccacaaaataaacatatatatacaacatacacacctaattgttaatgataatatcaatctacttctattacaaaaatgtcaacatagtaggtgactttgctgagttctattgtaaccactggcaagaaggggaggtcattaagatgactggtttggcatagggacaagccaggttgattaaactgaagtcagtcttttactcttctttagaattaccagatggtggaggtgatactcaggttcccctaattaagtgatgttacaaactacttgttatattttcatgaaacaagattttttaactttatactatgaaaatgttcaaacatacagaaaaggagaaataattaaacagtgatctgtcaactctgccattctttttccatctcttttgctcctattctactttttgctgaggcatgttaaatctcaactatcataaggtttaaatatattccaaactttaaagaaaggaaggtgaaactttaattttgtccactgttaagatgaaaatatgactttgactaagtgatattaatatactcaatctcttggaaactatcaagaaagcaagagtgaattctgtaataaaatcataccctatatcattaagatataatccaaaagttgacctcattgtaagacagggttccagcttttcctcttaatattctcacccccaaaatttcatcaaaaatacgttccctcgcatggaaccttaaaactctaaggttctttttaatgtaaaatctcaaatatagtaatacttaagaaaacaaattgagtatatacataagcactagctgtttactgccatttttgggtagagtagaatagaaaataatacttaaaatggtaggggtgggtaattagcatataaaatttacatacttacatctacaagccaaatgtcatcatttcgattttctttaaacctaaaaaacaagaaaacaaatgtttgattgtatgtttgtgtccactttacaactgtatagtataggcagagataatacattgataaatataagggaaagacccaaattccttcaataatactttacataaaatttttactcagtgacctatccattaaacatctcaaagataaaagcagaggactgatcaatgataaagtaattaggaggaaagactccaagaaaaagaattaaagtaggacttggtagaaacacaaacagatgcctaagctccttgcccttctagaacattttacacctgtttagaaaaggtaccaaaggaagcctgaggctgctatgcttagaaataactgtttctaagaatggtccttggttggcatctgggaacttggattttagaagtgttctcaccatttcctggtaatgatggctcagtgttcataaaatgcgcgtgagaaatattggattgaggaattcctgtgctgggatcccagatcactcccctgaagatgtgcagtccagcaggggtactgtaccttaccatcagctggtcaggcccaacctttaactgtcccttaaaatgttcaaccaccctgcggatcagagtttacagcatatgacgagcccattgtttcacccataattgggctcactgatgtgtagcttgggccaaaaatccagggtcattatcagatgcagtgttcttaaggtaactgaacaggaaacaaaggtggtcttgtagggcctagacagtgtggcccaagtcattggaacacataggaatggctaagcgaaacccagagacatgtcagctgcaatcaggagccacaggaacattacagacagaatgagaggcccaccatgttctatctgctgagaatatcctggcccactggctttatgaacctgtccctggacagtattgttagccttgaccggggtctgacaagcaagcagctttttcacgttgttatggtgtcttctcacaactgtcgcagtccatgcattcttgcccaatctgggatcctgtctgaatttccatgagccatctcttgtggatcccggaggcaactggttgcacatctgcttgctctggagcaaggaacaattcattttccacatttagctgacgaacagtttgctcttggtaaaggtcccctttttcagcatagggacctttctggtgagcatccacatgggtaacaaaatggttattaggagcagaatcccttcctcctcctcaggaagagttgcccctgttaggacactctgaaggaggaagtctgtagtgacacaccccacaaggcactaagtttaataagactatctccttgttaacaatcgttcttctcagaatcaaaaacttcctgtaaacaatcagtgagcatcccccatgacccaacagcatgagcagcgaagtgcccccatgggactgtcaggatttttgctcttacagaacagcactgtatgatcaccctctcactgcacccatttggtcatgccatcaggtgtccaggtagtcaatcaggacaacaagctaaactgaaactaacaatcacagctttattcacttactgtgacagtgcaagtcaagaggtttaaaaaaaaaaaaaaaaaaaagaggcaccagctcctcagtgttccatctctccccatgaaacagcaccaggtgagtcaggtggatgagacacagatgggagaattcatctcatttcctacagcactgaacaaaagtcttctgtctctttatggggggtgagagagaaaaggactagagtagaaaagtgcctccgctgacaccctcaataaagatgttttagcagaagtgctcaggaaatgcctcaggtgaggtcccaataaggaggctgctaaacagagaccactgggttgggagtgtagacatgcaaatgagcgtggctggcctgggaggccgaatccttgactaccactccctccagggactgtaatgcaccggttatacaccaagtttggtgtagggagggcaccttcccctatgccagaaaaagccttgcaattgtctatggtcaagcctgaaagatcacacacaggaatttgggtctgaagtgaacctcctcacttactataagcaaggctgattaatgctgtcatactatgaagataaatacagtacagttaccaaattctaacacccattcaatataattaaaggaaaaagacataaatacaaggtaagataatgaggaaaaaaagaatatgtaaaagtttgccacagttttttgatctcataactattaataaaactcttctgggcacaccctcaccttcacttacaacaagtgaaaaaaatgagtgatatataaaaattggttccaatctaaaatattagaatcacatgcaaatattcagatatctgagttggacagttaaaataatattttaaatatatatatgtatactcacgattcatctaaatcttctacaaatcctttacagacgaccatatcaagtacaacaactgaaaaaaaaagacaaaatgtacacaataaatgctgattatttggctcataccgtataagcttagtcatctctgaagtgtttttgacctttcacaacctaccaaaaaattcatcactgatgcatcccagggtgcaaatgatgcaaaagcaaaggtagttcatccatttaataaatatttagtctgtatgcaaccatatcgtgaccggccaagttctaggtaagccaataaatctaatacacacagttcctttttcctccatattttcactctcatcttacgtctctttttaaccatcctatctttttggaatacaaatagacagcattcttctttatttcttttgctttagtagcaattacctcttccgtaaaaactccaaatgccattcaaaatatttcccctcaaatagatacgtaggaagaaagtcgagctgcaactctaatacttattacacggcagtgcctgacacagagtgggctctaaaaggttgttaagtgagcggaccccagtgagaatgagggcactccatgctgacgggaggcagctgagaaccgctgacacacactcaggtccttttcacaccgcacaatcccggcggcctgaccctgatctgtcctcgaccaccctctcttgagtactggtggtaaaaatccttaaacgtgacaagactcggaacctaaagccaaggcaagatttggtcgttaagctgggacggcggcatccttcttgcccatcaaaggagtaagctttattgaaacttctgccacaatgagaaaaacacaaacacaaggcagcgcgcccttcccacgtccagcattggtccggcacagcggcggcggaaggaccccaaggtgtccgctccgtcagggccaggcagggtggcgcggcgggggcggcaggacgctgccgggaatgggtgggcatctccacgaaccccgcaggcctcgccccagacccgggtccaatcccggccccacggcggggccaggtcccacgcgcccgccagcgtcccgaccgctgagcccccattacctgtggcgcagagccgcagggccgtccaactcttccacgctgccatgctagcccgggagagctgcagaagctgactgtgcaaaagagggataaagacactggggtccgccgcctgcccgcccggaaagggaaacggagccgacccggagcggaagagaagcaccgcgctaactacgggggcggggctacccggccagtctccgtctccggctatgcgcgggagtgcggcgcatgcgaggggagtgcggcgcatgcgacagcgcctgcgcagtcatgtcttaagaatcctttgcgctctcggtgcccccctccacgcccaggagcgtgggaaccctgcttaagggctttactagggaaaacggtgctggttcactggggcgcgtttccgggaaggtgaataccggtgaaagttatgctgagggtgaggtaggctctgacgacgcacttgcaggttgaatactggcacatcatttacttgttactcccgtgtggtgagtgcacctgtgggttttgatgctggatcaaattcctggaaagaggcgcgcattaagactgcggattgctgagctgcgcgacactccgtatttttccaaaacgtatttgtaatattctttcaacctgtttgcataatgggacatctcttaaatgcagcaagctttaatgcatttttgccaaagtaaggattgcctctttaaaaactttctcttgaaacttgagaacatgaagttaagcgtaggatattttttgatggctcttttctgattattttggaactagataaagtagtatgaaatatttatattgctacctgttttttcttctatacgacaatgatttgtaaaaaccatatacttttataagacggttactgcagcaatcactacttacgaactagatgaaatttttatgggacataaggtaccagagaatttagatcaaaccaaattttgaaaacctgtgacaacaacagaagggggatatgatgtcagccggttcaccttaggttcaaaattccaacaggcaaaaatgtcataaaacgtcgttattcctagtgactagaagattaaattgcactctaattgagagcaagccctaaatgtcaccccctttgtgcatgcagcatggtatccagcgcaagccctctacagattcaatttttctttttctttctcttttcctttttttcttttttttttaagaaaaaagtagactaaaacgtaaggggactgttgaaatgatgggaatgttctcccggtggtggtggaacagctttataatagtaccatcgcctcgatactcttatacagaagcttttctactttcttggcaaggtctctgaatgacccatattcaatttttttttttcattctcatgtatttcaaagttttctgtcttccacagcatgcaaagtgaaataatttcctcttatatttg

SEQ ID NO: 7799 - DNA, 6000 bp, Homo sapiens
agaaagcctcaggtggaacaagcatgaggataaatggagattcacaagcctgttaactcactgtataaacgtattaaggaaatgagctttaatttcaaaatggggctcatcagagattgagaaatatgttgcttcagtactaacgctatcctacttggcctaaacaagtccaagacatgcctctcttctagtaatgactctacttgcaaaaactcagttctgtctacatacctggcaaagtaatgctctgcaatgagaggatattaaattatgcagattattcttgtggagggcaaggctggttaataaaacaaacctgtaccggcaggcagatgttttcaactatttaattagatgacaaacttagtttgaagatactcctctgtgcaatctctcccccagccaaaaaagaaaaaaaaaaaaaaacaacaaaaaaaccccaaactggctttagtaccagtttctcatcttctgtaaagacattttcaactcccaccacaattctcagttggtacaactcagagcaaactttatcaccagggctgctatggctatggccactactaggattagtccagaattagtacagtcacatgctggtttgaatgaagtactaaagttttgcttattaaactgtatcaactaattccttgttccttttttttttgacataattccctgttcttgacatctctcagccaaggtgaattacgtacagtctggaagtctactctagaaaaaccacatgaactcagaacctcactgtcccaacttttcccttgtccagcatgacattcatggaaactgctccaatttcaatcattcctcaagtcatggtggaccttctgtcaaggaggcagcagtggtattctcagtagtcttcagccccttcagtcacacctttccctacaatatggattctaactcctgctttcaacccctcattttctattttttattaataatgttcacctttatagactttctctaaagatagccttgatatctttctctacatattttatattctgtattagaaaaaattgtaggaggcagcactacgctcaccaaaagaactgttccctaagttctgaattgggaatgtttacaacatagcaggcatgctttgtggcaagtgccttgctgagaaggtggaaattcccttttcaataacttcaacattttacttttactttaaactcctcataactagagatagagtagcagagacaggacagacacacaggtatattaaaataatgaacagcactcatcttacctcctgaggattttcatttgtgtttctggaatacataaagccttttcggggctcactcacagattcatttgttttcctaccagccagccggctcacccggctctttgatgtgacactgggtggagtggagctgcttacatctttggggaagagttttccaggtcttggagtctctattgtctctagaaagtgagttccttcagagacagtgttgtacacagttgaggtcacttcactagcactaacactgtccttgacattccttctaccactggcatgttctggtcggtgagctcctttcccctggctgtttctaggatctttacctgaactatctgagtcatggtctgggcaaagagcttttcgcttatttttaccagaagcagcatgattatggtgagagtgatgatcatggtcagagtgatgctcgtgctctgagtgatgctcatggtctgagtgacgctcatggtctgagtgatgctcgtggtctgagtgatggtcgtggtcatggtgtatatggattcttttaatcttatctatgcctatattttgaagtaattttctgaacccttcaactgacaaagaattattttctccatagcggtagaaaagctgttgtagatgatattgccgtgtggaaattgccaagtcaacattaatgccagattcccaattcggactaattttctcagtggtctgggggaaagcagctgcttttagttcatgaaggggatttgtgacagagagggcaaaggtcaggatcaagattacagataacttcctcgccattgcgccttcctagaaaagacaggaaaaaaaaattcttgactcacttctaaaacaaattgaattaagaaacctcatactgaaaattaatgtgtaatcaaataatcaaagttgccagagcatcatgtggtgtgaccagtgtgacgctaggtactgtgaagatggaaagaactagagtcctaggctctacccttgcattcctaaaacacatgaaacaactggagaagagctgagtgctaagagactgccattagcactgtaaaagcaatagtaattcagagacaagggagatccatgtggccacagccatcaactgcttactgaagttgagaatttatttgaacgattatttgaatcattgaggccaatgattcataattaaatctaggctgggtgtggtggctcatgcctataatcccagcactttgggaggctgaggcaggcagatcacctgaggccaggagtttgtgaccagcctgggcaacattgtgaaaccctgtctcaaaaaaaaaaaagaacgaaatgaaatctagctaccttgatcatcaccatcatttcataaaataaccttcaaacaccaaaaaatagaaataataatctcagaattcacatatttaaaaaattttaaactaatacactctccttacatacaagcccatttaagacccctttccccaatcacaatcctcaaaggtgctcaattttgccagtgtatccctcaggatattttctatgcatactcaaatacatgtatacttaattttttttttaaagttttttttttttttttctagagacgaggtctcactatgttgtccgggttggtcttgaactcctggcctcaagagatcctccacctccaattcccaaagtgctgggattacaggcgtgaccactacgcccagcctcaaataagtgtatactttaaatacacattgaatcttttttccgacttgacaatgaatcagacacattatgtccatacatagaattcttaaagtaaactgaacttcatgaaaaactcactgtagcatccttgtgttactacaaaccagtcaacatttaatcacaggctgttaatcatccacagtagtgtttggaaccaaaggcctgtgccccaaagaggaggaagcaattgagttggagcttgaaaagcagaattcagttaagcagagccagaattcagttaattcagatccagcaggatgtccagcaccaacggtggaggtgatggtggtcaaactcacatctccagcaaaagacgcagacgtcaagtttacaactaagcaagagcatggggctatccagctctaccacggtcagctgttctttggacagggctctcgcattcattaccttatctaaaataccggtaaaacctattttgcaaggcgaaggaggaaaacacatgaaggaatgtatattacaagtactcgttaaactcatgtgttgcacaagtgcgaggtatcatacagggaacagtgggaaatggaggtacggcgtagaacgaggctcctgaaagaggaatctttggggcttgaagtttcgggaattcttttactaggtaaaagataaacatttagaaatcattcccaggagagaggcgaggagcggggtgggaggggactagcacaggggacagctccgagcctttctccagggaggatgctgagcgcggtcgtggacccgttgaaggatctcctttcctgcaagttggtgtgtgctggaggaaaaaggaaagcagaagggaagggccttagagaaaaaggcgagtacagaaaacggaaaagagggcacaaagctctcttctaaaagctttttatttctaaacacgtcagtcccttcttcgaatatgggatgaaaagtacggatcttttcctcaaaaaatcctccgttgcaccccgaagcccatctgagcaccttaagaagtccggctctctagggtgagtgggcgcctgcggcgggctccccccagcatcctctttctgtagcccccctgcccggtccgcaggatccggttctccgcagaaccacccctaccccgccacgcctgtctggcctgaggagctcccctcccagccgccctgctcccggacctgaaagactcacgtctccgcggcctcgttgtcccacggcccggccacgcgcgcaggtttggttccacacgggcggtccagagggctcggaacgggcccactggtgtcttcgagaaatctctaccaggcgcgaacacgcggtggtttcattgggttggctgcccctcggtccgggggcagcgccgcgcagccacccggcagccgcgcccctagccttcgcgaagctggaagacaatcactaattaccgccgcgcgcagcgccgcggggaaccaccgcccccttcgcccaggactgcagggcatgcgcagtgcgaccccggaacccggctccgcagacggatccgcttttccgtgtgttcgccgacgccgcgggggcgtggcgcggccctagcgcattgtaagcagttgggggtcatttcctcgaggccctactcgctagccagcgcccccggggccagccctggctgctgctgggagccgggtcgtaaggggcagcgagatgtttctgacgctgccccaggcacatgagccccgggtccttcgggagggtcccgagccactcgggtcggatttcgctcttgagacaaaggcctggctcgttcgcggagcggggccacggtccaagagcagagctagcaaagcggcggccttgcacaggggttccagcctgcggtgggaacggagagtctcaggggggcggggctgcctccgtctggccctcggctggctgcgaaacgtggactgggtgatgcctcaggagaaaccaccctagtagttccgctccgagggcggaagtgcgcgtctcttgtttgtgcggctgaccagttggcgacatggtggcacccgtgctggagacttctcacgtgttttgctgcccaaaccgggtgcggggagtcctgaactggagctctgggcccagaggacttctggcctttggcacgtcctgctccgtggtgctctatgaccccctggtaagagaggtcgctggacggccgacccttgtgcttttcgggttgaacctgtggacgtgctccgggcgcgctgttagttgccgccccagacctaggaggcgagtcgggtcggctcaggggagcggggtttgggctcggagtctccagtggacctgccggactcgctcctcacccctcaccctttgccgtctcacgcgtggcgtcatcctagggtcattgctgcccatgagctgctagtaacctgttagtcccacgcagaaacccgaatgataagcatcttacctgaagccttccttgggaactgtagtaccgttaatcaatttgggttttaaaacaattgaaatttatatgtagattaaaaccatcatcccacaggtgcaatctcatttcagtatttccttcagttttggttaatgaacttttgttgtattgaatttcaaggaaatgttacctgtgttttagctacgggaatggacattttagagaaagtgtcagtttgggggaaaggtcataggggatggggatcctaagcactgattataaggcgggacttccctcgacttcacccagtcagttggttattttcttggtgctttcctcaccatatttctcaagtgaatagtttttgcatgctccccggaattcattataactccattcccaatggctaagttggtctatacagttagtcttgcatctcaaaaggaggctcagtgtaaaaagtaaaatgttgaaaattcaaatacaacgcaggagatggctatatgtatttctgttcatacggctttattaatttggttaaaaatttcattattggccaggagcgtgtctcatgtctgtaatcccggcactttgggaggcagaggtg

SEQ ID NO: 7800 - DNA, 6000 bp, Homo sapiens
ccaggagtggtaagcagctctcaatttggattttggagctggcttgccggccactggctggcaatgaggaccctgtccctggtggtaggggggtactgacagcacctgtcatagagctgtagtgcagctgatgcagctctcaccaatggggacctgggatggaatgctggcggaagggaatgtactggctgatgtgttattctgggagtttaggaggaatcagcaattttaaggacttatatcagacggctgtggctggggccatggagagggatggtgagatgaagtgtgtaactaatcaccagtgaaggtgagtgccaagggcaggagcctcctccccggcagaacaagactcaaattgcacccagaggatagaaaatgcgtgggtgaggtctggggcggaagggattcagggagtttggcatttcaagcccatgagacctcccacaccaaggtcagggtcctgatttgggaggaaaggcaacctaaagctgggtagggggcccttgaggtcaatgttgtaaaaaatcttgaatcccaattctcctgacccctctagccctgaagcagcagctcagtgtctggtaaaggttggcacttcctccaccttggaaactgggcgaggggtgggtgggggtttctgcctagcaagatacgtgctgctctcaggagggctctccacctcccctcctggccaagttacaacacgactgggcatgagaagggtgagaagaacaatactcggaaggagctggaggtccccccggggggggggggaacatagacaccactgcttcttaagggtggtgtgtcaagggcacagaacacaaaaccagctgagagttgatcagcatggggcacgctcctgtgatgaatttagcaaccaggcaagcaccctgggaactgatatgcagctggctaggtctgctcctggaaacttcgagacagtgatggtccacattaagtaaaagtgacagaacagccatggcaaactggacgaaaggctcaacagcctccaagaatggggatgctaccatagatataagatataaagcccgaaaacccaccagctgactatgttcttaggagggacaggaggacactgtgtaccaaagccacaaggaagccacagttacatctttatagagcaggatgccctgacagaaatggagatgaaagaattatgaagcagagaccaggctggggtgttaaacagaagccaaggtgggtgcaaccatcataactaatggcaaggctggagtggcagtcgggagtgtctgacctacagaaagcaacagagttgatgactagaacacagtgtttccaaagggaagacacaagggcagcggacaaggctacttctgaattacacagtcatgagaaattaactacagatgattcctgaggctgaaggcagctgctctaatgcaaagtcctgaacattgccccagtttctggacctgaaccagttttcagacctggaacgcatttactgaaggaaagcgtatgtaactgactccccccgtccttcaccaaaaggacctacagttatcaacttggacatagtctgtgctgacagtgatacccaaggacccaaagagtcatgatgaccccctgaccgccctccatcaccggatgtaagaagctcacaggtgggtccagggacttacctggcaataatttctgtgatttccaaatgtataaatcaaggggatgtactgagtaactggcaacaataactcccactttagttcctttggaagtgggttaagagccatcgcagtgggaaaagtcaaatggaagcccctgaagctgccctttcggtgaccaagataggaaattaaaaatgatatcacatctatggggaatggcagagtattcttagagaccttagatacaggcatggcgatccccatcacggtcccttgtaatttaccagtcttcctttacaaaacacaaataggtgctggagaatgacagtggttaactgcaaactcaaccaagtggcagccggggtacacatgtaataccacaaatggtaactttacaggggaatgcattaacacaatctcatggtattggccattgctttgaagaacgccttctattcagaagcagcagcagtagtctgtagtaacatgaaacagataataacagtgtatgtttatgatcctgcccaggatttgctaattctctcaccctctatcataacagtcttaagggactgaaaccttctggacctgggctgtctaatacagtagccacttgccactcatggctatttcagttcaattttaaattaattaaaattaaatcaattcagttcttcagtcacaagttttagcaacatttcaagtgctcaaaatagctacaagtggccaggaactacccaaatggacagcacagatataggacatttctatgcagaaagttttatttgaataatgctgttctggacattcaggagaatatcacatttgtctactatatttatgccatcatgttagagcccataagtaacaagtggcaagtgtgttagaaggcttggtcagagaagctgcaagtgtgagaggtgggtccaacaaagatgcagaggctcatcaacacatgagccgacctcgtggggctacactggggcgtgccaagacatgccctcccaagtaaaagacaattgtaccctatacctcctaccacaatgcttcataggcctgtttgaattctggacgcagcatattccatatttgggaatgttgctcccatcaattcactcagccacaaggactgtcacgtctgaatggggtgcagatgagggaaggggtccctaagcaggcctggtgtgcagtgcaagcatgagcactgttgcctgagccagatgacctgatgcacatgctgtttgccacttctatgcctttcacctctgcatacaggttgttccttcgtgctgaactagtatgaatgaaaagctaggtttttggcatagtcagcagactctaaaacaattggtatgatccaattttttgggttaaaaattattaaaaggtatgtgtatgaaagtgcaaaatgttaaaaatagtcatcttcgtgtggtataatcatggcggtctaaattgctttgtctttttttttcctacaaatcacatgcgaaatgaagacattaaaaaaaaatcttaaaatatctgtgaatacatctctgactttccctgacaacttacattccatcctccctattttatgtttttctattactgcaggtaacatgtgaaagttttccctaccagttatgagtcaataatctctctctctctctttttatcctatccaattactctttattatatgtaacagagccaatataacttgagaaaaatttcccaaacataatgaaaaaaagttatatcaaattcaagatcaactttcacatctgagttccaatctgtgaagaaaactgtagatctatatgttctagttctaaattatgtttaaacggtttttaaaaattcatgtgaattgctttttcacctttagcagtgaacttggtataaaagggcattggcagctcttgtcatgtctgttgaaagcccaatcattaaagtactcctttttacctttttgtgatgttgggacggcggttccccctctctgactcctgtgcacagacacttgtttgctgccatcctcctttgcttttcgggggctcggtccctgcgtccagatggttttctgggtgactccaagaatacatctaggtcgcagcgttttcttttgatattgaagcccacatctcaaactgggctcagtcttcaagcacgctttgttaagcacgatgtatggcaaaagcaatcgctttgccgaggacctgtgcagcttctccgtatactgtacggctcgtagaaaagtacaaatcatgttcacggaaaatcgttccgcttagggacgatgctaactacaattaggaaagctttagggttcactacacatgcggccggacacgtactcaagcctatacgtttacattacatggggtgttaggcaaaaacgtcagtttccgcagcgtaaatgaaaacgaaaagtctccagggagaacctgatgtctaccttcccttctgtcttctttccattttaattaacaggctctgatcaccttctgggctgacattcacagtgtccccgccatgccttcgcaaagtcacctgggaaacccccgtcttcctgggaatagtagtttgaaaacctcgctcttaactgggatacggcaaagaggcgcgcaaaagagactacatctcccacaattcaaggcggccagagcacggcgcaggtccttcccgcgcccccagacgcctccgcgcccagcgtcggcgcagacgctgcgcgtccctggagcggcggaaagtggggtgttggtgggggaattggtaccacccaccctacgtggttcaggcgggacttgcaaaagccaaattagcagttacaatctacgtgttttcctgatccttatagagaggactgtgcacagtgggaaatacccccttggactgtggtcttgccaattccgcgtgggcaaatgatttagtttttgcgttttactgtgttttcagaaaaactggacaataaagagtcagcaagtggggatgaacgaggccgctgcaaagcaggcaccggtttcctaaatggttaagccgcgaacttggcttggcgccctaggcggcagaatgttaggggtgggtaaggaagccgaggcccggaagtttctagaagcccgctctgtgagcgggtgtctggcgcggtgccgtctgcgcaagggtgggcataccgttacttttgctcacgcgcgcatgcgcataaggggtgtggcgacgtgcgggcgtgggggcggtgcgtgcactcttcgtttcagccctggcgcggtcctgtggtgaactccttgtctctatggcgactggacgcggtcggatcttgcagcagcactggctcggcctccagacgctgcgcgggcccagcaggggcggtggcgcggcccgggggcgcgccagggcctttgggtgcaggtgactgtagggcctgcgggtggggtcccctggcgggaagcccgtcactgcgcggccccgctctcttcaccgtgtattttattcgtccagcttggcgcaaggcccgtggccgtcttcaacgtgagaagggtatggaagaacgaccggaggaaatcctttctaccctgcaacgtggggtaccctaagttatgacacaaatagagtagcctctcggggaaatattttttcttgcggcgcctgtggccggggatgcgcgcacctgccaggacaggtgcaggtccaagaggtcgtttctccgggatgcgtgccctaaattcacgtgtgctccgcccctgccttcgtattttcgctcttctgtaaccaagaatctcccttcgtgtttttcatgaccttacaacttagggaagtagagtctgttcatcaaaaccttatcagttgacaccctcatcccccaagcagatacctcgggcaggcaggttggtctggcgggtggggggcagcactttctgcacctccaacgtcaaggctaagttgccatctacattgccaggtcttgctcatctgctttccagaagcatcttcagcgtgaagaagtaaaatgagccagtgcatcagaagtatcagcatgcataatggtaccttatgaaatccctctcattatatcgtgagctgttccctagctgtgtacccatcactgcagttagtttacagatggagggataatgccaagaatggtttacattcttgaggattatctttctgcttgtaagactccttgatttataaatagggaaagtcatgcatattttgccttctaataaaccaatggtctatgtttaagcacacaaagggagtctattacatactagttgaactacttgttttttccccctgaatctccagaactatgtcctgtgtcctctctaggtctccattacttccacttacctgtttt

SEQ ID NO: 7801 - DNA, 5687 bp, Homo sapiens
actcttttcccagtgggtagagctcccatctctctctctttttttttttttttttttttttttttgagacaaggtgttgtcctgttgcccaggttggagacgagtggcacactcatgactcactgcagcctcaatttcccgggctcaggcaattctcctacctcagcctcccaggaaactgggactacaggcatgctctattttgtctggctatttaaaatttttttttcttgtagagatggggacttgctatgttcaccaggcggtctcaaactcctgggctcatgagatcaccccacctcagtctcccaagtagccgggactacagcatgcgtcaccatgctcgcttaatttaaaaatttttttttgtggagatggggtcttgctgtgttgcccaggctggtcttgaactcctaggctcaagtgatcctcctgccttggtctcccaaagtcctgggatcacaggcataagtcactacacctgacaatggagctcctaacccttagcccatctgctgggcgttttcccccagctctgtggcttggtatcttcttaaatgtggagataaatcacgccttctcaaggtcatttgaaatcaaaattcatctccaagtttcaggggcagggaagacttaggcagttaaagacggggaggaagggagtttcaagctgggggcatggcctgcccaaaatcctggacgtgggagagagggaagggcaggtctcagtttcctatgagattctcttggagtgaatatttatttactcaaacccctcctggcagaggcaacgcaactctcccacccccaccccccttcctcttgaaattcaaaacacacatttggccaggcgcagtggctcacgccggtaattccagcactttgggaggcccaggcaggcggatcacctgaggtcaggagttctagaccagcctggccaacatggtgaaacccctgtctctactaaaaatacacaaattagccgggtgtggtggtgcgcgcctgtaatcccagctaatcgagaggctgtggcaggagaatcgcttgaatccgggaggcagaggttgcagcaagccgagatcgccccgttgcactctagcctgggggacaaggcgagacttcatctcaaaaaaacaaaacaaaaaacacattaatcggccttcatttggatatcacagataatcttatcttgcaagctgagcccagaatgatctgagggctgggtccacccccttcacccctgccccatgcagttttggggcccaaaaggattcggtggctgccaggtcagtgtcctacaacagttgaaagtccccatggccggaagcccccagctatctggaggtttctcaacccacatagtgcctaaatgttccacgtgcaacatacttgcctcaagcccctctagacctaaacctttacacctctgtaaggctggtccctctgtagcgtgatatttcacaactaacgtttcaccctccttcatcttttaatactgaggactgggggttcaaatcccaccttgccgatctttgtccattatttaaacttctccacacctcagttttctcatctggaaaatgggcttaatcaggtggctgtgaggattcaacactattaatggtaaagtgcttattaccatagtgccaggcacaaagtaagtggtagctattatgattagttctggttttgttgttactatttcttattttgttttgatttttaattttttaaagttaaacaattttttctttatctttttttttttcctgagacagagttttgctctgtcacccaggctggagtgcagtggtgcgatctcggctcactgcaacctctgcctcccgggttcaagtgattctcctgcctcagcctcccaggtagctgggattataggcacccgccaccacgtcagactaatttttgtatttttagtagagaagaggtttcaccatattggccaggctggtcttgaactcctgacctcaggtgatccaccagcctcggcctcccaaagtgttaggattacaggctttttttttttttttgagacagagtctcactctgtcgcccaggctggagtccagtggcgccttcgtggctcgctgaaacctccgcttcccaggttcacgccattctcctgcttcagcctcctgagtagctggggctacgggcacctgccaccacgcctggctaattttttttttttgtatttttggtagagacagggtttcactgtgttagccaggctggtcttgatctcctgaactcatgctctgcgcgtctcagcctcccaaagtgctaggattacaggcatgagtcactgcgcacggactgtttttttttttttttttttttaaagagacaaggtctttcgctgtcacccaagctgaggtgcagtggcaccatcacagttcactgcagactccaactcctgggtacaattaatcctcctgcctcagcctcttgggtagctgggattacagacattcaccaccacaactggctaatttttaaaaattttttgtagtgacaaggtctcacctacccaggctggtctcaaactcctggcctcaagtgatcctcccacctcagcctcccaaagtgttgggattacaggcaggagccaccgcgcccaatctgtttttggtttgattttttttgtttattaatcttacttgctttttgttttgatttttaaaatgctttgtttattaacatttgtttgtttttgttttgatttttagaaatgtttctgtttattaatctttatttttctttatttggttttaatctttgtttaaatttttttgtttgtttttaaatatttgtggttattattattctactctgttctttccctgagcaagggcactggtctcatatccccaagaagggggtgtccaccttggaaaaagagaggcattttctggacccgaagttccacagtgcctacggggatagggaaggcttccagcaaaaacagctttgagagaatgtttttatttttattttttttgggatggagtctcgttctgtcgcccaggctggagtgcagtcctggtgcaatctcagctttctgcaacctccaccacccaggttcaaacaattctcatgcctcagccttccgagtagctgagattacaggcatgcaccaccatgcctagctaatttttgtatttttagtagagacggtgtttcaccatcttggctgggctggtctcaaactcctgacctcaggtgatctgcccgccttggcctcccaaaatgctggattataggtgtgagccagagagaatcttgtataggaaacaagtaggccgggtgtgctggctcacgcctgtaatcccagcacgttgggagactgaggcgggcggatcactaggtcaggagttcgagaccagcctggccaacgcggtgaaatcccatctctactaaaaatacaaaaattagccgggcatggtggcgtgcctgtagtcccagctacttaggaggctgaggcaggagaatcacttgaacttgggaggtggaggttgtggcaaggcaagatcgtgacactgcactccagcctgggcaacagagccaggctccgtctcaaaaaaaaaaaaaaaaaaaaaaaagaaagaaagaagtatcccagcccagagtctaggaaagagattttctgcgtggggagaggaagaatagagacttagggaggaagtctctggatgggaggctggagtgtgggcatggagaaaacctcaggcaggctggggaccaggtcacaacaggtgggctggacagctctgtgcaggtccctgaggccacatggagggagcagtgctggtgaagtggatagaaagggcggaaacagatcgtggagcgggcggtccctacaggtccctggtcccagggagcagacgtgaggtttgtgtgcctggcccaagtgtgaggtggatgctgtcacagttcgggggtggggggtgccccaaaccgcccaggtgtccaggctgcatgggacaggaggaagatgaggatgaggcaggaggggatgtttgattgggtgcagctgtgttgaggaggtctacgtgctgggtactggggagatgccctgtctctgcgacttcatgcaatgttaatttcttctgatccttctttgatatcctcctgactgcatccggtctcttctgggcatccctggcttcccggtctcagcccgtcccaggagatgctctgatcctgcttcacgtgtttcccgccctggctggctcccatcttggctcctggtgtgattatcccacagacctggcctggggttggcttcagtttcccctctgcagctggggcagatgcggtgcagctcccggcatcccccatgattttcctcgatttccccgcgctttgtgatttcgatgtaaacttcaaacactgctccctttcttgtcctgttctgggtgggcctctgtgccgcccctggtgcacctgctggggtggctgtctttgcaccttctggtcctgttctgccaccttgaccaccccagaggtttcaggggacacttggcagaaggtgactaaaatttcccatccccagctgggtgtggtggctcatgcttgtaatcccagtactttgggaggaggaggcgagaggattgcttgggcccaggagttggaggctgcagtgagctgtgattgcaccattgcattccagactggacaacaagcaagaccctgcctcaaaaaaaaaaaaaaaaaaatcccccacccctgagtgagagaccctggggtgtgacctccttaccccttgcttggggtggaggggtggtgagtgagcggggaggaaggtatcggactgcgggtccaacttcagaaaaacccgagttggcttctggggctccagttcttcatctagaaccagctgtctttggtgctgaggaccagagatgcccaagtggtttgcttgcccgggcatccatctcccagtcctccaaggaagtcatgcctggatggagtagcccttggccaccttttctggggtggcctgggtctggtagaaggggccaagtatttttttttttttgagatggagtctcgctctgtcgcccaggctggagtgcagtggtgggatcttggctcactgcaagctccaccttccgggttcaagcaattctcctgcctcagcctccggaatagctgggattacaggtgtgtgccaccacgcccagctaatttttgtagttttagtagagacggggtttcgccatgttggtcaggatggccttgatctcctgacctcgtgatctgctcacctcctcctcccaaagtgctgggattacaggtgtgagccaccgtgcctggcccaaaggggccaagtattaaccaggtgtcaggaggctgctggggaggatcaggagggatgagggagtctggggttggtggagtctagctgggaaaagaagcagacatggtgggctgggtgcggtggctcacgcctgtaatcctagcactttgggaggccgaggcgggcggatcacaaggtcaggagattgagaccatcctggctaacacggtgaaaccccgtctctcgtaaaaaatacaaaaaattagccgggcgtggtggcgggcacctgtagtcccagctactcgggaggctgaggcaggagaatggcgtgaacccgggaggtgttgcttgcagtgagccgagattg

SEQ ID NO: 7802 - DNA, 6000 bp, Homo sapiens
gctctactaatggaagagggcgctggactggggtggaattgtgaaagaactagcgacgtggagagaggcttgaagctcagcctaaataaatgttggggacagcccccactgacagctggacttggcccgccatcttcccttcttggtacctctcaatctttcgtaaaaataaaccaaaagctgacgttcaccacttcatgccatgcaaacaactgtttttggttttgttcttcaaatataaaataacatgaaacatgctttgtcaatgtacttacccccatcccatcccacactctctcttcccaaatacccgcatcaccctccactcttcagagatactagacggggtggctcagcagggctgggaacaaacactggccaatgtaaaggcttctgaatactccgcagcactggagagtctgtcttcagcacgatcccctgttaaccctaggaaagatgtgcacgtgacaggggcggggtgcgtcatggaagcctgacgttcctcatgccagatcagacgggaaggctgtaaaagggggaaggtgaggccagctggcagaaagcaggaggaacgcagccttgctccaggttcgtactcccatacctgaaacgcctcctccttctcccgcctacccaggctgaacacctggagaggggcagggtaggaatgccccctaggtgaccagagtggagaggaggacactgaaggggtctaaggatcacgagaccgcgtgtggcttgacttattcgccaagtggagattcctcgatcatcctcagagcctgtggtcccttccatctagtcaagaatgggcaggaggccaggcgagacaaaactcaaggggaaagccgtactcatttttatcaacatctccttgccaggaagcttgtggtattcactcaaatccaggacatgataaacatttacagaaaataataaaagcagatgatgtgaggacagtcaagagacgcaaagtacacttatgctccccctcctcatctagaaagtgggtctgcatggagtgtaacagcagaatctgacatagctgactccaccctgcttctaacctcacaagctaatggtctttgtcattcctgcacatcagccaagctaatcatgggaagaatttagtttacagtttaactttaaagcaaggatgacaataatcccttcccaacactcacccccaaggagataaggagggtgtacacactagcagctacatcatattaaagatttataggaacattgtgacctcagcaggacaaagaagttgcacagtgcccctcctcggacactcactgccacccagatgtccgctatcatcggtcacctcttgatcttaaacctcactctcttcccccttccctaatgtaaaaggagcccaaaattctattacttaagattgttctcaagacactaggtctgctatctcctcagtctgctggctctctgaaataatgtcatttttccttcccccaatatctcgtctcttgatttattggctgttgtgcagagattggtatgagctttggattcaactgcaggaggacggtgaagccagaagagatagagagagagagagaaagagaaatgagcagctgctgaatcatgagggcttccctaatggcagggaaagaagaaagttttgacagacagtggggcaagacacttgcacaaaacaggaagccagaggaatccttaaaacccacacatcatacaaaaataaagaaagaaaataaaacatgataaaagaaatgaaacccatacatcagatcacttactcctctgccttatacccttcaagagtttcctatgactttgggaataaaatccaaatcctcaccttggacaacagggccctgcaccatgtgttttccctccaccccctccacccccagctgtcacgtctctgacctggtttcccatcacttccctcatgctcattcccaccccacccccccagccacactggcctcctttcggtttctccatcacaccaagcttcgtatcgcctcagggcctttgcaaaaaatgtcccatctgccccgagtgttcctctcccagctcttccatggagagcacctacaggcctcggctcaaatgtcaccccttcaaggacatttccctgctgcccccagcacagattaccctattctatcatccaattctatttccttccgaaagcgtgccccacattacctcctatattactgtagagactgtactagtgtctcacccctccccacaactacaatgtcaatttcatgaaggcaagaaccatgtctgcctttaaaaaaaaaaaaaatcagggtctcactctgtcccacaggctagagtgcagtggcacaatctaggctcactgcagctttgatctcctgggctcaagtgatcctctgacctcagcttcctgagtagctggaactaaaggcatgcactaccacatctggctaatttttgtatttttttgtagagatcaggtgtcaccatgttacccaggctggtcttgaactcctgagctcaagcaatccacctgccttggtctcccaccaagtgctgggatcataggcatgagccaacacacccagccacaatgcctgtcttgtgatgctctatccccaaccatccatggagagatgaaaatgcatgatctggttgttaccttgcactcagctgcctaatccaagagacatgcaggtgactttgagaaggctggggctgtcctgggcccacagaattcagacagaagacactggggaaaggagaggaggtgggacagggaccagacacagagcactggaaaggagaggatgtgcaggagcaagagctgagccggattttccagacggcggcagactctggggggctgcctggacttggggcattttttctgggctggccctggacttagagaatatttttgtgatttagcggccccaatttttgtgaaatgtcctctgctgactgagagattaacctgctttgactgggccatgctaaaaaatgaacaggaatttgatatagtccagtgtggaggtggagagggagggaggtgaagaaagaacagaaggaaggggtaagacacactgaggagcagatggaagttacctgaggggatcctccaaagaagaaagggtgggctatgcaaacagtggatgtaaaaagacgcctggaagaagttaggacttggatttctaggagagattaattcgacttgtaggagcagggatttggggagaggcagagggctctgctgcctctgaaagagctcaccgagtgcgctccctctctctgactaaggacccctgtggataagaaagctctctgccctagagaagaagagcagtcaaggtgcttacaggctctttcccgaagactgaagacctttcccagggtggactgtggtgcccttccctgtgcaggcaccctgaccactgtgtgttcagagaagagggatgtggcacacacacctgagaagcactgggactcctgcgagaccaagtgggaggttgccactcctggggaccatctgatgggaagcagcggtgaagaaaagggaatggcgtctggatgtggatggaggcaggtgcttctactgctgcccggccagagaggagcatccccagagggtccgtccctagccaggctggaagcttgtctctgcgcatctggtcccctctcgaagcagttctcaaaagccgttgagacacactgctgggatgtggcaacacaccaagaggcaagaaatgtaagtccatggttcctggtaatactgaaaaaactaggctttggaagtttaagtaaacaaagaaatgagaggatataaggtaagctgttacaacgtcactgtcagttatgagtattctgttatgctttcttttgagccagtctcgctcttttgcccaggctagagtacagtggcatgatctcggctcactgcaacctttgcctcccgggttcaagcgattctcctgcctcagcctcctgagtcactgggattacacatgcccgccaccacacccagctaaatttttttgtattttagtacagacagggtttcaccatgttgcccagggtggtctcaaactcctgagctcaggcaatccgcccacctcagcctcgcaaagtgctaggattacaggtgtgggccatcatgcctggcccccattacactttctagagagaggaagaagtactaacctcacagtgcagactggagactgcacagcacatgcgcagatggtcttgacagaggatgcctccctctgtgctggggaactcatccttgcccattcagtttccgtggctcaagcaggctgatgtcagcccttggcgatgctgttggcgtgtgtgacccacaaatcattcagaggcagcagagccagcctggagatccgggctgtgacttcaggacaggagaccctctctctgcacaggttattatcctaaactgccaaaggtcactgcgtgaagcaattttactaagagccaccaaacccctctcttccctccaaccaagttcattcacccttctcagaagagcccaagagacctctgtgagagtaagacaggagttggcgatggtgcaatttgcagaacgccatgtttgttagcgccttgtcttcatgtggccggagggcactcctgaagcttcaaactcctgtaaaaacgcttcctgtccagggagggtggtatgggaagtctgaggtggctgggagaggaactggcgaagtaaggagttggagcaggagtcagagagacatgggatggggaaactcacaagcagactccaccccagtcagggaacctcactcaccgttccattaagggctggaaaaggaggcaccgacaggtgtctcacagaagcgaatggtagctgttcaggaggctggacccaggaaaaaggacataaaatcggggaggtgcctcaccctaatttttctcaactccagcagaaccttcttagagagcctcactcaattccacatttctcctcctctcagacaagcccggcagctccgtccacgtcctttgctgaatggagccagcgtggtcacttctgccctatcgaggaagctgaaggccctggcccatctctgacagctcagggcacaggaaagccttgcctctgcctagtctgccctctgcttccccaccagcgtcatctgtggcccacggctcttggctggacctgcactgaaggacacagctgctccgagctacacaacagggtggctgtccctccgccctccatgtgtggtggctgctgcagcaggatacagccagcctcctggctgctatcccacagtgctatggttgattgcgttcttacactggaagataaacagtgcttgtgtcaaagaaaatagaaacaaggccgagcatggtggctcatgcctgtaatcccagcactttgggaggcggaggtgggcagatcacttgaggtcaggagtttgagatcagcctgtccaacatggcgaaaccccatctctactaaaaatataaaaattagctgggtgtgttggcatgcgcctgtaaccccagctactcgggaggcagaagcagaagaattgcttgaaaccgggaggcagaggttgtagtgagccaagatcgcaccactgcactccagcctgggagtgctcatatgagcactcactctacagagaccctgtctcacaaaaataaataaataaataaataaataaaataaatagataaaaaaaagaggtagaagctggaaaagtggttatcttaggagtggaaggtttgctgactgagagggaataaaagggcctctagggtgctgaaaatggcctgcatctcaacctgggtggtcatacacaaatgtacagatatgttaacatgcatccagctgtatccctaagttgagctcacctttttgtatgtatgttacctgttaataacacaattgataaaagccccctctaaaatcccacatcttcctatggctaccatagatattttaggcttataattggt

SEQ ID NO: 7803 - DNA, 6000 bp, Homo sapiens
atgtgccactgcactccagcctgggagacagagcaagaccttgtctcaaaaaaaaaaaaaaaggggcctagcacggtggctcactcctgtaatcccagcactttgggaggctgaggcgggtggagcacttgaggtcaggagtttgagaccaggctggccaacatgatgaaactccatctctattaacaatacaaaaattagccaggtggtgggcgcctgtaatcccagctactcaggaggctgaggctggagaatagcttgaacctgggaggcggaggttgcagtgagcctagatcacgccattgcacttcagcctgggcgatagggtgagactccgtctcagaaaaaaaaaaaagataaaaataagtgaaatggtgaagagattggtgatggtcagaggttagggatggggtttggggatgggaggaaggtgggtgtggctcttagaaggcaccaggagggatcctcgcagggatggaaacatcctctgcctttttttgtttgtttgtttctttctttcttttgagaaggagttttgctcttgttgcctaggctgcagtacaatgatgcgatctcggctcactgcaatctccacctcccaggtttaggtgattctcctgcctcagcctcctgagtagctgggattacaggcatgcgccaccacgcctggctaattttgtatttttagtagagacggggtttctccatgttggtcaggctggtctcgatctcctgaccttgtgatccgcccgcctcggcctcccaaagtgctgggattacaggcgtgagccaccgcgcctggccaacatcctctatcttaagcttaacaatgttaatatcccgttcatgacatttcactgcagttttgcaagagtttgccattgggcgaagctgggcagagggtactggccctccttctatgctatgtcttacaactgcgtatgaatccacagtgatctcaatatttacaattttaatttaatttttaatgtttctttttttgaccagggatactgctaaatttgaaaaaggggaattgggccaggtgaggtggcttcaagcctgtaatcccaatgggtgcctgcagtcccagctactcaggaggccgagacaggaggatcgctggagcccaggagttggaggctgcagtgagcaatgatcgagccactgccctcaaccctggatgagagagtgagaccctgtctcagataaaaggaaagaaagaaagaaagaaaataaacaaggcagaggcgggaggatcacttgagcccaggagttcgagaccagcctgggcaacatagcaagatcccatctctaaaaaaaaaaaatgtaaaaattagctaggcatggtggcatgcatctgtggtcccagcttctcaggaggctgaggtgggaggattacttgagcctgggagatcaaggctgcagtgagctgtgatagaatcactgcactccagcccgggcgacagagcaagaccctgtgtccaaacaacatcatcatcaacaacaacaaaaacccaaaaaacaaaagaaaggggccgggcgcaatggctcatgcctgtaatcccagcactttgggaggccgaggttggtggatcacctgaggtcagtagtttgagaccaggctggccaacatggtgaaactccgtctctattaaaaatacaaaagttagctggacatgatggtgggcgcctgtaagcccagctactcgggaggctaaggcaggagaatagcttgaacctgggagatggagtttacagtgagccgagatcacatcactgtactttagccttgacgacaagagtgagactccatctcaaaacaaacaaacaaaaaacaaataaacaacaaacaaacaaaaaaccaaagggaagttgatgggaaaatatatgtgaaaatatgtctattgggacatgccaccttttccatttgtcttaggctccaacatggtttcacatgacactttttcaaaattgttacaaatacttgtatctatgtatggggtacatgtggtatttgttatatgcataaaatatataatgatcatgtttgggtatttggggtgttcataacttagactatttctcatttctatatgttgggaacaattcaaggactctcttctagcttttttttttttttgagacagaacttcgctcttgttgcccaggctggagtgcaatggcacgacctcggctcaccacaacctctgcctcctgggttcaagccattctcctgcctcagcctcccgagtagctgggattacaggcatgtgccaccacacccggctaattttgtattttcagtagagacggggtttctccatgttggtcaggctggtctcaaactcctgacctcaggtgatccacccgccttggcctcccaaagtgctgggattacaggcgtgagccactgtgtccgggtgggcgcctgtaatcccagcactttgggaggccgagatgggcagatcacgaggtccggagatcgagcccattctggctaacacggtgaaaccccgtctgtactaaaaaataagcttggcgtggtgggacgttcctgtagtcccagctactcaggaggctgaggcaggagaatcgcttgaacccgggaggcggaggttgtggtgagctgacgtcacgtcattgcatgccagcctgggcaacaagagcgaaattccatctcacacacacaaaaaagaaaataataataataataataattaaatagagatgaagcctcgctatgttgcccaagctggtctcgaactcctgccctcaagggattctcctaccttggcttcccaaagtgtttggattagaggcgtaagccaccattattctaactattttgaaatgtacaatacattgttgctaactacagtcaccctattctgctatcaaacattagaatttattctaatactatatttgatagcagaatacatcctattctgctatcaaacattagaatgtattccttctgtctaactgaatgtttgtactcataactcacctcttttcatttcccccccactcaacctacacaactttccagcctctggtattgatcattctactctctacctccatgagatcaactctctggttcccacgtatcagtgacaacatgccctatttgtcttcctgtgtctggcttatttcactttttcacttaatataatgacctccagtcccatccattttgctgcaaatgacagggttttattctttgttatggccgaatcatattgcattgtgtatttaacactttttttttttttttttgagacagagtctcactctatcgcccaggctggagtgcagtggtgtgatcaaagctcactgcagcctcaacctcctaagctcaagcgatcctcctgctttcgcctccgaagtagctgggactactggtgtgcgccgccaggcctggctaatattttaatttttttgtagagttgcggtctcagtatgttgccaggctggtcttgaactcctgggctcaagcgatcctcccgcttcagcctcccaaagtgctgggaatacagtcgtgagccaccgtgcccttcccaagctctatctagacagtcattcctcttgggggatgccagctggggagagcctggaggagggcaagcagggagatggaggtttctctgtgccctgcagggcaggccactggagtccagaggatgagcagggaggttcttgcagggatgacaggaaccctggggaagtttatcttggattttggccagcagctccaatcccagggctcaggtggggcggcaaggacacacagtgtcagcgcctgatgaaatccctgaggtcacagaatatggtggctccatcttccttccagggctgtgtactgcttttggagacatacaaagtgttttccaatattcccaagggagcttgtggaaaatgaagattccaggcctgtaatccaagcattttgggaggcagaggcaggagaatcacttgagcccaggagttcaagaccagtttgggcaacatagcaagaccccatctctaacaaaaaaaaattagccagggccaggcacggtggctcacgcctgtaatcccagcactatgggaggccaagaaaggtggatcacctgaggtcaggagttggagaccagcctggccaaaacggtgaaaccctgtctctactaataatacaaaaattagctggatgtggtggtgcgtgcctgtggccccagctacccggaaggctgaggtggaaggactgcttgagcctgggacttcaaagctgcagtgagctatgactgcaccactgcagtccagccacggcaattgagtgataccctgtctcaaaaacaaaacgaaaactaaacaaaacacagatttcagggtccagttccctataggattctggttcattccatctgtgttggggctcaggaatttgtggatccagggccatgagttaggaaactgagaaatcttggaaatgatgagacaggcttgggcaaatgaccttaggtttcacctttctgagacccagtttccacctctgtaaaatgtggatagtaatctcgccttctggccttatgcggagggtcccacgagagggagcctataaagtcttcaagaaagcggtgcagcagttatgatcactgacattcttccccagcaaatgagcccccggagctggcatgcaggattcgaaccagctcacctagcgcgggattcgaactcgcgaaactactcgcgccttcctgacgtcacgaagtcaccctggaaagccgctcttcgccccgcccccggccccgcccgcgcccggagccccgccccactctcctgggcgcagcctaccccgctgcctgccccgcgccccgcccccgctccggcctcccgcagccggggctcgcgattggccttgccgggacgccagggcccgccccccgagtgtcggccccgcccccgcagaggggagcgagcgctcgcgggccggggcggagggttcggctgcgcggcggggctgaggcggccgcggggcccgagcgcaggtaagggcgcccgcgaaccgggccaggggaagtgagggcgcggccggcgtcccggagaggggactgggacagctcggattcggctgcggaccgagttgggggtcggagtcggctgaggaggggggctgggtctggggacccgggctgcaactggaggctggggttggaattggggacggggctgcgcttagggggtcgaagttagctggggaggggctggggttggggattgggactgcacttggggctcagggctagctggggagggggcgggagttgcaggtcgaggttagctggggacggggcagggggtgcagatcgaggttagctggggaaggattgggtctgggcattgggactccacttagaaatcagggccagctggggaggaggctggagttgcaggtccaggttagctggggagggggctggaggtgggattggaggtctgagttagctgaggagggggctgggggtgagactggaggtctgagttatctggggaggggactggagttgcaggtcgaggttagctggggagggagcttggagcgggattggaggtctgagttggctggggaggggtctggaattgcaggtccaggttagctaggaaggggctggtggtggaattggaggtcttgagtttgctggggagggggctagagtcgcaggtcgaggttagctgccgagggggcttggagtgggattggaggtccaagctagctggggagggggctggaattgtaggtcgaggttagctggggagggggctggaagtggaattggaaatctgagttagctggggaggacgctggggatggtgttgggggttgaggttaattggagcggggaacaggggttgagtcaagggtgcagcttctttgaagagggagctgggagtggggttgaggtttgcagggagctggagagggggctggggatggagtttgaagtggggttcatt

SEQ ID NO: 7804 - DNA, 6000 bp, Homo sapiens
ggacactctccaccgcccctcagccaggctgggtggggcccacagggcctgccccaagtggcggccacacagggtgttgtggagatgggccagaggggcctgggcttggcggtgccaggctcgtgagaagcaggaaactcaaggccagccctgccacatcacggggcacccactgggcgtgaggcagagcccgcggctgtggggcagctccagccctgcccacaggccaccctcgcccgcacaggcagcactgaggccgggaccctgctggcgcccgatccgccactgcagaagagaccctctgtggacacccacactctgcagggactggcccccaactcaccccgtgctggctggtggggtccatttccccgcagcgggtatggaggatgcgtcgaggtccctgtctctgtcaaggtcgtgggaaccaaaagtcactgagccgtcctccccccacctctgagcacagggcctggagggcaggggctccccgaaggctgggggttggagaagggtgaggggcttcccccagggatccccccacctggcctgctcacggggccttggagcatgagaccagtgaccccgagttttgcccatatcaggacagtggctccttctcactcccctttctcaggccaggagggccgagggccacacgggtgccacagcccaggtcggagtggcccagccggcaggcttgttcttcagcatccgacgggaacatctccaacagaagcaaaacggaaagtgcctcccggacccccagagggccacccaacctcaccagtcaccagccccagaccacccacagcccctcccagacaccccgcctcatctggaaatagttccgtttgtttctctaaaaagacttgtaggtgggaaaaaaaatcttttgttctcatggaattggcctattggcaagatcgcatgtttttttaataaacgttgtattttagaataatcttaggtttgcagaaatgcagagagtgtaacgtgtccgacgccccacacccgctgccctagttgctgctggcatttgtgacacagcgcatttgtcccaagggaagagcctgggaaacaacacggcacccaactggggcccggtggtcccttgggagctgtgttagtgcccggatctgtctttgccccccacccctctgccttgcctcccacagtgggggtgacagtccatttcccagacgacaggagggagggtacaagggtggacacagctgctggcctgggcccaggctctcatgggggcagcgcttggccatgcctgggggcattcgtggtggtcccaccttggggctgctcctggcgtggagtgagtggaggccagggatgctgcccaatgtgcttcagtgcccaggatgagcctccccaaatgtcctcactgcagtaggcagaggtgcaaggcagatcctgcactcccctggggcactggtcacctcccagcccccacctctaacaggatcccggaagtctgtggcacagggcttgggaactggccagggaagtgcatctgatcagcgtccgctctccacaccgcagaccctggcccaccctgaccagcctactccagaatcccaaatcgcattgcagcacacacaacactgccatccccagcccagccttcagcagacatcacaagttgatggcagatggccagagccatcttagaatcctctgggcagcctcttgcctgggttcctggccagctccaccgccgatcaggacaggctgctggggcagggctgagtccgggctggactcggggggcactttttatttttttgagacaggctggagtgcagtgggcgtgatcacagctttctacatcctcaacaccagaaggcacttttgagcccagagtggtgtttgggacaggccgggttctgtagtcacagcccaggttgtgtgtgcgtggctggcgcagcccagcctgtactgggcctaacccagacctcccaccagctctatgtgacagtatttacttccatttggctgctcgggaaactgaggctcacaaaagcccacgttgttgagcccagaaagtggcagggccagtattagaagctgggtttctctaccctggagaatcccaatcccagaccaccaccccgtccctgcctcagtttccccacctgcccctgcagagattcccccagccccagcatcctgcttcctcctcctcacgttccttttgcaccccaagggagatggctgtcctccaactggcaagacacatggtttgccaggggccccagtctggagggagcagagctggggccctgggacccctgaagggtcacgggcactgagcctgggaagacgggctgctggccgagaagggtgacggctgccttgcagaggacagggcagcaggtgtgcccagggcagggggcacacagggctcaggccaagctaaggagccagatcctaggggagctgggcaccagggagctacggagggcgcgtgagctggggagggcctccgagctgggtgtcgagaccctgcaggcagactggaggtgggggccaggggtaggctctgcacaccacccccccatctaccccatgactctccaccatggcccgaggtccacctggtgtcctggaagctgcccccgcccccacccagcttcctgactttggctgtgtccagagctaagaatagacgctccctgcccggcccccgccggaaaccgcagccacgggggtacatcctgagcctggcctctgttcccaccatctgccccccagcccctcacaactcctcccaccagagcctcctgtgctcccattgaacccgaagtgctggcggggggtggggggcggggggcgggccaagaccgggagaccagcaaccagccccagatgacagggaagcccagtgctcatgttccaatcccacacatgggcgtggcattgttccccctttgtgcctcagtttccccatctctaaaatttaagagtatctttaccccctgccttgcagagatgtggtgaggcttaagctaaatgcaagtgtccttctctgaactctgcccaggctgtttcccagaagagtcattgtccttgttatctcagggccgaggacagaggaagtggggacaggacagccttcctccgtctctcactgccccctcatctggagccccagccccacatcctcctcccccaacatctgccctccttgcagttagtgtagcaagggcctcatgctctctcttgcctccaaagctttatacatgcaattcctgtcactgccacgtagcccagacctggggagctcctattcatcctacaaaaccccacttcccatgccctctcctcacaagatgtcttcctagctcacctctgggcttccctaggccctgtctcttcctttggcccagccctgaccccagggggctggaacagcctgtgtccagttcattctccagcctagggcatcctgaagggcaggcctggtttcaggtctcacttggagctcataattgtcccactgtataagctgaacacagagaggggttggggagagtaagacttggagattaggtcggcttcacgggaaagcagccttggagccagggttttgccacatccataggagttggatagcctccttgccaggaaagagagaagttgtgttaaatggctggtgacttaatgggatagagctttgggagggaggttgggtgtggccgaaggccaggaggaggaaggatagtgggcggggtagccggggaaggggcttccggactgggctgacgagagggccgggccaggctgggaatacccctcactcacagcctggactagcagccctcccgggcccaggggacggggtggggtgcagtcagggcaaggtcagcttgtccggtcccactccaggtccctaactcaaggttctgtccggctcgggtgtacaaacaaggccaaggaagcccaaggtcccccctctgcaaagagacggtcccagtccctgcgtccggcaccttctcagccattcctgttgggctccatccctccttccccagcccgagctggggggtggccaggaaagagtgcccatcccccactgcagcctcccggctccagactgttcctcctctggctccaaagccacctccgagcctcctcaagagaccctcccatgcgatgccatcaccccagccctcccggctcacctgctctgggaccacctttctcagtctggctgtgtcgtctggtgcaccccccatccctctgtcctcccaccccacccctggaaggggcctcaaatatgtcctgtatgtattaagcagggcatactactactgtgtgccgcgttccagcgcacccagtgaatttggagccctggagtctgggcgacccccgggagccgatccgcctggacctgccccgccccctccaggccttgggtgctgcccagatggtgaataatgcgggcctggcggcgggagcgccgggaagaggcctggcagggcgctgggcggctggaggggctgaggctcccgaggaagcgcccctgccacccctacgcgggccattgcatccctgccaccggtggcctgggggtcccaagggcgccgccttccccagaaggctgtagggtgtcccggcgtgcggggggcacccactgactccaagtcagccaggcccgggcccgaggggcgtggccagcgcagggtgggcggggctgatgagagacagcgggagacagagactggacggagagagcgagccgcgggctgccagcggcccccacccgtcccagctcggcttagcccccgcggacccctccaggccgcgaccccagggcgtcctgtgccgccacgccctccatctgtgtgggtcctctgctgggcccgcccctggtcacagccagactgactcagtttccctgggaggtcccgctcgagcccgtccttcccctccctctgcccgcccccagccctcgccccaccctcggcgcccgcacatctgcctgctcagctccagacggcgcccggacccccgggcgcgggatccagccaggtgggagccccgcagatgaggtctctgaaggtgaggtcgccccgctggcttagggcgggatgcactgctctggtgtgagcccgggctgctgggcgcatccggcgctggccctgccctgctgtgggtgtgtcgcaaagcccgcggtgacagcggccaggtgccaggtgtcccctgtgtggcccggcgggtggcatggtgccctgaggcctgccctgggcgcccaggcggctgggtctgggtgcggcccaggctgattctgtccggggggctctctggtctctgtggggccacatggctgtgaatgggggtcccagactcagggggctgcagccggggagggggcccaggccctgggtgtggcagggatcgagtgtggttgtgcggctgtgtgtgtgatcttgtctctgggagtgaaccatgcatggccctggttgtgtgtctgtgtctgtgcgtgtgtggtggttttgtgtgtgtgaccgtgtgtttgtttctgccgagagtctgtgactgttaaatactgtgtgttcttctgtgtgtctttctgtgtctgtctgtatctatgtacctgttgtgtttctgcctgtgtgtctgtgtttttctgtctgtgtctgtcacatttctgcctgtgtgcctatgtgtgtatctgtgtgtgtctatgtctgtcgtgtttctgcctgtatgtgtctgtgtgtggctgtgtgtctgttgtgtttctgcttgtgtgtgtctatctgcgtgtgtctgtgtgtctgttgtgtttctgcttgtgtgtgtctgtgtctgtcatgtttccatctgtgtgtgtctatctgtatgtgtctatgtatttgccatgtttctgtatgtgtgtctgtgcatgcctgtgcgtctgtctactgtgtttctgtctgtcacatttctgcctgtgtgtctgtcatgtttctgtctgggtgtgtctgtggtgtttctgtg

SEQ ID NO: 7805 - DNA, 6000 bp, Homo sapiens
tctagaaataactgttttttaaaaatcctgaatagccaagataaccctatgcaaaaggaacaaagctggaggcatcacactatctgactccaaactacactacagggctacagtaatcaaaacagcatggttcttgtacaagaacagacaaatagaccaatggaacggaatagagaacccagaaataagaccgcacaccttcaactatctgatctttgacaaacctgacaaaaacaagcaatgggaaaaggattccctactcaatcaatggtgctgggataactggctagccatatgcagaagattgaaactgtaccccttccttaaattatatacaaaaattaacttaagacagattaaagacttaaatgtaaaacccaaaactataaataccccagaagacaacctaggtaataccatttagaacataggcacgagcaaagatttcatgatgaagacaccaaaagcaactgcaacaaaagcaaaaattggcaaatgggatctaattaaactagagagcttctaaacagcgaaagaaactatcatcacagtgaacaaacaacctacagaatgggagaaaatttttgcaatctatccatctgatgaaggtctaatatccagcatctttaaggaacttaaaccaatttacaagaaaaaaaaaccatttaaaaagtgagcaaagaacatgaacagacatttttcaaaagaagacatataggcggccaacaatcatataaaaaaaagctcaatatcactgatcattagggaaatgcaaatcaaaaccacagtgagatatcatctcacatcaatcagaatggctattactaaaaagccaaaaaataacagatgctggcaaggctgtggagaaaaaggaacacttatacactgtcagtgggagtgtaaattagttcaaccattgtggaaggcagtgtgggaattcctcagagacctaaagacagaataccattagacccagcaatcccattactgggtatgtacccaaaggaatatgaatcattgtactataaagacacaagcacacattatgttcattgcagcactattcacaatagcaaagacatggaatcaatctaaatgcccatcactgatagaatggataaagaaaatgtggtacatacacaccatagaatactatgcagccataaaaaagaatgagatcatgttctttgcaggaaaatggatggagctggatgccattatccttagcaaactagtgtaggaacagaaaaccaaagaccacgtgttctcacttataagtgggagctaaatgatgagaacatatggacacatagaggggaaaaacatacactgtggcctattgaagggtgaagggctggaggaggcagggatcaggaaaaataactaatgggtaccaggctcaatacctgggtaatgaaataattggtacaacaaactcccatgacacaagtttgcctatgtacaaacttgcatatgtgcccctgaattaaaataaaaattaaaaaaataaaatagactgggcatggtggctcatgcctataatcccaacactttgggaggcagaggtgggtggatcccctgaggtcaggagttccagaccagcctaacaaacatggtgaaatcccatctctactaaaaatacaaaaattagctgggagtggtggcaggcgcctgtaatcccagctacttgggaggctgaggcaggagaatcgcttgaacccaggaggcagaggttgcagtgagccgagattgcgccactgcactccaggctgggtgaaagagcaagactccatctcaaaaaaaaaaaaaaagaaagaaaaaaagaaaagtggatgatgtacacttggcctctagggtcaggacagcagccatcctgaatttctcccttgttctgcaaggatttaagcaccctgggattacagtgccaacacaaattccttggctaatgaggagctttggcaattgagccgctagggaggcagagactacaatgtaccagtgaccaccgcattcatgagccactgtgcccagccagaagcttttatttcttataagagaaagaaactctgactataatttacatgaataagaaacagagttattttttatgacaagaacttcaggggtaagaaatgcatgggagcagtagtgtggggattcatgcaagcctcgggaagatggctccatgtctgtgctgattttcctcttgcaaacagatgtctgcagaaatgtaggcatcatattcagacatggtgctcagagaaaaccgacggtctttctgtaggtctgctgtgaagagagtctatttgtaatagaaattttctttttaaattttatttttatttacttgtttattagagacagggtctcactctgtcactcaggctggagtgcagtgccacgatcatggctcactgcagccttgaactcctgggcctcagcgaccctgagtagctggaactacaaatgagtgagtgccaccacacctggagatatacatatatatataatcctctatatgtataattatatgtatattacacaaatatattctaattgtataattttaggattagctgtagtctcagtgctcccgtgcaaaactgtttactgtgtcttcactaggaagattactctgtagagaaatactttcatttgagaaggagatgtcgagtgtaagacaagacaggagaaaatggaagttggcaagattttggggcataatttttttctataagcacacacacacacacacacacacacacacgcaggatcatcagtcagaattatctctctaagtgtgaggagcaaacaatggaggtgtcaaaagagaatcaaaggagtgggtggagagtcttctgttgcagctgtctttggagcttgaggagctggctttattttcaccaaaatatctgggaagccaggcatggtggctcgtggctgtagtcccagctacttgggaggctgaagcgtgaggattgcttgaggccaggagtttgagaccagcctgggcaacatggcaagatcctgtctctaaaaaacccccaaaacaaaacaaaaagctcttacatatctggaacgcagctcctattctagcactcatagagtctcctaggactgagattcctctgttggtgtccacagaacagacacagagaggaaccacccgagacctttcctcatagagaaggttcttggccttgcccgagaactactggtgttaaatctctgagaaatgtgtgaggtatgagaatttttaataagcacttggagagatgctgataacctctgaagcctgacactcctaactttaatattaggagaacatgagaaaacatatttagggttagaatatgaagggtctttctttaatcatacttgttacattatcatatacaaagtaatgcataaaatctatctatctgtaggtagtgtagagcacagtggctcacgcctgtaatcccagcactttgggaggcggaggtgggcagatcacaaggtcaggatatggagaccatcctggctaacgcagtgatacccgtctctactaaaaatacaaaaaattagccggccgtggtggcgggcgtctgtagtcccagctactcaggaggctgaggcaggagaatggcgtgaacctgggaggcggagcttgctgtgagccgagatcgtgccactgcactccaacctgggcgacagaacgagacactgtctcaggaaaaaaaaaaaaatctatctgtaattctgagagaatagtaacatgataaaaccgcatatacctatctggcattaaaaataagttaatgtcatcaccatagaacctacctgtaggattttctactcaaatcaccttgttttcttccagcaacaaatacactatcctgaattctgtagttaccattttctttgaaaacaggatgactgttataaaattctctgtaatttacttgcagtcttgtgggggagaggaggtgagcagcttgctaaacttcaccttatcttcactttcctgtggtgttttttttttttttaatggagttttgctccgttgcccaggctggagtataatggcatgatctcagctcactgcaacctccgccccctgggttcaagcgattctcctttcctggttcttgacacagctttgtattatttctgttggctggcgtgaagtctctgggggtccagacagagtcttccagccgttttcctggtatgtactttgttttattttatttattttttgttttttcattaccaaatatttttaataatcagaacagcagagtggtggcacatgcctgtaatcccagctactcaggaggctgaggaaggagaatcgcttgaacctgggaggcggaggttgcagtgaaccaagtttgtgccactgcactccagcctgggcaacaagagcgaaactccatctcaaaaaaaaaaagatgaggctgggcgtggtggctcacgcctgtaaacccagcattttgggaagccaagttgggcagatcacttgaggccaggcatttgagagcagcctggccaacatggcaaaaccccgtctctactaaaaatacaaaaattagccaggtgttgtggcaagcatctttaatcccagctacttgggaggctcaggcaggagaattgcttgaaaccaggaggcagaggttgcagtgagccaggatcaagccactgcactccagcctggccacagagcaagactctgtctcaaaaataaataaataaatttaaaaaataaataaataaaaataaaaaatgatgaccccttaaccatttccagaattaacaattattgatgctgtgctgtattagcttcaagttttgtaaaagcagtaaagtaatatcaatacaaaaggcaacacttatttattttcttcccttagaatctaccccttttcaagatggtgtttgcctctgttgacgttgctcccgcagtctagaaaacacatttgattgtctaattatcccattttttgatcatcaaaaacatgggacccagaaaccaaacagctgtttcagaatttcttctcatgaaagtgacagaggacccagaactgaagttaatccctttcagcctgttcctgtccatgtacctggtcaccatcctggggaacctgctcattctcctggctgtcatctctgactcccacctccacacccccatgtacttccttctctttaatctctcctttactgacatctgtttaaccacaaccacagtcccaaagatcctagtgaacatccaagctcagaatcagagtatcacttacacaggctgcctcacccagatctgtcttgtcttggtttttgctggcttggaaagttgctttcttgcagtcatggcctacgaccgctatgtggccatttgccacccactgaggtacacagtcctcatgaatgtccatttctggggcttgctgattcttctctccatgttcatgagcactatggatgccctggttcagagtctgatggtattgcagctgtccttctgcaaaaacgttgaaatccctttgttcttctgtgaagtcgttcaggtcatcaagctcgcctgttctgacaccctcatcaacaacatcctcatatattttgcaagtagtgtatttggtgcaattcctctctctggaataattttctcttattctcaaatagtcacctctgttctgagaatgccatcagcaagaggaaagtataaagcgttttccacctgtggctgtcacctctctgttttttccttgttctatgggacagcttttggggtgtacattagttctgctgttgctgagtcttcccgaattactgctgtggcttcagtgatgtacactgtggtccctcaaatgatgaaccccttcatctacagcctgagaaataaggagatgaagaaagctttgaggaaacttattggtaggctgtttcctttttagcgatctttgtcctctgctttgaattggagcttctaaaataaatcatcataacaggattccttgg

SEQ ID NO: 7806 - DNA, 6000 bp, Homo sapiens
ggcatatgagggcggtcacttcctccccagccttcaggtccccacacaagactgagatttccgctctgatagctctcagacgaggagaaaacctaattttcttcgtgcttcctcctctgcggattaaacacctggtttctagagtgtccaggcaacacttctcacttggtagaagaggcagtgaggttttgccaaggtccaagtgcgccccaagatctggcccagaacccagcagaccctgaaatcgagctcaggaaaaggggcaaagtgtagaattgactagtcactttctgactttctttgtatccccccttcaaagccccatcaccctgtgttagaattgtctggtttcggccgggcacggtggctcacgcctataatcccagcactttgggaggctgaggcaggtggatcgcctgaagtcaggagttcaagaccagcctggccaacatggtgaaaccccatctctactgaaaatacaaaaattagccgggtgtggtggtgtgcgcctgtaatcccagatacttgggaggctgaggcaggagaattgcttgaacctgggaggtggaggttgcagcgagccgagatcttgccagtgcactccagccttggcgacagagcgagactctgtctcaaaataaataaataaataaataaataaataaaaataattgtctggtttcttctctgtctcctccatcagactgtcagctttggatggcagcaaccaattaggcatcaccaggcttagcacagagcattacatgttgtgttacatacacacatatattgcatgcctatatgtagcattaacgtgttgattttttttttttttttgagatgggctcttactatattgcctgggctggtctcagattcctggcctcaagcaatcctcccgcctctgcctcccaaagtgctaggattacagttgtgagttatcgtgcttggcctgttgattttttttttttccagacagtgtcttgctctgtcaactaggctggagtgcagcagtgtgatttcagctaacttcaacctccacctctcaggctcaagtgatcctcccaccccagcctcatgagtagctggaactacaggcacacacaaccatgcttggctaatgtttaattttttgttttttcttttgtagagacgaagtctcactatattgcgcaggctgatctcaagctcctgggcacaactggtcttcccaccttggcctctcaaagtgctgggattacagacatgagccactatccatgaccaattttttaaaatttttaatatattttttgagatggagtttcactctgtcgcctaggctggagtgcagtggcacgatcttggctcactgcaacctccacctcccgggttcaagcagttctcctgccccagcctccagagtggctgtgactacaggcacctgctaccacgcctggctagttttttgtgtttttttttgtttgtttttttgtttttttgagatgcagtctcactctgttgcccaggctggaatgcagtggcgggatctcggctcagtgcaacctccgcctcctgggttcaagtgattctactgcctcagcctcccaagtagttgggactacaggtgtgcaccactgtgcccagctaatttttgtatttttaatagacaccgggtttcaccatgttggccagactggtcttgaactcctgacctcgtgatctgcctgcctcagcctcccaataattttggtatttttaatagagatggggtttcaccatattggtcaggctagtctcgaactgctgaattcaggtgatccccttgcctcgacctctttgtacatttttttgaattggtaatagaagctaaagatttcaaacagcaggctgggcgcagtggcttatgcctgtaatcccagcactttgggaggctgaggcaggcggatcacctgaggtcaggaattcgagaccagcctggccaatatggagatacctcgtctcaaaaaaaaaaaaaaaaaaaaaaaaaagatttcaaacagccctccagggtataccatgaaaagctgtttcttcttacctcgtttccctgccccctggttcctctccctaagagtaactgttgtgactagggtctggtgccttctcccagagacagactgtgtgtcacaggcaaatgtgtgtgtatttatatagttcttataaatacacccagaaatgcaatgcatactggtctacactgtactttttcaacttaatatgttgaagaccatttcccatcagtacacacaagactactccatttatttatttagttttatttatttatttatttaaaatggagtattgctgtgtcacccaggctggagtgcaatggcatgatctcggctcactggaacctctacctccagggttcaagcaattctcctgccttagcctcccgagtagctgggactccaggcacacactaccattcccggctaatttttgtacttttagtacagatggggttcgccatgttggccagcctggtcttgaactcctgacctcaggtgatccacctgcctttgcctcccaaagtgctggggttacaggtgtgagccattgcacccagcctctttatttttattttattttttgagacggagtcttgctctgttgcccaggctgaagtccaatagcaccatgttggctcactgcaacgcccgcctccccgggttcaagcgattctcctaactcagcctcccgagtagctgggattacaggcgcccgccaccacgcccggctaattttttgtatttttagtaaagaaagggttttgccatattggccagactggtctcgaactcctgacctcaagtgatccacccaccttggagtcctagagtgctgggattacaggcgtgagccaccatgcccagccaatttttatattttttgtagagatggagttacaccatgttgcccaggctaatctagaactcctagggtcaagcaatccacccaccttggcttcccaaactgttgggattacagtcgtgagccaccgtgcctggccagattatgtttataacatataatgtctacattttcacaaatggtaccctcataaaaagccatatttcccacctgaacataagatccactgggttggccaggcacggttgttcatgcctgtaatcccagcactttgggaggccaaggcgggcagatcatgaggtcaggagatcgaaaccatcctggccaacatggtgaaacctccatctctactaaaactacaaaaattagctgggcatggtggcgcatgcctgtaatcccagctactcaggaggctgaggcagaagaatcgcttgaacccgggaggcagaggttgcagtgagccgagatagtgccactacattccagcctggcgacagagctagactctgtctcaaaaaaaaaaaaaaatccatctggtcaaggagtttttcctttttgttgctgttgttgttgttcactgctgtgcccagtaggtgcataaaaaatatttgttgccaggtgctgtggtttacatttgtaatcccagcacttggggaggccgaggcaggcggatcacttgaggtcacgagttcgagaccagcctggccaacatggtgaaaccctgtctttactaaaaatacaaaaaaatcagccaggcgtggtggcacgcgcctgtatttccagctacttgtgaagctgaggcacaggaatagcttgaacctgggaggcagaggttgcagtgagctgagatggcaccactgcaccccagcctgggagataaaggaagactctgtctcaaacaaaaaaattttgttgctggaatgaggggctttcctatcctgttgtcgaactgctggttacacacacacacacacacacacacacacacacacacacacacatcattcgatgaaggtgtagtgtccatcatttccgcaggcaggcacacagaaatgcccaggaattagtgaaaattggaaatctggatagaagactgggcccgacgctggaaggcaggcacaaactgggccccgccagaggggacagtgatctacagaggcaggaaagagtgtggagtgtccccagtcccccaagggaaacagggcagcacctgaattctggaggtcctatcaagggagagactggtcaggcacagtggctcacgcctgtcattccagcactttgggaggctgaggcagtaggattgcttgaatgcagcagttcaagaccagcctgggcaacacagcgagaccccatctctacaaaaaactgcaaaaaattagccaggcatgatggcgcacctgtagtcccagctactctggaggctgaggcaggaggctgaggctcccgtgagctatgattgagccaccacactctggcctggatgacagagcaagaccatgtctcaaaaaaagaaaaaaaaaaagagatcaattttgtctttgggacaggacatcgcacttagtaggaatttatttgttgggtggacacacagtaggcacttaatgcctatttgctgcgttgacacctagtaggtacttccaaggctctttgttgagtcaataaatgtgacctcgtgttttcttccaagtccagggtcccaggggtaagcccagaggtaacctggggttgaagacagttgtttcaggttgaggccacctggccaggagtactgtgacgtcaccaggctgcgtgacgtttcgcgccggccggttctcacgggtgggggctgggaggggcagagtgagagatcgggtggggggggcggacaaagggccctccgtgcagctcctgtcggcccccgcgtgcgccccggccagccggccggtcacatctggaattcattgcagccgccgccggaaaggggaggagaggagggcggggcgagcggggggcagaggcggcggctctccgcccccccctctgtccctcgtcccagccccgggacttagccgagcccggctggcaaccccagccccagccgcggccgccctggggacgcagacgccaaggcccctccggccagggccgggagccgggccggcctagccaggtgagcgcgcgtggcgacaaggaggcagaaaaggcgggcctggtcccctgaggtctcgggatccgagctgaggggccccaatcggggggctggggcgcgcacgcgccgcctgggttcctgctgcacggagcgggtggtcacagtgcgccctctccaagaatccgggcggcccccactgcctcggccgcgaacccgcagactgtgctccccgcctttctcagcggcaggaagttggcgccggggagaaggctgaatccgagcgctttcgactggagtctttgggaggcaggacgccgtgctcggggaccggggtcttggggagtgtgtttgggggggggcaacacccctcctggctgactccggctgagcgagggcaaaaggatgtgcgcgccgtggagcctccaagccaaggggcggcacccacggggagggcggtcggacgtcgggctttctgcctcggtttccccaagttgtttgcctcctccggtcccccggcggggggcgtggctttgttttgtaaggaaagagaaagtgactgcgtggctcagacgcctcctctttcaactccggctcagggatgggtcgtgggtgaaggcgcgcgtggcgcggacctcgcgtggccccgagccgggcggagcgtcggaactcgcccccttctcaggcacgggttgactcacccggggatttccaccccctcctctgtctctgtccttgtcagatgctccgggccccacgcgctgagcccacagtccccctcgtggggcgacacggccaggcgcggaactcgcggtgcagctgctgctgcgatctggtcccccacccccagtcttcccagaatctcgaggcgggacccctggcgggacggagaggaatccttccagtgccgcttggagacgtgggggccccgcgcgtgtggcggtctcgggggcgggggggagaggaggcgtggc

SEQ ID NO: 7807 - DNA, 6000 bp, Homo sapiens
tttgttttttgagacggagtctcgctctgtcacccaggctggagtgcagtggcgcgatctcggctcactgcaacctctgcctccccggttcaagcaattctcctgcctcagtcttcggagtagctgggattacaggcgtgcaccaccatgcccggctaatttttgtatttttagtagagattgggatttcaccatgttagtcaggcttgtctcgaactcctgatctcaggtgatccacccccctcggcctcctaaagtgctgggattagaggtgtgagccactgcgcccagcctgttgccttgtacttctaagagaaacaaatttactggctagagtgcagcatttctgtccagttcggatagctgtttgagtgtgaaacctcactgagctgcacaaacaagccttgtgcatgtgagttggagttggccctcgggcctcccgtttgagacccccaaaccctgcctctctgttctctggctgtgggaaagttgtcagttcacacctccctgcagccacatttaagtttcagggctgtgaaaaagggaatgtgggccgggtgcagtggctcatgcctgtaatcccagccctttgggaggtcgaggcagcaggatcacttgagcccagtagtttgagaccagtctgggcaacatggcgaaactctgtctctacaaaaatacaaaaaaagtagctgggcatggtggcgcatgctacttgggaggctgtagtggcaggatcccttgaactcggggtggaggttgcactgagccaagatcactgcgcactgcactccagcctgggtggcagagccagaccctatctcaagaaaaaaaaaaaaaaaaagaccgggcagggtggctcacgcctataatcctagcactttgtgaggccaaggcaggtggaacacaaggtcaggagttcgagacaagcctgacccatatggtgaaaccatgtctctactaaaaatacaaaaattatccgggtgtggtggcgcgtgcctgtaatcccaactactcaggaggctgaggcaggagaattgcttgaacccaggaggtggaggttgcagtgagcccagatagtgccattgcactccagcccaggtgacagagtaagactccgtctcaaaaaaaaaaaaaaaaaaaaaaagggcagggggagtgaggagggtgggaatgggagtgggtgaaggggatctgagggtaccatgggaggcagtttgccctctcgaaggtgcagacccagctctgcaagagcgggcgctgggtggagctgcctctgtgggcgagggtgctggcagcagaactggcccagcgggtgtgctggcctaggcatgcttcaggcgggagggctgctgcaagacacagcaggaacatagaggccaggggtgccctgaacccgggaagagacagtttggcctgtggggtgtgggaggaggtatggggtgggggcgggtggtggcaatgtctggggctgattccttatgagcccattgccctaattcttctttggggatacagtggtgaccaataatagctgcactgacatttgtggagctctcattgtataccttggctctgttccaactgttcatttcatcttcaacaacagccttggagtgggtgcggttatctcaattttatttttattttttttttgagatggagtctcactgcattgctcaggctggagtgtagtggcgcgatcttgactcactacaacttccgcctgccaggttcaggtgattctcctgcctcagcctccggagtagctgggactacaggtgcgcgccaccacgcccggctaagttttatatttttagtggagatggggtttcaccatgttggccagtctggtcttgaactcctgacttcaggtgatctgcccacctcggcctctcaaagtgctgggattacaggcatgagccactgcacctggctattatctcaattttacagataagtccactgaggctcacagtgggtatcacttgcctgcctcaagaccttgagtcctgtctcactcctgtaatcccagcactttgggaggctgaggcagaagaattgcttgagtccaggagttcaaggccagcttaggtaacctggcgagaccctgtctctacaaaaaattttaaaaagtagccaggtgcagtggctggcacctacggtcccagctactctggaggttgggcagaggattgcttgaagcctggaaagtcgaggctgcagggagctgtgatcacggcactgtgccccagcctggatgacagagtgaggcgctgtctcacaaaagaaagaaaaatcaaaaaactgtgagcccttaacctttaggaatctgggcagagggacagacctgccttcctggagctgaggctctaggtcagagatacacattaggaaagatgaataaataaatgaaatgaacaaggtggccgggcacggtggctcacgcctgtaatcccagcactttgggagggggaggcgggcgattcatctgaagtcaggagttggagaccagcctggccaacatggtgaaaccccgcctctactaaaaatacaaaaattagctgggcggggtggtgcattcctgtaatcccagctactctggaggctgaggcaggagaattgcttgaagccaggaggcggaggttgcagaggcgaagtttgcagtgagcccaaatcgcaccactgcactccagcctgggcaataaagggagattacaaaaaaaaaaaaaaagcaaaagcaaggtgatttcagataatgccaactgccatttgagatgagggacagatcagggaaggtctctctgaggaggtgaccagctgaccagctgggaaggggtggggagaagggtgctccaggccacctggcccccaagttcaaaagtcttgaagtgtgtgtggaactcggaggagcccgggaggcagaagcagagtggagcagagagaggcacagaagtaacagaaagagacaaatcaggacggcatatggccttgtccttgcggggtcctcactgaggacttgatcacttactctgagaaacacagggagccacgggagggtttggagcagaaaagaaatgtgatctgagttttaagaactgtggccaggagtgtggagtggcagctagggatgggactcccaacatctgtcgagatcctggagcctgagtccccagggtcccaattcgtgggaaagaagttcagggaggcagctggagaggcaggttgctgagcccgggacccgcagccggaagagccccattttcgagagaagtgagattggcgcctgggaggtgtgaagcagccacctccccaccctggggcgcggcttcccctttacagaaggaggtcatttattgagcacctactgggtgccagccacagccatgctgggagatcttcaggggtcatcccagtgggcaccattggagttggcttggtccacaggactggggaacctggcactgaagggttaacaccgtcccaccctgcgggtcccattggctgtgtctttgagcagagcaggcaggaaaggttctgcccaccgagggaacagcgggggcaggagggctgggatccccaaggggctacatgggggcctgacccggcctgagtgccccctgagtttcctcccacgagggtatcccggatccacacttattctcagcctctggctcatctctcctggggcgccctcaccccacccgcggccagcagggcctgaagcatcaggggcaaagggcacggtcctggagaaggtcgcagcagcgggacccagcctcccttcctgaatctgagggtggaagagctgggaccgtctggaagttcctgggaagtcggggtgggggcgtttcggggccagcgggactggtcgttggaggagcagtggcctgggagaggcgtgggagagcatcacagacagcaacaaagagacacgcagaggcaaagagacacgcagagacaaagagacacgcaggcgagagactctgagatcctcctgagagagatacagaggaagtgagggagacactcattcattatctgggcatggttgcaagcgactggagtcccagcagctacgttcagccggctgagatgggaggatggcttgagccgcggaggtcgagactgcagtgacttatgatgttgccactgcactccactctgggccacagagcaagatcttgtctcaaaaaaaaaaaaaaaaaagaaattcttacattgctggggtttactgtctgctaaggacacagcccagaaacaccattaatgagtaaatcactttgtcgtcagcgataagggtgggagagaatcggtcgggggaacacggaatccagggggtgggacaggagagaccctccttatctgaggagcggcaagttcccatcacaatcctgcccgggcccgccccacccccactcgccctgagccgggggcgggagcgggaaattgggaggggcctgtgcccgggagcagcgggaacctatctgctggtgggagaggactcaggctaaggtggcccccactgaagactcctgctaagcaacccactgaagacccctccgaatcatcgacggggcgtccttggggtgcagcccaggaagctcagttcacaggtgggtgggcaatgggagggcgcagtgcccggacacccaggacagaggagacccctccgctggggagaagaggctcaggctgcgaccgccctgctgcagaaccctccctttcccgcctctccgagtcctcccaccgcgatggagcgtccctgggaggacagcccaggcccggagggggcagctgagggctcgcctgtgccagtcgccgccggggcgcgctccggtgccgcggcgagtggcacaggctggcagccatgggctgagtgcccgggacccaaggggagggggcaactgctggcgaccgccggccctttgcgtcgctggcccgccccctcgcctgccagctccagccccgcccccggagcggcgtccgctcactcggttcaaggcagcgcgactgcgggtggcgcacgaccagggcgcagagtgagtggactgcactggacctttgggggcgctgggctgggcctgacccggagggggtcgccctggcggccactttcccggtctaaaaaggcgcaccactccttgcagggagttctccgaacttttcctggaggcctctggggagggggaagctgggggctccccagctgggtgcaggacctgggatacggggtgaaggtggctggaatcccctggccaccccctcctggccgggccactgcaagtttccatacttcagtcctgctgccgggcaagctgggcggatggggttggcctccccctcagagcatgtgtaaccctgtctccctgtatttgggctccccacctccagcatgggtgagccagcgacttcctgtctatgtttgcctgccttgattctctgtgtgtgactgaagctctctgggatgtccgcatccctgccttgtgcaaaagagatccattcccctccccaggccttggctttctcatctggacttgcatggggactatttgtgcatggatgtttgtgtgggagcatggaaacctttgcgcctgcttcgatacgaagcatttcttttgagcttcagttttctcatctgtaaattaggactaaaggaagtggggattaataaggtcacagaggcaggtgaggagtgttattacagtttaatgacatgtgtgcccctctgtaagagtctgtttgcctcttgtggattctctctcctgtcctcaggctctgccttagtaaaatgagtgaataggatcaacttttttttttttttttttttttgagacggagtttctctcttgtcacccaggctggagagcaggggtgcgatcatggctcactgcagcctcggcctcccaggctcaagtgatcctcccgcctcagtctcttgagtagctgggactataggggcataacaccacacctggctaatttttaaatttttttgtagag

SEQ ID NO: 7808 - DNA, 6000 bp, Homo sapiens
aaaaacaaaacaaaacaaaacaaaaaacaaacaacaaaaaaacctggccgggtgcagtggctcatttctgtaatcccagcactttgggaggctgaggtgggcagatcatttgaggtcaggagttcaagaccagcctggccaacatggtgaaaccgtttctactgaaaaaaaaaaaaaaaaatcaaaaattagcctggcatggaggcgcatgcctgtaatcccagctacttgggaggctgaggtaggagaatcaattgaatctgggaggcagaagttgcagtgagtcgagatcatgctactgcactccagcctggatgacagagtgggactccatctcaaaaaaaaaaaaaaaaagaacacagttggaattactccctgcccccaacctatcctcctagcccaattctgggacctctttatcttgccctccacttggcttggcagtgggggtggaactgaatggagctcagaaatcgcccaaggttggccggccaccatggctcacacctgtaatcccagccctctgggagacttaggaaggaggatcatttgagcccgggagtttgagaccagtctgggcaacatagcaagctatgaaaaaaaaaaaaacaaaaattagctgggtgtggtggctcgtgcagtgagctgcagtgaggtatgatttcatcactgcactccaacctgggtgacagagagagaccctgtctctaaaaataaataaagagggcagcgcggtggctcacgcctgtaatcctaacattttgggaggccgaggtgggcggatcacttgaggtcaggagttcgagaccagcctagccaacatggtgaaaccctgtccctactaaaaatacaaaaattagccggaaatcacttgaacccgggagagggaggttgcagtgagcagagatcgtgccactgcactccatcctgggcaacagagcgagactcctcaaaataaataaataaatacaaatataaataaataaatacaaatataaataaataaataaaagaagttgcctaagatgggggtacagggagcctctggaaaggccagggacacacaaaacttcacccacacctcaaggcttggataggtccatcctccactccctggcacctgctgactttccagggctcattccatcacacattctgagtccatcttctccatgatgaagggagcgcccagagaaggctccctgccttgttccctgtgcactggaggcgcattctcaatgcatcacactgcacctgacaggtaagagcatataaggtgcgtgctgtgtgtttgaggcgtaaatggaaggaatgaatacgtgcaccgagcagtgaaatgaacagcagggttgtgcatcctataccgaatgggctctaggaaaacaggggctgggggcgcctggtggacagtggctgtctggcgttgccctgacctgtccaggagcctgaggcagggcacccgggaacgagggcgctgggcctgaggcaaagggaagctgagcactggggtgaagcagagccttcaggactgtgaggctgggggcccaaccgaggcagtgggcgcaatacatggaaggcacagagaggggacagacaaggcacaggcgagcccagctgtgtctgacgctgggatgctggaggtgctaggcgtacaaaatgtggagtcccagatacgcaggagagcacagggtgccctaggcatagggcaccctgggcgtgcgggttctctagcacagggtgcgcagaagatggggcgtccaggtgcagggttcatagaacatggggtactcgaggcgcgtggcaccgtgggcgtggaggtcccgtgggacggaatacacagagcgtggggtgtctcaggagcggggctcatggggagcccaaggcgcaaagtgggaggctggaagcgaggagcgccctgggagcagggtgtccgaagcgcgggtaccgacctgggcagcgcggggcacgcggcgcgcgggcgagtctgcgtgcgcgcgcggacgccttggttcccggagcccggttgctggcgcggcctccactgcggctgcgcagccgaaggcctgaggggcgccagggctctttacgcgccccccagcccctccgcactctttgcctcctgagcacgccgctcacaagtccaggagacatggatcagatggaggctggagagccgatcccagctgggaccagtggggtttagagggtctagaaaggggcgaggggcgggggtgaggggggttccggctggggttttccaaactgagctgagggtgccttaaagaatgtcgttgctttccctcatgtaagtaaaggccactccttctcgtagcctctggagagtgcaagttagaaccacctcctaggctagctctgtagggggaagtgggtgggctgctcagggctggagggtggggtggggacaaaggcctggagcaggagaacaaggaggtgaccagcttttcctgagcgtcaagttctgttcccttttcggtactgctgggtttatagaaagctggctgcctggagtgccctccatctcaaagccttcatgggtcttacttggtgctgtcaatatctcaaactgggaaattgaggcgtagagagatgggatgccctcctccatacccagtggatctgcagtcaaccacagatggatgggatccgttttgcactcaccaaatcctactttatatttggtcccccagatcccggtgtccaacctggccacccagattcaaggctggacagctttgcagccatgaaatcctgggcatgaaggaggaacgaaagtgacccatccctccattttgaagttctctggggccagatttgcctaggttctggctttcaagaatcccttccccgtcgtgaagagacagctgtccgtagaaggcggtggagggtgacaggctgccacagcagtggtgcgtggtcacccgggcagcctggaagtctggtgtccctgcacttcctccagtttagccacagggacgtgcttctaggaagggattcttagaggccaagttaattcccgtgcagatattcaattcaggctttcttagatactcatttttcccatccagatatgcctcaagttttgtggatttaccactcctactcaggaacccttttccctttcctcattcattctgcaaagcgcatggttagcaatgcactctcttccctggacatatagggaatgggggtttcccccatccccatcctcagcccgtccccctcctctaaaactcagatcagggtttgtctgccctgctgctaagatgcagcccaactttgaactctgagctgtctgctttaacatttgggcctcacttgaatggattcccttccctgaggattccaagccctccccagccatcagtcttcccatctttcataaaatggagccagcagccccgcttcagggactccccccctcccccctgttccctccactccaggattcttcccacttccatttccctccagcccccaccctgcacaaagttgcctgttctgccgaagtgcctatttttggcttggggcccagttttatagccccagctataggtcttggcagtcataactttcgctctccagagagccaagccgggtccaacagccttccccaccccagagagggggtgcgggggctccctctgcagcctcaacccgaaacctgcccctcgcctcacttggtctgatgcctgggaacccaagcctgcttcttgccctacttcttagagtccaccagctgcaatggagttgttaggtgttgaaaatccatgccgggtttttactcttttagagaacataaaattcaatttttcccctcgcaccccctccccaaaagcaagactttgaggcgtttacaggtacaaacctccccctaacgcttccctccgcccctgctgcccggtcagctccaagcccctgtcccggtggcccaggatcttctgctgagggtctcatcccgtcccgcgctccagtcctggctttgcgtgcctccctcgccttttattgtaggtctggtctcccagggtagcggcctcatcgcattcccttcgcagcgcccctggatccagaaaccgcttttacctgtccgctccggtgcagccagcgcgccaaatcccttcgtacccgagtccagtcctccttttgcccgtcccccttgcacgtcgctgccaggaagatgagggcagcccaagtcgcctcagccactaagcatcccccttccagaaccccccaccatgcgaacccaggtcccgggagttccgggccgggtcttgcttgtttccactgcgttaggcctgacgcattactccgtctcccgagaaagaatccggcccgaaatttgcgtgccccgggtgcatttggccatgtcgcatctaccccccaaccccccgctccaacaccgttcctcccatctttatctaatccaactcgggttttgcacaacccttccagatctccccatttgcgccctccttccccgggctcggcgcctttccttatacttcactggaaaatccgctccgggtcttccttacgcctgtctcccttcccccactccccgctccaacgcggggctccagcacgtcgctttccctctccctgcttttccagggaggaggcgagaggaggcgaaaggaaggaaagtccagcccgggttttcgggccggctcctggggcgctcaagcgggttgcggcggccagtcccgggcggcgactccgggccgggttttgcgcgcgcccaccgcccccctcccggagcgggtgcgccggggagcggggcgagcaggcggcttgtcattgctggtgcccggcgccggctcggtccgcgcgtcctgcggtgcccacgggcccggcccggcgccccccctccggccgcaccgggggcgcgacgccgcggcacccgcctccagccgcgccgcccccctccgccagctccgcgccgcccgcccccaacccgagctccccgcggccactgcggggagcccgagccgtcggcgcgggagctgtcggcgctgcggtgcccccgccccgccgtctgccgaggaggccccggctgatggggccgcgcgggccccggagcggcgccgccgggcggcgggggcctgcaggggcgccccggctgccccgttaacccctcgtccaccgccggcgtcggagggggctgggaagtcgcctgggcgcacacgtgccgcctccgtcggggccgcggagctgcgggggagatgcgggccgctgccggcgccgcctcggggcgctccgcctcgccccagcccccggcgctctgacgccgcccccgccccaccgcctccctccccgggaggggcgcagacccgatcgcccccagtcccgagcctccgccgccgcgagggggccgcctttggatccgtgtaatccgcctcttttttttcttttcttttctttttttttttttttcctaatttttggtcggcggcggtgctgggccaggggaaggaagggacacggaggccgccctcgtcccgccacctcctacccgcttccccccagccccggctccgggagatgtgccgggcggggggcccgggttcgccgagccgcaggagagacacgctgggccgaccccagagaggcgctggacaggtgagtgtctgcgggcccagggcgaggggcgaagccgcacctgggccaggtgtgcggggcgcgtggaagaggggaggcgggaaggatgggaggccggggcctgtcctggccgcgaggggggaggggacacgggagccgcgcggggcaccgcacctgagcgggaggggcgtcgggggcagcccgcacctcacccccactggcgaggggcctgggaggggcggcccccacggagcgcccggggcgcgggggtgcggacgggctaccgcagggtgcctggcggggggaggggaccgcgagtgtgcccgcgcgtggctgcgtgtgcccgcgcgcgcgccagcctttgtggggaagcggcgcggcggt

SEQ ID NO: 7809 - DNA, 6000 bp, Homo sapiens
cttcggtgaggagccgccccctggacctccccagtggcgctgctcgcatgggcgcaggcggtggtgccgggagcggccagcaggtggcgcccaagcctggcctgccgaaagggaaggggttgcagaaagggaaggggttgcagctcctcccgaccccagacggggtgctggcccttggcccagcctgggagaagggcgggggcgaggaggaagttgccctcacacctagcttccaggggccattagcccagccaagcgccctcagccctggccagccccctatccccaacaggccaggcttgactgctcagtgccagcccccccacttttccatctggcttcactaactctcaggaatgggccccaggcccctgaggtgggggtgggggactaaatcacttccctgggcaggtagggctggtctgtggcccagcagccatacccccttggccaagaggagacggactcaggcagctggagactcaggctggggtacacctgcttcctgtcccccagcccctgggagcagaagtggcccctccagtctcccctccagcatttcctattcctggcccccagctgttccccctgctctgccccacatccatgccaggcctgagtcaggattcctgccctcctgggatcaccccggccccagcccccagaaacttgcagaagcctggagaagtttggggtggtggtgaaagccaggaaggacaagttcctgcccagaacgtgctaaaaccaagcttcccccacactcactcctctcctgcctcccacagacatgatcagccagcgttcagcgggtggccgccctggctctggcccacaactgggcactggccgagggaccctgcggctccgatcccggggccccgccacggtggaggatctggtgagtgctccagccggaccctatctccggcatcccttccctttcttttttttttttttgagacagagtctcactcttgtcacccaggctggagtgcagtggtgcaatctcggctcactgcaacctctgcctcccaggttcaagcgatactcctgcctcagcctcccaagtagctgggattacaggtgcccaccaccatgcccagctgatttttgtatttttagtagagatggggtttcaccatgttggccaggccaggagttggtctcgaactcctgacatcaggtgatccagcctccttggcctcccaaagtgctgggattataggcatgagccaccgcgcccagccctcccttccttttcataaccggcagcattacctgttagctgaggggactctgggcagacagcctggattctagtccacttctgccacttcccagctcccagggaccttccttgggcacatgggccgcagtttgcccatcagtaaaatggggatgagctgaacaccgataccaccttctcagggttgtcctgaggtctaaatacgaatatatgtaaagtggtgacaatggcagtccgtccaattactatgtatattcacattgttatgatgtcgctgtcacccctccctggcccccagccctctgcctttgaagagaaggccattgagaaggtggatgacctgctggagagttacatgggtatcagggacacggagctgggtgagtgagggctgcctgggggagggggcatctaggtctgctgggggccgaatccaccctgagccccttggtccctggtgtcatttgtgcctccgttctgacccctcccccaatagcggccaccatggtggagctgggaaaggacaaaaggaacccggatgagctggccgaggccctggacgaacggctgggtgactttgccttccctgacgagttcgtctttgacgtctggggcgccattggggacgccaaggtcggccgctactaggactgcccccggaccctgcgatgatgacccgggcgcaacctggtgggggcccccagcagggacactgacgtcaggacccgagcctccagcctgagcctagctcagcagcccaaggacgatggtgaggggaggtggggccaggccccctgccccgctccaatcggtaccatcccctccctggttcccagtctggccggggtccccggcccccctgtgccctgttccccacctacctcagctgggtcaggcacagggaggggagggatcagccaaattgggcggccacccccgcctccaccactttccaccatcagctgccaaactggtccctctgtctccctggggccttgggttctgtttgggggtcatgaccttcctagtttcctgacgcagggaatacaggggagagggttgtccttccccccagcaaatgcaataatgccctcacccctcctgagaggagccccctccctgtggagcctgttacctccgcatttgacacgagtctgctgtgaaccccgcaacctcctccccacctcccatctctccttccaggcccatccctggcccagagcaggagggagggagggacgatggcggtgggtttttgtatctgaatttgctgtcttgaacataaagaatctatctgctgttggacctgtgtggcttcggggtgggagagggggaagattggggctgagaaagaattcagcagctgaaatccatcttccgcaggctccaaattgaattaggagctggcaccaagccacctgccccctcccactgttccttctggctgcaggccaccaggcttccaggcagggccagagcttcctggactactgagggttcaaatcctgccccctctcccacaaggcctcctaccccctggagcttcacaaggctgctgtctgcagctggtgacaacccccggaccgtggggagcaccagggcattgaaacctggcttggaaatagaaagatggaacctcaggcctgccagagccccacccctacaccgggaggttgggggcaggcgtgaggcagcccccaccccacccggcccaatgctggacacgcaggcgtccatggggcaccctgctttgtcctagacataaacccagcatacttgttttgacaacccactcatcttcgaggattgagggtgatcagggaaaggcggggtgggaccctggccagacctggagggaagggaagggattgaagcaaggggcgctgggccagaaggccccacaggaatgcttgggggtgagccgagaggctgtggggaagtccgaggccagcttgcaatcctcgttccaaaaggcgggcgggcactgggccaccaggaagaggggaagggggaaaaggggaagaccctgggggctgggtgttggtggacagacccgggtggagtcggggagccgcagtcctggtgactcagggcatccccgggcacctgtgggctcctcaggtgtctgtgctgggagccgcttgcggtggtgaaggggtgtggctatgtgtgtctcgggtgttgggtagcactgtgagtctatcaagagtgttgatggctcgtgacgcaatgagggagggctgtgtcgtgggtaagggatgtgataaccggctctgtgttccagggcaattgcaggtgtaactggcagtgtctggtggtggggagtgcaacggagtgactgtgtcttggggtgtcccggggtgtgggggtgtgtgtcttagggtgctgtttctggggcaaggaggggtgcttggctaggccttggggtgttcaggggtgtcagggtatgtctcggggtgttgctgtttcctgggtgggggtgctggctaggtctaggggtctctaggggtgcaggtgtgtgtgtctcagggcgttgctgtttctgggtgagggtgggggtggccagctaggtctctggtgtccagcggcggggggtgtcacttcttgtgccttgggtgtacggagtgtgctggtggggcctgtctgggattgttgaggggtcattgaaagtcaaacagagtgtggtcaggggcagttttggcaataaggagtgtgtgtgcgtgtgtgtatctctcggggtgccaagtgagaccctatttcccagcactaaggagggtggttcgggtgatcatctcagagggctgcattttggggtgttgggaggggctggaattgaggcagtaactctgggtgcgtcccggcgctgggggtaagaccctgagttcagggatgtggcggcagcaacctggctgtgctgagatggggacaggatgaaactgagtggtaagtgacaggattgtatgtcttagggtgtgaggctgtgccagtgtgaccctacttctcagggcaggaggcgagtctttgtgtcttaggacgtgtgtcacaggtgtcactcagcccatcttaaaggagccagtcactggggagagtccccaggtcgccaggcctcctggttcccctgccccctttcagcctcctcccaggatatgactcgctgtggccctagccggggcttaagcccctgtataaataggcggatcccctggccaggctgggcctgacccaagctggtctacccgaggccctgcccaccagcacccaccccgacatccacgaaggctttggcagggcagggggggcattgctggccccacagaattggagttagcctctctagctccaaagccccagggaggggggcagtggcaccccctgcagctgccccagcccgccccagacgacgctcacattttccagtgtttagattttatccgctttattaatgaggcaagaggcccgatcctgggggggaagggggctgctcccgccctgctgggaggagggggtcacatggggccagaccaactccagggagcctcactcctcgtggagggagccgctggggcccagagtggcccccgcccattgccaggagcagagaggggggtctctgccactccaggcccccagcgggcgtgcgcggggtggagcggcccctggaggccagcaagggcggcgggaggagctgaggagccgccccaggaagagggagggaggaagcggcttgccggagagccagggcgcagtgggcggcagggctgagcggccggtgatggggaccccacatcccaggcagtgccgggtaagggggttgcacatgagggtccctgattggggaggaggagggcatgaaggggtggggccatggccacctgctgtccgtcctgtgtccccgggctcttctccctgatctgtgcgtccctgtcttaccgtctgtccatcctcccttcccatctggcctggtgggcagttccgccctttcagccctcaccaccaggatatcaaagagtggatggtcgtggggccgcctccaggcctctggggcagggatatggagtggaaccgtgggcacccagggtgaggcagaggtgatcggggtagggcctggcgagagaccgcagtggagcagaggcaggtccatggggcaggggcagagatgggtccatggcacagatgtggctgtgccatgtggggtcagagatgggtccatgggggacagggacatggccgtggggagagatgtgcccgtggtggtagagatggggctggggcatcgaggatgggactggagtaaagctgacatggggaaagtcaggtagggccacagtggcagaaatgggtgagagctatcagatggagccacaggccccaggaatttgctgggtgtaaaaatggaaggtgggggtcggaggcactggcagagatgcctgagggcggggctggggggaatcttgcaggaaaccatgaagggcagagaaagggccagtggggttagagggaggccctggagcaggagatggggtggtgagaggcaaaagagagggagaagggtttccaaatggagtggccaggtcatttggagttgcccatggcaactgccatgggcagaggggccgcctgagaacgccatggagtcaaacaggccctgatgttctgagatggcaccgtgggctggtccccgcccgggcccagccagcctcactctgccctcctctcctctatccagcacccctggcgcctgacatgagcccttg

SEQ ID NO: 7810 - DNA, 6000 bp, Homo sapiens
caaatagaatgtggagtttagggaaacagaaaatgtatcagggaaggtggaaaggctgaagcagaagggtaggaaatgaggctggagaagtggagtgggaccagagtggggtgagatttatgcacctactaagtaagtgcatttagcctgtgaaatattcacagggttgtgaggcagaggtgtgatgggcccagaatcatctttcagaaaactgtcctgactgcacggtggaggatgggacagaaggacaacgagttacgagactattgcagttatcccagatcagagatgcctgcagaaaagagaggttgagtaactttcccaaagtcacacagctaatcagtggcagagccaggatttgaacccagggattctgactctgcagccaacattctgtaatagcataactactgagttaagccattcttgcattgttacaaaggaatatccaaggctgggtaattgataaagaagtgttttaactggcccgtggttccgcaggctttacaggaagctgacatctgcttggtttctgggaaggcctgggaagcttccaatcatagcagaaggtgaagggaaagtaggtgtctcatggtgagggcaggagcaagagagaagaggggaggagtcacacacttttaaacaaccagatctcatgagaactcactcactatcatgaggacagcaccgaggaaatggcactaaaccagccatcaaaaatccacccccataatccaatcacctcccaccaggccgcacctccaacactggggattacatttcaagatgagagttagagggaacaacatccaaactatgtgaaccactttggcctgaccattaggtagcaccacctgtctctcttgatcaactcttgcctctacaaccccacccctagacgatcactagggagaaagatcaggaagcctcactgcatgcatgctgggacagtaggatgttgagagcccaacaaacctactacgtacgttcatggccttgacaatcccaatagccagctaattccaccatgctccaaacacccagggaggtctcttgatcatcttgctttgctcatacttttttctccaactgtctttacaggtgacttcacttgctgtctccacttcttcccctcgcgctttttcctcaatccacataattctggcttgaaccattataacaacaacctccaccaccttccctaccattattggcatcaccaccatctttacctccactatcaacataaccaccaccgccactattttcactcccatcttcatcaccactgctatcacagccttcatcaccatcacaacagtcaccttcactacaactgtcaccatcaatcaccatcatcaccaccatctctgaaaacatcactgtgatgttaccaccaccattgctactaccaccgtcgtcactttcgtcaccttcagccccatcgcaaccatcatcatcaccaccatcatcacttccgtcatcaccaccacgacctctaccaccaccatcgctactgccactaccatgatgaccaccatcaccactgcaaccattctatcaccatcatcatcaccaccacaaccgttattatcatcatcatcatcaccatgttagatatgagttctaaatttattttcaaagaattaatatgtcagtatgttcaattctttgccttctacttttaaacttaacttcctcgtaaagcagctttttcgattacctactccaccctgactcattctgatcacctgctccaccctaactcattccgattacctgctacctgctctgccctgactcccgccaaagcactcaccccgtcattctctttaaattagccaatcggcattagtttagcctgcgcggtctaatcctagccaataggggaacgacacagcagcaggggccacctgagtcagggataagaaccccttcccctcccatgtccgaatgtgcgctcgccactgttccatctgtaagggcacacccttctatattgaagtaacttgccttgctgagaattaaaaggaaaattttatattcaagtgctatttctttcacgtcaccgaaactttatatataacaaccaccaccacaaccgctatcatcagcatcagcatcatcaccaccaccaccaccttcactactgtaattgttcatgctaagaatacaaacaacccccttgcagctctctcctgtgggtgtctttcagtcttaattcagtgtgatctctttcctttacctccataataccatactccattcatttcccacccccacccctcatctctctggccattctcgtcctgtctcctctattagctgcctctccattcctttattttttttaatttttttctattgcctttgcacaaattaacattgcctgagtttttaaatgaattactcagggttctttttccactctataatctctccctaaatgatttaatccatgaccgtgtcttcagttgccaccagggctactttcttgcagtggtttttttgtttgtttgcctgtttgtttgttcctttttgttcctgttgtatctagtgatacaagagctaaaaagatattattcaggcaactggtgagggtaagagagtcctcagtaaggcttccctgttaacaaaaagcagccccaaaatcatttcttttcgtctttacctccactaccaatataaccaccacctttgctattttcaccccatcattatcaccactgctatcacagccttcgtcaccatcaccacaacaatcaccttcactgcagctgtcaccttcaatcaccatcatcaccaccatctctgaaaatatcaccataatgtaaccatcaccatcgctactaccatcaccgtcactttcatcatcttcaccatcatcgcaaccatcgtcatcatcaccatcatcccttccttcatcgtcaccaccaccacctatagctccaccatcactcctgccactaccatgattaccaccatcaccaccacaaccgttattatcaccatcatcatcatcaccaccacgacaaagagcagtctgcaaaatcgagctacaaacataaataagcaagctggaagtttgcaaaggtaaatgcagcggctgtgccaataggaaaaggcttcctgggggcaggcatgttcaacatggaggttccctcttcccttttttttttttttttttttttttgagacagagtctcgctctttcgcccaggccagactgcagtggcgctatctcgggtcactgcaagccccgccttccgggttcacgccattctcctgcctcagcctcccgagtagctgggactacaggcgcccgccaccgcgcccggctaattttttgtatttttagtagagacggggtttcaccatgttcccttttctttatcaccacgtgtgcagtaaaaaagcaggcaacatagtgccagccaggtagagaccccatctgcatagtaaaagatgaggatggggcggccagcttctttgcgtgctatgcaaacagcacacccagtccgaccaatctctcggttcctgtgtaaatcagacagctcctcctcaagctcggctataaaaccccatgtatttcaccacgagaccagaagactcacttgggagcccctctctctctgcaggatagagcttttctcttttttctcttctcttgcctgttaaacttctgctctgaaactcacttttttttttttttttttagatgaagtctcactctgtcacccaggctggaaggaactggcgcaatcttcgctcacggcaacctctgcctcccgggttcaaacaattctcccgcttcagccttccgagtagctgggattacaggcatgcgccaccatgcccagctaatttttgtatttttagtacagacagggtttcaccatgttggcttggctggtcttgaactcctgacctcaggtgatccgcccgtctcagcctcccaaagtgctgggattacaagggtgagccacagtgctcggccttaaattcacttcttgtgcatccgcatccttgatttacttggcatgagaggatgaaccccagacaacaacactgcttcagtaggaagtctggtgttttaagtctaatgaagagcttcagaagagttttaagcaggggagccgggtgcagtggctcacaccggtaatctcaacactgggagactgaggcagaaggattgcttgagcccagaaattcaagacaagcctgggctacaaagcgaggccctgtctctcttcaaaaaaaaaaataaaaactaaaaaaaattagccaggcgtggtggcatgcacctgtagtcctaacgattcagaggactgaggtgggaggatcgctggagcccaggagtttgaggttgcagtgagctatgattgtgccacggcactccagcctgggtaacagagcaagacccacataaataaataaataaatatttgctggaggaagggtagatttacagactttttctcccaagtcctgtgactggttagggttggtccaaataaccaaataatgtattaccttctatgagactttgggactcttaacttcttatggctcagcaatcataaccagtaagtatcatctactgggggaagagaaagatatgttaaaatgactcctctggaaacttcagataccaacacagacaccctaaaatctggtttactcacctcaaagccacaggcttatttaagatttattttggccccaaaggcacttcctaatcctcagacaatgtgatgtaactttcagggcatttcctcgttagggtttaccaactcaatcatcccaaaggtgatcaacaatagctaggcagaaaaggtacagcaaataaacgaaaagcagaaccatgagtctgatggcgaaagaggggaagcagtttgcttttctgatagcaatttcatgagtcagctgacctaagatacatacttcaattctcatgggatttcttgagctaggaaaggtggttggcttacggcacagtagagagcttccagggctggctggcgtgggatacccgtaccacagaaatgcagggaccattgcttcttccaggtatgtgtgactgtaacaatgactgaggcttaacctatcccccagtcagggaccacttggttcaacaattggttattttctcctcctctttcttctgctctgaacactctcaccttttccctttggagtgtggtttccttcctgactaccctattcaaagtatgctctcgaatatccctaaaatgttcctatccaatctagtagcttggttttttgtttgttttgtttgtttgttttgttttgttttttgagacagaatctcactctgtcacccaggttggagtgcagtggcgcaatcttgactcactgaaacctctgcctcccgggttcaagtgattctcctgcctcagcctcctgagtagctgggattacaggcacacatcaccacacctggctaatttttgtatttttagtagagatggggtttcaccatgttgccctggctggtctcgaactcctgacctcaggtgatccacccgcctcagcctgccaaagtgctaggattacaggcatgagccaccgcacccggtctctaatacgttgttcatcttcctcttggcaagttttgttttctaattgatgtcttctccttcttgataacttctgcaaactagccctgccctgacttttttcctttttctcttgctattctttcttctccctcctttatcattttcctgtgacaagaaaataaatgataattttattattaattttagaggtcattatattaagtgaaataactcaaacaccaaaagacaaatgcctcatgttcttgtttatcagtgggagctaaataatgtggacacatggacatagagagtagaatgatagacgatgaagactgggaaggctgagggagtagaaggacagtggaaaataagaagttacctaatggttacaatgtacatcatttggatggtggatact

SEQ ID NO: 7811 - DNA, 6000 bp, Homo sapiens
ctcagtttttaaatttaaaaaaggagtgtggctaggcatggtggcatgcacctgtaaccccagcattttgggaggctgaggtgggcggatcacttgagggtcaggagatcgagaccagcctggccaacatggtgaaaccccgtctctactaaaaaattagctgggcgtggtggtgtgtgcctgtaatcccagcttctagggaggctgaggcaggagaattgcttgaagctgggaggcggaggttgcagtgagccgagatctcgccactgcactctagcctgggtaacagggcaagattccgtccccctcacacacacacaaaaaaagtgaaaagttagccaggcatggcaacatatgcctgtagtcccagctacttggtaggctgaggcaggaggatcacataagcccaggacgtgcaggttgcctgaagccataattgtgccaccgccactgtgctccagcgtgggcaacagagaccctgtctctaaaataataacaataaattatactaatataattaataataccattattattgttggttggataatcttgggttgcttcttttttttttttttttttttttgaaacggagtctggctctatcgcccaggctggagtgcaataacgcgatctcagctcactgcaacctacatctcctgggctcaagcaattctcctgcttcagcctcccaagcagctgggattacaggtaatcttgggttacttcttagctgagcaacctggggccaggggccccaaacccccaggttccagttccccttttgacaaatgaggaccatgttcgcaccccccatcattgcagaggttgtccagaagctgcaaaataggtcagcaggactgagacttctggacaaagagaaggcggagaaacataggcagacaccccggcagggaccagatcagcgaggctgaaggaggcttcctttagctgggcggcagcggagtggagtggcaggagtactactaatttgcatggtttaccatatagggccccactcagcacaggctctgtgctggtgctctgcagagaaaaagacaaaagtcactcagggggctgacagcctaatgcggctcgagggcagatggttgctagggaagaagggagatggtgagaagtattggagagactcaagaaagccgccaggaatggtgactcacgcctgtaatcccaacgctttgggaggctgaggcgcgtggatcatttgaggacaggagttcgagaccagcctggccaacatggtgaaaccctgtctccactaaaaatacaaaaattatctagatgcgatggcaggtgcctataatcccagctactcgggaggctgaggcaggagaattgcttgaacccgggaggcagagattgcagtgagacgagatagcaccactgcactccggcttgggtgacagagcaagacttcgtctcagaaaaaagtaataataaataataataataataataaaataaaaatttaaaaagaatgtttcaggccgggcattgtggttcacgcctgtaatcccagcacttttgggatgccaaggcaggcagatcacttgaggccagaagttcgagaccagcctgaccaacatagcgaaactccatctctgctagaaatacaaaaattagccaggcgtggtggcttgcacctgtaattccagatacttgggaggctgaggcaggagaatctcttgaacccaggaggcagaggttgctgtgagctgagatcacatcaccacactccagcctgggtgacagagcgagactctgtctcaaaataaataaatgaatgaacaaataaataaaataaaataaaaatacaaaaattagccaggtgtggtggtgggcacctgtagtccgagctactctggaggctgaggcaggagaatcgcttgaacccgggaggcggaggttgcagtgagtcgagatggcgccactgtactccaacctgggcaacaccagagtctgtctctaaaatacagtaaaataaaattaaattaagaagagtcgatgatcaccatgaaggggtgtagggacaatccctggcatcaggaagtgccactacctccctgagattctgcagacgccagctgtctgacctgcccgtctgatctgcagagaagggacgttgagccctggggttctagctggagtttctggctttctgagaaaaaaaaggcaaaatccctccagacctggtctggccctctctccttccagcttctgctggtgttcactcccctcccccacagcccaggccacccccacaggagcccgggacaggaaggggtaaattctaggactgtggatgtttgattattcccaggacaatagttctctgacttcagtcattagtgacttttttctccatcgctgcaatctccccctttgaacaactgaactatattttccttagcattcatcacttctgcatcttgaatttactcatgtaacaaggagacttgatttcggcatcctcactgaaaaaccctcctcattgccccagatagtagggaaacctaaaaataaatataaatatgaggaacacaaaaccaagtccttgaattctggctggatacagacacctgctaagcctcagggtcacggaggcgctaaagacatgttagtgcccagtggagactttcccctgggctcatcgcagggactccagggctgggctgccggcctgtggatctgagtctcagctgggtgagtcacttgtgcctcagtttcctcctctgtcaaatgggaatgacaacatcattgcagatgttttaaggagtaaatgagttaatatagattaaaaaaaaaaagcacttaggaccagacctggtacaaattaagtgctccataaataatagcattttcttggcaggatagcgagatctcgtctctacaaaaaaaaaaaacacttaaggagaaaactagccagacgtgatggtgcacagctgtagtcccagctcctcaggaggctgaggcaggaggatcccttgagccctgaagtttgaggctgcagtgagctgtgatggtgaccctgcactccagcctgggtgacagagtaagatctcttaaaaatatatatagcgttttaaaaaatgattacgtacctcaagagacaagctaatcatatgatttatccagaaaggaaagaaccctcctatcacatgattctctgttgattaacgaagtgcccaggggcctctgaaatataagtttcccacaggaggaaactggcttagaaagaccagaaagatccggggggtctgctctgtgcggtgaagcttctcttcttggcacctgcctggcatcggaagagggccccttctccctccctgggcttttatgtggacactgtaatgcctcagttttctttctttctttttgtttttgacacagggtctcactctatcacccaagctggagtgcagtggcaccatcttagctcaccgcagcctcaaactccccagctcgggtgattcttcctgcctcagcctcctgagtagtagcagctgggaccacagacgtctgccaccaagcccaggtaattttttttctttttgaagaaacagagctttgccatgttgcccaggctggtctcaaactcctgagctcaagcgatcctcctgcctcggcctcccagagtgctgggatcacaggtgtggagaaataggaacgcttttacactgttggtgggaatgtaaattagttcaaccattgtggaagatagtgtggtgatttctcaaggatccagaactagaaataccatttgactcagcgatcccattgctgggtatatacccaaaggattataaatcatgctactataaagacatatgcacatgtatgtttattgcggtactattcacaatagcaaagacctggaatcaacccaaatgtccatcaatgatagactggattaagaaagtgtggcacatatacaccagggaatactatgcagctataaaaaaggatgagttcatgtcctttgcagggacacagatgaagctgaaaaccatcattctcagcaaactaacacagaaacagaaaaccaaacaccacatgttctcactcataggtgggaactgagcaatgagaacacctggacacagggcgggaaacatcacacactggggcctgtcggggggtgggggcctgggggagggattgcattaggagaaatacctaatgtaaatgacgagttgataggtgcagcaagccaacatggcacatgtatgcctatgtatcaaacctgctcgttgtgcacatgtaccctagaacttaaagtctaaaaaatttaattaattaattaattaattaatttaaaaagaaagaaagaaaccgagcttcgccatgttgcccaggctggtctcaaactcctgagctcaagcgatcctcctgcctcgccctcccagagtgctgggatcacaggcgtgagcctctgtacctggcctcagtttcctcatctggaaaacagcaggggaagatactgccagctgggacgcaggctctgccaactctggcatgccaaagctctgggcacagggtgagccctaccaaagtgggagcccagagctatttctgacaaggcccctgcgtgcctgcccagggaagagccaagtggccccaggcgagaccgccccgcccggctgccacaccttcccctgcacagcagccagcctggaacacacagaggccagagggttggtcagagccacatggtggaaactccagcagagggatttttaaagcaggttgcacttcattcttgctgagcgagtacacgtgtgtgtgtgtgtgtgtgtgtgtgtgtgtgtgtgtgtgcagcgcccctggttctgtgtttttattgtgctttcctgctggcttccagctgcaccgccagttccggggagggccctgggccagcggctgtccgccccccctcctttataaagtcctggcctcgggacagcccgcacagctgcccagcctgcggagacgggacagccctgtcccactcactctttcccctgctgctcctgccggcagctcagctggaaccatgggaggccgcgtctttctcgtctttctcggtaagtactttggggccccgctgggggtggtagcgaggaagctccagcgggaccccttggatgcgtctgagaaacgggaggcgccgctggtgtctgtggggccggcgatggagaaagccacatggtcaagcaggcactcacgggcacacggcgagaggggctggtggtgcttgggcacccccacaccccggcaggaactccagggtgctctcggagcctgctaccctgcccggagggatcctcaagctttctactggagccagtttggcatctgctccataagaggggaaactgaggcacgggggaaggaaaggggcaaaaagtgagtgctaggaccccagagccactgctcttaatatagcgcatagaaagacatgggcggggggcggggaaaatagaggccaggacttctccactgcagggtacccccagcttctcccttctttctctctctctctctgtctttctccttctgtctctctttcagtctctctatctccctaatctccgttttctctctacctctgcctctttgtctctctctctggtgaacaacaaggagatccctaggtccccatctctaaagcccctggtgacctgaggagggtcccccaggacatgccttggaaaggggaacttcctgagtgctgggaaccgcagcgccacatgcaccccaacaggcggccacagcgttttcctgtgggaggggcgcccggggtgaaatatcaccactgggtttcaggatgggccgccagggctggcggcggttgtggtgtgtgtgcacctgtgtccctgaggaagcatgcggttccagggcatcttagagcctgggggatccagcgccatcatttttttttttttttttctgaggcggagccttgctctgtcgcccaggctggagtgcagtggcacg

SEQ ID NO: 7812 - DNA, 6000 bp, Homo sapiens
ggaagtccacggggaaggagtaataaagcctggatacacctcacttttaacatagtgtcttgggaatagacgatacagaaaaaaaaaacaacaatgacatttgtttcagtgcagggcaacgtcccccaggaaactgatgtgttcagagttggaataacaggaggaaaggtatctaatcagcagatatacgaagccataaatatctcctctgctgcagtccctcagcatatgcaaccttgggctggaaatgacatggtggtttcatttggagtccttagtctggctcaagtatagatgatgcttcaacttttcctgatgccttgtcttgagacagagattccatctccaccatcaacctgctagagaggaatttacacttctccatggagaccttcctttcagaaaactcagtagggtaagtcccagagcccagtgggtactgtaggaaaggtcaggaagaacaagagccgtgaatattaacctgaggtcacctgagagccaatcatttcctccagctttgttccttttgcttagaaatgtcttggctatacgggctattttttggttctatatgaaatttaaagtagtttttgtaactctgtaaagaaagtcaatgttagcttgatggggatagcattgaatctataaattactttgggcagtatggccattttcaagatattgattcttcctttccatgagcatggaatgtttttccatttgtttgtgtcctctcttatttccttgagctgtggtttgtagttctccttgaagaagtccttcacatcccttgtaggttatattcctaggtattttattctctttgtagcaattgtgaatgggagttcactcatgatttggctctctgtctattattgctgtataggaatgcttgtgatttttgcacattgattttgtatcctgagattttgctgaagttgcttatcagcttaaggagattttgggctgagacgatggggtttcctaaatatacaatcatgtcatctgcaaacagagacaatttgacttcctctctttgtatttgaataccctttacttccttctcttgcctgattgccctggccagaacttccaacactatgttgaataggagtggtgagagagggcacacttgtcttgtgccagttttcaaagggaatgcttccagcttttgcctattcagtatgatattggctgtgggtatgtcataaatagctctgattattttgagttatgttccatcaatacctagtttactgagagtttttagcatgaaggggagttgaattttatcggaggacttttctgcatctattgagataatcatgtagtttttgtcattggttctatttatgtgatggattacatttattgatttgcatatgttgaaccagcctggcatcccagggatgaagccgacttgatgatgctggataagctttttgatgtgctgctggattcagtttgccagtattttactgaggattttcacattgatgttcatcagggatattggcctgaaattttctctttttttgttgtgtctctgccaggttttggtatcaggatgatgctggcctcataaattgagctggggaggagtccctctttttccattgtttgaaatcgtttcagaaggagtgataccaggtcctctctgtacctccggcagaattcagctgtgaaactgactggtcctgggcctctttttggttggtaggctattaattactgcctcaatttcagaacttgttattggtctatttagggatttgacttcttcctggtttagtcttgagagggtgtatgtgtccaggaatttatccatttcttctagattttctagcttatttgcatagaggtgtttatagtattctctgatgggagtttgtatttctttgggatcgttaacttttttggtttactttttagagcctggttctcactatgatgccccggctgttctcaaaatcctggcttcaggtgacctccctactcagcctcccaaagcactgggattacagctgtgatccaattatattgccctcctcattgactgttaatgaaatatttaaggaaacatttttggtcataaaaagttttaacttttatttacctaaaaatatgtctactttcttagttttttttcttgcgttagttaaaatactttgtctacactaagatcttatatgtagttatctatgtattcgtctaacatatattgctgacttttacactgaggtctttaaatctgctaattctttgtaaaatgtgagtcgggagacacacttcattttctcccaggtagatagctatttatttctgcttttattcaacaatctggtcttttgcaactaaattggattgcaatcttgtcatattttaatacccatatatactaggacttacttcctgacttattcaataagtcgagagtatcttctatgtgccagaacattttagaaacattgtgtattatataattttatgtctaggtctttgccaataaactaaatcatttgatatcattaaattattcttattgtttatcttggcttggttaacgttttatgtaccataacatttaaaaaatatagttgtttggaaatcactacatttaccctggctttaatcccataacattctttttattttatcacgtctcattgctttaatttttttctacataatacagacatactcatacacctttgtgaaaatacaaacttaaagcagggaagttcctgctcatttgactcatgcattataacagagaagacaaagtaaaatgtaacaaatgtgtctatgacacaatgtcctcaaggatgaaatcatatggagaatttcattctgcagaaaaggagacagttatcatagtgtgtgcaggatttttttctttttttttttctttttttgagacagagtttcgctcttgttgcccaggctggagtgcaatggcacaatctcagctcactgcaacctccgcctcccaggttcaagcgattctcctacctcagccccccgagtagctgggattacagccacctgcctccacacctggctaatttttgtatttttagtacagacggggcttcgccacataggccaggctggtctcgaactcctgaccacaattgatctacccacctcagcctcccaaagtgctggaattagaggcgtgagccacggtgcccagccaggattcaatagtatggtctaggaaggacattgcatgttacaggaagaccagaaccagaactagtgcaattccataggactgtcaaaaagagttcaaatcccaaagaccctgaataattaaagaagagatgccacatgaataattaaagaagagaaatgagaaggctgtctcacatgctatcagaccatttctgaattctcgtggggaaagataatttgaaattgacaacttgcctggtattcgtttctttctaacagtgtaaccagggtgagaaaagcacaagagtaacatggctccagggagctacagtgtgctgcgtgcatgtaggcaatgtgtgtgtgtgtgcgtgcgcgcacgcacctttagcataaaagcaggttgcagagaaaggggatttgggctctgtattccaaaaggtatctcataatagaaaagccagaagtcaaagacacggcgggaaaaaaagaggggatgcattacacatactgagatgccttcgcaggcaaattaataaaatgcaaatgcaacagcatctggtcagacggactccttgtgtctttaagtttcagcagcttcaaggccacctcatcccacaacatcttctgaaaccatctctcatcactctcttcctgtacattcccctgacacactggcttccttgagcaccttgaacatctgaaagaagcacattctgtgaagtcttccactgagccttccttccccttgcacagactccagcaagggacatgatgactctcgccctgtcttcattctgctctctgttcagtttttagcttgtctgctgatcttgtctgtacacctattaaaagtaacactttttatcctttttattcataggactaatcaccaactgacatagtatatatgtatttgttcccgttatttgattgtagggactctgttttatagcaccattgactcattatctatacagtaccctgaacatcaactcattttttattccacaaatgcatgaatgatttttctctttaatgatactgtagaatacatgccctcagggaaaggctgagagagagagagagagagagcgagagagcgtggtctaggaattcctaatcagagatggcaaggagatcttctaacagggaccagatttacacacaaaacatagaaaacagcttcttgtagaatggagattactagaggccagggcaattggtatggaggcttgaggtgatgtcagtcaagggatacaagatgataattagatagaaggaataacttcaaaatatttattttacagcatggtgaatatagttcatgatgatatattgaattattggaaaatgccaagaaaatggatgttaagtgttctcgccacaagaatgatgactatatgaggtaatactaatgttaattggctagatttagccaatccacaatgtaaatatacttccacatgtgatgttatacatgataaatgcataccattttatctgtcaccatagaaataaataatttttaaaggaaaaataagttcttgactccggagtataaatgagagaatttctgataggtttgtaatgcataattacattgtcatattctctctctttttggtagtcacattgaaaagatgcaaccaagcctgggcacaatggcttatgcctataatctcagcacttttgtaggctgaagtgggaggatcgcatgagtccaggaggttcagaccagcgttggcaacagagtgagagaccctgtctatgttaataaataaataaataaataaataaataaataaataaatagaaaaaaaaagatggaaccagagaatgacacagggatttcagaatttgttcttctgggactttctgaggaaccagaattgcagcccttcctctttgggctgtttctgtccatgtacctggtcactgtgctcgggaatctgctcatcatcctggccacaatctcagactcccacctccacacccccatgtacttcttcctctccaacctgtcctttgcagacatctgtttcatctccactacaatcccaaagatgctcattaacatccagacacagagcagagtcatcacctatgcaggctgcatcacccagatgtgcttttttgtactttttggagggttagacagcttactcctggctgtgatggcctatgatcggtttgtggccatctgtcatcctctgcactacacagtcatcatgaaccctcggctctgtggactcctggttctggcatcctggatgattgctgccctgaattccttgtcacaaagcttaatggtattgtggctgtccttctgcacagacttggaaatcccccactttttctgtgaacttaatcaggtcatccaccttgcctgttctgacacctttcttaatgacatggggatgtattttgcagcagggctgctggctggtggtccccttgtggggatcctttgctcttactctaagatagtttcctccatacgtgcaatctcatcagctcaggggaagtacaaggcattttccacctgtgcatcacacctctcagttgtctctttattttgttgtacgggcctaggtgtgtaccttacttctgctgcaacccacaactcacacacaagtgcaacagcctcagtgatgtacactgtggccacccccatgctgaacccctttatctacagtctgaggaataaagacataaagagggctctgaaaatgtccttcagaggaaagcaataaaagggccatttttcaagaaataactgtgatttcagagctttaagtctcatactcagaaattgtgattcac

SEQ ID NO: 7813 - DNA, 6000 bp, Homo sapiens
ggaagcagaggttttagtgagccgagagcatgccactgcactccagcctggacaatagagcaagactttgtttcaaaaaaaaaaaaaaaaagtggagtaagacacatgacaccagggagcagcacggtgggaggtggagtttgtatcactaagtaggatggtgggggcacgtcttagagagcagacggacttgagcaaagactggaaggacatgaaggagtgagctggcaacatggagatcaggtgaagggtgttccaggcaaagggaacagccagtgcaaaggccctgaggtaggatcgtgcctggtgtgttaggacgcagccccatcctgtaatgaatgacaggaaggtggtatgaagtgataccaaagaggagtgggcccaggtggctctgccagctatcctgaccttgcatctgctattcacaggcacagaccaccactgaatgtgcacctgctgtgcaggggacactatagaggcttcctgttgtcctctccacagtcctgagaggtagacagtgttaatgaaaatcatttacagattaaacaatgaaggctctgagcagttaatggccctaaaaggggactgtaagcagttggaatcttttatttttttttggagacagaatctcactgtgttgcccaactggagtgcagtggtgcgatctcggctcaccacaacctccgcctcccgggttcaagcaattctaatgcctcagagacaaggtttcgccatgttagccaggctggtctccaaccccctacctcaagtaacccacccacctcagcctcccaaagtgctgggattataggcgtgagccaccacacccggccgcagttggaatcctttatttttttagacggagtttcattcttgttgcccaggttggagtgcgatggcgtgatctctgttcaccgtaacctccacctcctggattcaagcgattctcctgcctcagcctccagagtagttgggattacaggcatgcaccaccacacccagctaattttttttgtatttttagtagagtaggggtttctccatgttggtcaggctggtctcaaactcctgacctcaggcgatccgccctcctcagcctcccaaagtgctgggattacaggcatgagccactgcacccggcctagaatcttttttttttttttgagatggagtctcgctctgtcacccaggctagagtgcagtggtgccatcttggctcactgcaagctctgcctcccaggttcacgtcattctcctgcctcagcctcccaagtagctgggactacaggcacccgccaccacacccggctaatttttttgtatttttagtagagacggggtttcaccgtgttagccaggatggtctcgatctcctgaccttgtgatccacccgcctcggcctcccaaagtgctgggattacaggctggagccactgcacccggccgcctggcgtagaatctttaacaaaggtcaccagtctggatccagagctcagctgtgaaccaggaagatagcagcacccgctgctccggattgctagaacagtccatgcccaaggcctgtgctgctggtatcttgctgcatctgccattcctgagagcaaggatctctcctgcagcagcccagagctgggaagcggctgctggtgaactgtgggtctctgagagctggaatgcctcataaagtgctcgggacagtgtctgatgtgtagacactgccaaccatttagctaaggatggaacagtaaagttggtaaggttgcagagagcagcccaggatagtagttcagaggcaccacctggtcctaatgtggagagggctgagccactccctgggctggccatttgctaaacaaggattttcccaccctcatggagcccacggtccagactcaatgaatgacactgctctatgctggaagggcaagcagtacacttattattatttttgagacggagtctcattctgtcacccagactggagtgcaggggcatgatctgagctcactgcaatctccacctcccaggtccaagcgattctcctgcctcagcctccctagtagctgggattacaggcatgcaccaccacgcccggctaaattttgtatttctagtagagacggagtttcaccatgttggccaggctggtcccgaactcctgacctcagataatccaccaacctcagcctcccaaagtgctgggattacaggcatgcaccaccatgcctggccaagcagtacacttataagggcatcgtctatccccaaacaccaaaactgcaaaggatgacaggtgcacagtcagtggtggtccatgccctgtgcataggaggagttcaatggtagtccacacccagtgcagagtaggtgcaaagtcaggggtggctggcagagccacctgggcccactcctctttggtctcacttcctaccacctttccctcattcattacagggtggggctgcgtcctaacataccaggcatgctcctacctcagggcctttgcactggctattccttttgcatgtccaggaacaagcccttggctctccaggaatctcaaagaactgggattttagtgttggggtctcattcttgggtttctccctgcagattccaactccacagagtgaccagagagaggacgtggctgaagacaccaaagatgggggaggggaaggtgagtatgttagagagaggctcaggagttctgggggtgccctggccccagggtggcttgctaaaagatgactcctggggggatatacagagaacttggaggtgctctgcactgaccacccaccccgtacacagtgtccagccaaggcccagaggactcactcctggggacacagtctcgtggccacttcagccgccagccagtgaagtatccccggggcggtgtgaggcctgtaacccaccagctgtccagtctggccctggtggcttccaagctgtgcgaggagacccccatcacatcagtgcccagagggagtttgcgggggcgggggcccagccctgcagctgcctcccctgagggcagccccctgcgccgcaccccgctgcccaagcattttgagattacccaggagacagcccggctactctcgaaattggacagcgaggctgtgcccagggccacctgctgcccggacgtccagcctgaggaagccgaggaccatctctgaccaccctggcaccttaaataaggaagaggcccagattgtgaagacggacccatatatccctacctcccaccacctagtggccaaacaccccgccaggagttcaatgctgggagaggtccagagggttcctataaggaaaaactatttaatacatgacctaggggaggcctaaaacccttttggggataatgtcccagagtccccccactagacacaggtcactgccaagcatcagggccactcgggctcagaggtcactcagggtcaatactcagggtcagtgcaggttatgagatccttggggtccaccctagtctctgacacctgggacaggggtgcttttgctactttggttgtggtcactcccccacacctgcctgcctccttcacggactcgaagtgaccttcctggaggaggtgggcagctcagactccacatgctggtggtgcctgaggtctgatggcctctaataaactgtgtcctatatgcccttgggtgcatctctgctaggggagaggccagcatgggtagcactccttgcccccattttacagattaggggaatcaaggcctcttttttttttttttttttttttttttttgagacggagttttgctctgtctccaggttggagtgcagtggcacgatctccgctcactgcaacctccacctcccgggttcaagcgattctcctgcctcagcctcccgagtagctgggactacaggcgcctgccaccatgcccggctaatttttttgtatttttagtagagacggggtttcagcatgttggccaggatggtctcgatctcctgatctcgtgatcgtcccgcatcggcctcccaaaatgcagggattacaggcgtgagccactgcgcccggcctcaaggcctccttcttgcatcatcaaacaccctgcagcacctacgtaaaggcagttggagctgggtcgcagcacccggctgagtcacgccagcccggccctcccggagctctgcgtccccgatccggtcctgcataatcaaatacagtataacaaagtaccgataaccgggacaatggggctgtgtgctccggaccgtgggagcccggggccgccgcagggaggccgagggaggaagccacagggcagggcagggcagggccgggctttgcagggggcagcgctgtcccagggtgaggggtacgggggcgggattgcaaaaccctagcgtgcgcccgatgatcagctggggccgcagaggtgggcctcgcacaggaggccgcggctcgctgatactgcgagctggcaaagccgaagctgggcgggggtccgggcggtgggagccaagtcggatcagggagtggcttgtaactcggcggccgattggacacgaagaagagagcggggtggggctgggagggttgggggtccggagcgggggcgcggacccaagaccacctggagctccgcccgggcagcgcggggtcacggcgggaattttcgggtcgccgagtgactcagccccgcaggctcgaaactgcgggcgcatgaggtgtgcaggtaccggggtgggggtcccgcgccggaaataggggcgactgaggggccgcgaggcggggaggaaacaggggggctgcggttccgggcgacaccgcccccgacgcggccgtggaggcggggctcccccaggtggcggggcggggcagggctcccccaggtggtgggggcggggcgccggggagaccccgcctcccgcgccctctcagcaacccgcacagggcgcacccggacgctctaccgctcccgccgcagtcgccgggccatgggcctcgagcccgccccgaacccccgcgagcccgccttgtctgcggcgtgactggaggcccaggtgaggcctgcacggacgggaggcgggcgggtgcgggcctgggcccgggggaagggcgcggcacgtgcctgcggggccaggacgccgccctctgatcccttaaccccctaccccttccccagtctggagacgcctggaggcccggccatccatcccttccccaaccgctgtctttgtcccggagaccgccagtgtcctccgtcccacccggaacagcctattgccccgcccgcttgggaagcactcgcgcccaaatcccgccgactaacttctggggccgcctctctgtccactccgatcacctccacgcctcggcaccgccccctcgcagggttctagcaagtgacctcacccttgtgtgcacacgctcccgggtctctgctccctacactgactccggcaccaaagtgatcctccctcatctcttcccgcagctcacacccctttgtctttccctaaccctcctctccccacaacccaaaccgggtcacacattggcggcaggtgggctgggattcgaccatagatgggttttgtttcacttctggttcaaaaacctattgacttgggtgatgtcttgcacacaggtcttattagtaggtaagaaacagctgctcctccacctccaccccagccccatggagcttgctttttccaggccaccgtagtcctcaccactgccactttgcttcgaggtatctgaatttgagacccttgtccttcctgcgctgaccctcctctgcagctgccgcccctccctgtgtccttccaagaagtgccacatgcactgatctcttgtgtccccagatggtcatcatgggccagtgctactacaacgagaccatcggcttcttctataacaacagtggcaaagagctcagctcccactggcggcccaaggatgtggtcgtggtggcactggggctgaccgtcagcgtgct

SEQ ID NO: 7814 - DNA, 6000 bp, Homo sapiens
ggtaacagactccctccctgtcccttctgccctaggctggcgatggcttcgtgcccacttcggatggtcccctggggccgccccatcctttgtggctttctccactctgcccatccctctataaactgcccataaatgctcccagttaaactcggagtggccacttgcttccctccaggaccctgatcgagtctcagcataaatttaggatgagccagagagagaaggggactctaagcccaccaatgagcattcagaatttatctttttattattattagtttttgagtcagtctcactgtgttgcccaggctggagtgcagtggcacaatcccagctcactgcaacctctgcctgccaggctcaagcgattctcatgtcttagcctctcgagtagctagggctgcaggtgtgcgctaccatgcccagctaatttttgtatttttagtagagatggggttttgccatgttggccaggctggtcttgaactcctggcctcaagcaatccacctgcctcggcctcccaaagggctgggattacaggcgtgagccactgtgcccggcctgaaggaaaaaaacatttattcctggcctggcgtggtggctcacgcctgtaatcccagccctttgggaggccgaggagagcggattacgaggtcaggagatctagaacacagtgaaaccctgtctctactaaaaaatacaaaaaattagctgggcgcggtggcgggcgcctgtagtcccagctactcgggaggctgaggcaggagaatggcgtgaacctgggaggcggagcttgcagtgagccaagatcgcaccattgcactccagccagggcgacagagcgagactctgtctcaaaaaaaaaaaaaaaaaaaaaaaaaaacatttattcctatgagtgttgttggtctcttgagtcttcgttaacctgctcactttggctgggtttggtggctctggtaatctcagtgctttgggaggctgaggcgggaggattgcttgagccccagaggtagaggctgcagtgagttatgatggagccactgtactccagcctggacaaaagagtgagaccccatctcttaaaagaaaaatccctgagaggaagggggtaatgtggttcacagaggtaaagtcacctgtccaaagccacacaagattataagaatagctatgtttttgtttgttttattaattaattaatttatttatttttgagacagagtttcgctcttgttgcccagactagagtgcaatggcacgatcttgggtcactgcaacctccacctcctgggttcaagtgattcttctgcctcagcctcccgagtagctgtgtttacaggcatgtgtcaccacgcccggctaattttgtatttttagtagagacagggtttcttcatgttggtcaggctagtcttgaactcttgacctcaggtgatccgcctgccttggcctcccaaagtgttgggattacaggcatgatccagtgcacctgcactatttatttattttttgagatggagtcttgctctgtcgcccaggctagagtgcaatggcgcaatctcggctcactgcaacctccacctcctgggttcaagcaattatcctgcctcagccttccgagtagctgggattacagacatccaccatcacacccaactaatttttgtatttttagtagagacgggatttcgccatgttggccagtctggtcttgaactcctcacctcaagtgatctgcccacctcagcctcccaaagtgctgggattacaggtgtgagacaccgcacctggccgatatcctgagtcttgatttgggtgtttaattacatggtgtatccaattttcaggattccttatattcttcccttaagatctgaacattttaatcaaattttttgagactaattgttaattaaatgtaatttttaattacatttattttttaatcacggctaatttttattttttatttttttttgtagagatgggggtctcacttttttgtccaggctggtctcaaactcctgggctcgagtgatcctcccgcctcagcctcccaaagtgctgggattacaggcatgagccacagagcttaggtgccctttcttccccctctgtttcccaggctgtagtgcagtggtgcgatcttggcgcactgcaacctccgcctcctgggttcaggtgatcctcccaccttggcctgcgcagtagctgggaccacaggcacgcaccacccagctggctagttaaaagaaattttttttttgtagagacagagtcttgctatgttgcccaggttgatctcaaactcctggcttcaattgatcaacctgccttggcctcctaaagtgatgggattacaggcatgaaccaccatgcctggcctacattttaatttaatttaaaaataaacacaaaagagctgggcgcgatggctgatgcctataatcccagcactttgggagacctaggcaggctgatcacctgaggtcaggagttcgagaccagcctggccaacatggtgaaaacctgtctctactaaaaacacaaaaagtagccgggtgtggtggtgttcacctgtagtcccagctactcgggaggctgaggcaggataatcacttgaacctgggaggtggaggttgcagttaactgagatggcacaatggcactccagcctgggggacagagcaagactctgtctcaaaaaaacaaaaaacaagccaggtgccgtggctcatgcctgtaatcccagcactttgggaggccgtggcaggcagatgacctgaggtcaggagttcgagaccagcctggccaacatggtgaaaccctgtctctactaaaaacaaaaaaattagctgggtgtggtggtgcatgcctgtatacccagctaccagaggctgagacaggagaattgcttgtacccggcaggaggaggttgtattgagctgagatcatgtccctgcactccagcctgggcacagcaagactctgtctcaaaaaaaaaaaaaaaaatcaaacctgacagctatcattttttagtgttatatgccacatctatctgaagtcccttgaccaataatgaattctcatgattagtttatgaaagatgtgatgttaataataaaaataagctaatgttttaggagcacttatcattcatttgttcactccctgaaaacaatgttttttgttttttgttttgagatggagtcttgctctgtcacccaggctggagtgcagtggcgcggtcttggctcactgcaagctccgcctcccgggttcatgccgttctcctgcctcagcctcctgattagctgggacaacaggcgcccaccatcacatctggctaatttttttgtatttttagtagagatggggtttcactgtgttagccaggatggtctccatctcctgacctcgtgatccgcctgcctcagcctcccaaagtgctgggattacaggcgtgagccaccacgctcggccagaaaacaatgtgtttcacacctatcacctgcccagcagtcttctaggcaacagacatgcaacagtaaacaagccagacacaaaaatgacactcttcctagtaggaaggcagacaactagaaaaaaataagagaatgttgccttccccaaagggtaggggaaaagtgaggcagagaaagatggggagtgttggggtctggttggcatattttacagacttgatagcattgacaccattaaatgagaccgccaggagaaaaggaccatgatggccggcctcggtggctcaggcttataatcccagcactttgggaggccaaagcagaaggatggcttgagcccaggagtttgagaccagcctagacaacatagtgagacccctgtctatagaaaaaaaaaattttttaaattggccaggtgtggtggcacacgcctgtagtcccagcaactcaggaggctgaggtgggaggatcacttgagcctggaaggttgaggccgcagggagccatgatcgtgccactgaactccagactgggcaagagagtgaaaacctgtctcaaaaaaagaaaaaaggtggggcacggtggctcacgcctgtaatcccaacactttttggaggccgaggtgggcagatagctggagcttaggagttcgagaccagcctggccaacttggtgaaaccccgtctctattaaaaatacaaaaattagccgggcgtggtggtgtgtgcctgtaatcccagctactcgggaggctgaggcaggagaatcgcttgaacctggaaggcagagattgcagtgagccaagattgtgccactgcactccagtctgggcaacagagcatgactctgtctcgaaagaaaagaaagaaaaaagcaaagcaaagcaaagcaaagaaaagaaggaagcaagcaggcaccatgagtgaccaccttgattcaaagaggaaactgaggcacggagatgtcactagcctaaggtctgaccaagagtcaggctggaaatgcaaccccagagctccttctaggggtggccctgactttggagttggggacctaacagaaccctttattctctccgttgttggggaggaagatgcagaaggttaatgaccagaggatgaatgactgaagcctggggtctctaagggaggaaatggcttaacccagggaaggtcagtagcgggggcctcctcttcccatagccgaggacctgataaatttgggggtgtgtggttggagagaggggaccttccagctggggacttggaaggattcgggggtgttccagtagcagatgagcctcacccgtggctggaggcgtttaatggggtgaagcctgaaaggggttaaggggcagcggcaaaggtggggttaatgggggcgggcctggccggggcggggcctcggctggcggctctggcccgggggccgggaggagtagccgctgttctgccccgcgggggcatccgctgggtccccgcgccgttgtcaagaccggggacctggacgcagcggagagaggtgccgccgcccgccccgtccagtcgccgcgcgcaggtaagtgccgggtcctccccggctgcccgcgatgctgcggggtctcactaggttgccctgctcgtggcgagaccgctcctccccgccccctcgggggctgcctcagtctcccgcgccgtctcggtgcccgccccctctgttgctctccctggctttgcgtctgtctccaactcccgcctgatgtctctgtgtctgtggtccctctgcctctggacgtgtctttccttctgtgtctctggatgtctctgtctttttcttgatctctgcctctctgtctccgtctgtctgtctctgtctctctgtttctgggtcccacctccctctgcccctgcctctgcctcacccccgtctgttgtgggacctctgcggatgtctctgactctatctccatctctccctgtctctgtgtatctctttgctctctcccttcctgtctcttcatctctattgccctgtctctttctctccgtctcttataacactgttttggcaccttcagctctgtcttctctccttccaaatcctccgcatcccggaactttcctctgggctgggaacctgcttgggagtggggtagggggcaggaggcttgtgacctggggcaggcggactctaagtgacaccatgatcccagcgcccccttcacggagccaccccactgcccctcaggtcgcacccagcccgcccgccaatttcaggaattcctgcctggggggtggacttcctcccctacttcctctcttccaggatttggctgggtcaccattaactctttcctgcttccgcctcactctcccccctggaactggacaacccctcctcccaaactaggctgaggaatagctctaggatatctgtgaggcatcggttgtgggatgtgtgtgtgtgcgtactcaggctggatatgcattggggaatttgtttggcgcagaagtggagaggatggggcca

SEQ ID NO: 7815 - DNA, 6000 bp, Homo sapiens
ccacattcataattcataattgctgtataaccacccaaatcatagcatgtaaaacaaccatttcattacgttcatggattatgtgggttgggaattaggataaggcacagagatgcttgtctctgccacccaaaactcaaaggtctggggggtgactagaagactgtgaattggagtcatctagagctccttcattcacatgtcagatgcctgggttggaatgactcaaatgctgaactaggctggtattgcaccaagtgcctacaggcagcctttccagcatggtggtctcagaggaatcaaagtcccaggacaatggctgccttcctccagaacacgtgtcccaggagaaccagaagatgcttcctagccttttttgacctagccttgaaagctacgtggaagtcatttctaccacgttctttggtcaaagtagtcccaaccctacccaggttccaggggagaggcgatacaatatgcctgccttcctgtcagtggaaggagtgtccaagaatattgtggccattttcttcagaactgttgcaccaaggtaactgcgtggatttgggggctgtcattgagacgagagtcaatgaaaagaagcagagtgtttagtttgttagagctgccataacaaaataccattggctgggtggctacaacaatagaaatatattttctcacagttttatcagctggaagtttaagatcaaggtgtcagcagggttgattcctcctgagtcctctctccttggcttgcagataccgcctcctcctcatgttttcacacagttttccctctatgcctgtctgtgtctggatctcctcttttcataaggatatcagtcatattgagttggggcccaccctaatgacctcagtttcagctaattacctctttaaaggttgtatccccaaatacagtcacattctgacatgctggggtgtattggtcaattctcatgctgctaataatgacatacccaagactgggtaatttataaagggaagaggtttaatggactcacagttccatgtggctggggaggcctcgcaatcattgcggaaggcgaaggaagaacaaagggacatcttacatggcagcaggcaaaagagaatgagaaccaagtgaaaggggaaacccctcataaaatcgtcagatctcgtgagacatattcactaccatgagaacattatgggggaaatcgtccccatgaaacaactatctcccacctggttcctcccacaacacgtgggaattatgggagctacaattcaagatgagatcagggttgggacacagccaaaccatatcatggggtgagggcttcaacctaagaatttgaaggggaatgtgacacaatttagtccttaacagagttgtgggagaaggtgaggagagcaaaggctgcagatgagtttgaaaggaaacaggaacccaaaatgatgtgtctgaacatcaagggcaggtctgagctagagacaggggtctggtgaatgttagctgaggtgtggttcaagttttaagcatggatgggttcaccgcagagaacgtgaaacagcagatagagaggtttatgtaattactaagatattgataatacttattgcactggaattcatgccaagtgctttgtatcactgatcttatttgttctgctccagaaaacacctctgtaagtatcattgctctcaattcacaggtgaagtgtctgggacccagtgcagttaaatcaggggtcaaatctagccaccgcttgtttttgtatggcctgagagccaagaatggctttaatatttcttaccggctaaagaaaatcaaatgaagggtattttgtgccatgcaaaacttatatgaagtccaattgtcgtgttttaaataaagttttattgacatacagtcatgctcctcatttacaactttgcttgtggctgttttcaggctacaacagcagagccaaggagttgtgatggagaccctatggcctgccaaatgaaatatattgaccatctggctcttcataggaaatgtttgtggcccagtgcagtggttccgtcctgtaatcccagcactttgggaggccaaggcaagtgattgtttgaggtcaggagttcaagaccagcctggtcaacgtggcaaaaccatatctctacttaaaaaatacaaaaattagccaggcgtggtggcgggcacctgtaatcccagctactggagaggctgaggcaggggaatcacttgaacctaggaggcaaaactgcagtgagccaagatcacaccaccgtactccagcctgggtgacacagtgagactctgtctcaaaaaaaaaaagttgggggaaatgtttgagacccctggattagctggcttgtccggagctagtgaacagtagtcctgggattctagtccaggcaatctggctttaccacctcagtccagtgctttactgggaggctgtgctgctcgccgaggccatttctcatgtttcagttaccagaagagtcagggacttttgcagcataggcaggaatactcccattccggtcaaccctaagacatcttcccttttagccttacgcaaacacagaagtggaagtccattttaagactttcgcttttttcttcaccatagtcactttggaacacacacttggctctatttttgcccaacctagtgtgctaatcacaggccatttggtagccaggaagaaaacctacttatgttttagaaaagagggctcatgggaaacaggtaggggtgtcccaggacccccgttttaggaagaacagtcagacttcaaaagacctacaaatttttctggcaattactctctgtggagtcccttgtctcttgttttctcttgacatttgggcccttctcctctgtgcataatgatgtcctctgccattccctttattttaatccccttacaaagtgttggcttccatgtgactcctaggcacgtcttcatttgttacccttcataccttgggaatcttctaaaatgcatctgttgttatgatcccaagaaaatgtttataaaatacaaacacaaatgtttataaagtacaaatgaacatatcacccttctgattaaagatcttcagtgattctccatctcatccccatcctcctggtgtgggatgctggagtgtagcagtccccaacatttttggcaccagggaccagtttcataaaaaacaatttctccatggggtggcggggtagatggtttcaggatgatttaagcacattgcatttattgtagactttatttctattattattattacattgtaatacacaatgaaataattatacaactcacaatgatgtagaatccgtgggagccctgagcttgctttcccgcaactagacagtcccatctgggagtgatgggagacagtgacagatcatcaggcattagattctcataaggagcacacaacccagatccctggcatgcacagttcacagtagggttcacactgttatgagaatctaatgccgccactaatctgacaggaggcagagctcaggcagtaatgccagcaatggggagtggctataaatacagatgaagcttctcttgctcacctgccagtcacctgctgtgcagcccacttcctaacaggccacagaccggtatcggtctgtgtattggtctatggcctggaggttggggacccctgctgtaatgtgaagtcaggagctgtggtagctttcttggagccatgaagtggcaatccccaggaaaaaaagtcaccatattagggataaaaaagagaaaagattaaaatgaatgtagttcttgatgatattttccagatataacctaacctagtattaccctcttgcaaaattcttgtaaagtaaaccataaatttcgtcttggttctaagctaagcttgtccagcccatggcctaagatggctttgaatgcagcccaacacaaattcataaactttcttaaaacattatcagatttttgggggatttttttttttttttttttttttagctcatcaggtatcgttagtgttagtgtattttatgtgtggcccaagacaattcttcttcttccagtgtggcccagggaaggcaaaagattggacaccccttgttgaagccattgttaggtgtaattgtaaattataaattacttagaattaaaaacagcccggctcatgcctgtaatcccagcatttggggaggctgaggcaggaggatcactaaacccaggggtctgagacatgcctgggcaacgtagcaggatactgtctctaaaagaaaagaaaaaacagtcttaatgcaacaatgccttggtaataatgcttttagaatcagtgtcgttatctctgattctgtaactgtcttaccatatttctccatatcactctgatacccttggaaggatgcttaacatttcagaaaaacggttatttctttgggctagaagactacaaatgagcttccacaagatcagaggattatggggttaatcttggtggtgtgcatgggtgtggacgcgctgtcctgccaactgtctcaacttcccccactcccttacctctctctgtgtttctggtctccatccctcatgacttcttctcttcctttcattgcctccctctgattcttctcaccacagtgcttgctgctttctttaccttgacccttggagggagcaggggcccggacacttggatttcttggcccttgttgttgagagcactgaacctctgcatcccacagagactgaggctgagaaatacagtcaggtacatgagtttctaaacaggcccagcccactgtcctaatgccattaaagcagacagtatattggtgtattcttggggccatcaaaaatcagaagaagctcagacttcctatttcctgctacccagctggttttagttcctttacccctcctcctgttccttggtgtatgttttgctgcaatcattagagcctgagtcactctccccaggagacccagacctagaactacccagagcaagaccacagctggtgaacagtccaggtaagaaacatattctgggggactgggtagcttgacatagacacacttaatacactggtgaacacaatagactctttgtttgaagaaggatgtggagttgaagaataatttttttaaagaggttctaaacaggccgggcacggtgactcatgcttgtaatcccagcactttgggaggccaaggcaggtggataacttgaggtcaggagttcgagaccagcctggccaacatgttgaaacctcacttctattaaaaatacaaaaattagccaggcgtggtggtgggcgtctgtaattcaagctacttgggaggctgaggcaggagaattgcttgaatctgggaggtggaggttgcagtgagctcagattgcaccactgtactccagcctaggtgacagagtgagactccatctcaaataaataagtaaataaataaataaacaaataggctctagactttattggggtcctgatgggaatgatggaatatagagacactatgaggctgcaggagagagaagggataagtgaaggagggaagttcttgagtaaatgggggaatgagttttatgggaccagtagagggtaattcttggatggaaacacttgttttctggttacagagatgagggcagagaacagtgatgcaggagccagcaggaggagaatctggtggagcaagaggcaagggcatcagcttgagggcttgagtcgggatgggaaaggatgtttggtttgaagctttcaggagaaagcaaaagagccctaacgactttatgatgggtcatggggaaatgagtgtaatacagaagcagtcacctttcggatcagtgatgagtctccacgtgaagacactggttctgcatggtgcataggacccagtagcggaatacagccctgccctctcatgaatctgcagacattggctgtcatttctcatcaagctcctagtttcctc

SEQ ID NO: 7816 - DNA, 6000 bp, Homo sapiens
ttatcaatgctttgtagttttccttgatgtctttcccctcttgattaaatatttctcagtgttctattttattttattttgctttttatagctattgcaaatggaattgccttcttgatttctgttttggctatttcattattggtgtaccgcaatgctactgatttttgtatattgattttgtgtcttacaactatattaaatttgttccccagttctaagagtttataagatcatattacaacaaagaaaaacaattttactttatattttctcacccgaatatcttttatttagttagctaggtatttttcttgcctgatttctctggctaggacctctagtactatactgaataggagtggcaaaaataggtatcttatacatgacattcagaaatgtgcacacattatagtggtatgcttcaatacatttttcttgtaggtcaacacatctctgaaggcaggacacattcaaagaaagtccaaaaagaccaacaccacatggtcatggtctcacttgtatgcagaatttaggcaagttgagtttataaaagtagagagtagaatggtggttaccagaggctaaagagatagagggcaaactgaaaaacgggaggtttttgtgaaagcatacgaagtttcagttagacacaaggaatgtgttctagtgatctgttgcacggcgtggtgactattgttaatgtctattccaaaattgccaaaagagtagattttaaatgttctcatcagaaagaaatgataagtatgtgaggagatgtgtattaaaacataatgacggacaaggttttataatgccttatttttgccttacatattcctgagcatttttactgaccattttattaacaataattttaatttaattttagactcacaagcagtttaaaaaataactcagagagcctctacacatggcccagtttccacccatggttacatttggcaattacagtataatatcacaatgatgatattgattttgatatattcactatcatcttttttttttttttttgagatggagtctcactctgtcgcccaggctggagtgcagtggcgcgatctcggctcactgcaagctccacctcctgggttcatgccattctcctgcctcagcctcccgagtagctgggactacaggtgcccgccacaatgtccggctaattttttgtatttttagtagagacggggtttcaccgtgttagccaggatggtctctatctcctgacctcgtgatccgcctgcatcggcctcccaaagtgctgagattacaggcatgagccaccacacccggccctcactatcatcttaatattttcctaattttacttatactgatttgaggagagtctcttgctacaaatgtgttggacttgctgcttgtgtctgtataggacaaagactatggagccactgacccacaccaagaagccaaaactcaaaaagtcaggagaaaagtatataattgtatataaggtgccaaatatttcttgcattgcccaggagcagactccataattgtttttcacactaaggtttttgctgttcagtgggctgttattaaaacgtcaagaaacaacagatgctggcaaggtggtggagaaataggaatgcttttccactgttggtgggaaggtaaattagttcaaccattgtggaagacagtgtagcaattcctcaaagacctaaaaccagaaataccatttgacccagcaatcccattactgtgtatatatccaaaggaatataaatcattctattattatcattctgttataaggatacatgcatgtatatgttcattgcagcactattcacaatagcaaagaaatggaatcaacccaaatgcccatcagtgataaagaaaatgtggtacatatacaccatggaatactatgcagccataaaaagaatgagatcacgtcctttgcagggatatggatggagctggaagccattatcctcagaaaactaacacagaaacagaaaaccaaacaccaaatgttctcacttataagtgagagttgagcgatgagaacacatggagacagggaggggaacaacacacactggaatatgtcaaaggggtcgggggatggagcacatcaggataaatagctaacgcatgctgagcttaatacctaggtgacgggttgataggtgcagcaaaccaccatggcacacgtttacctatgtaacaaacctacacatccggcacctgtatcctggaactttaaaaaattaaattaaattggcgcggtggctcacgcctgtaatcccagcactttgggaggccaaggtgggtggatcacgaggtcaggaattcgagaccagccgggccaacatggtgaaaccccatctctactaaaaatacaaaaaaaatttagccaggcgcagtggcaggcgcctgtaatcccagatactcaggaggctgaggcaggtgaatcgcttgaacgtgggaggtggagtttgcagtgagccgagatagcgccactgcactctagcctgggcaacagagtgagactctgtctcaaaaaaaaaaaaaaaagaaagcaaagaaagaaaaaaaaattaaattaaattaaaaaaaaaaaggaaaatctgtctgaaaattctcaccagttaccaacacttctttctgaggctaggaggagaaggaggtggtatgttaaagtcaataatcacactaactttatacatacaagaagctttcaaaatagtcatagtaaaaatggtactttataaggagaagctgaaaaaataggaaaccaaatgcatattggaaataaattatacaactaggacaatggagcaaaataagagattaaagcaaagaatcaggaactatcttgaaaataaatgatgagttcatataaataggaaaaacatttgtcaacaagtggtttgtgggaatctaaaaggttttcatacctcagagcctgagttttttttttttttttttgagaccgagtttcactcttgttgctcaggctggagtgcaatggcatgatctcggctcactgcaacctccgcctctggggttcaaacgattctcctgcctcagcctcccgagtagctgggattacaggcatgcgccaccacctctgactaatttttgtatttttagtagagacggggtttctccctgttggtcaggctggtctcgaactcccgacctcagctgatccaccagcctcggcctcccaaactgctgggattacaggcgtgagccacctctcgcctgagaatcttgatactgctgtgttattgattgctccacccctaaagagatgtagttattcatgggagaaaatacctcataattttccctgatgatagcaattccatagagacaccaaaagaatctaaattatggccgggcgaggtggctcatccctgtaatcccagcactttgggaggccgaggcgggcggatcacgaggtcaggagatcgagaccatcctggctaacacggtgcaaccccgtctctactaaacacacacacacacacacacacacacacacacacactagccgggcgtggtggtgggcgcctgtagtcccagctactcaggaggctgaggcaggagaatggcgtgaacccaggaggcttcagcctcccgagtagctgggactacaggcacgcaccacaacacccagctaatttttgtatttttagtagagacggggtttcaccatgttggccaggatggtctccatctcctgaccttgtaatccacccgcctcagcctcccaaagtgctgagattacaagcgtgagccaccgtgcctggccgcagttactatttcttttgtgattgatatatatgaatattgtgcaatgaaattccctcccaattgaattatctttccctaaaaataaacccaagctttctggaacatattgaatttcctatttaacaagttttaaggatatcttaggtgtttctgggattagtatttattttcaggatcttttgcatttacttgtgagaaatggcattgagataaaaatgtgtgggctcaaggtggtcatggttatttctacggagtcaattcacaatctctagacctgtccggtggaaaataacagaaatatatgtgcttaaaataaaatataccatgatgcaatgttgattgttccaaaaattatagtttttaaaaattcttcaagttagcatttgtactgtgctgaaggccttgttaccaattgtattgtagcgtttttttaatttcttttttttttttttttgagacagagtctcgctctgtcgcccaggctggagggcaatggtttgatttcagctcactgcaacctctgcctcccaggttcaagcgattctcctgcctcagcctcccgagtagctgggactagcacgcgccgccatgcccggctaatttttgtattattagtattttgtattattagtagagacagggtttcaccatgttggccaggatggtctccatcttggcctcccgaagtgctggaattacaggtgtgagccactgcacccggcctaaaatttgtttcaatgcatcaataacaatggtgtttactaaaatattagtgtggaaaaggttttatggtgtattatttttgcttttcatatctccaggctacttaattgaaggttttattgaaataagtgtagactcacaagcagtcataagaaataatacagaaaaagccctgtccatattacccagggttccgtcatgattacattttgcaaactatagtataatatcactctaatgatattgactcttctgtgttctgtttttatatatttccctagttttgcttgtatttacttgttgcatgtgtgtaagccctgagttttataggtttgatttgtggatctgttgtgcggttgagccctcattcattcacctgcttctctgcagttggacacacaagcaattgcctttgcacgaacagggacaatcttaatttctgtttaagatgagaaaatatggttggagacacattaaaacttctgtctccactgatgacaagatacttctttctgcttttttattctactgattcttcagacctcaatgaaaatcaacatcccctagattttgatgaaatggcttttggaaaagtaaaatcagggattagcttcctcattcagactggagttgggatcctgggaaattcctttctcctttgtttttataacttaattttgttcactggacacaagctgagacccacggacttgattctcagccaactggccttggctaactccatggtccttttctttaaagggatacctcagacaatggcagcttttggattgaaatatttgctgaatgacactggatgtaagtttgtcttttattatcacagggtgggcacaagagtttccctcagcaccatctgccttctcaatggattccaagccattaagctcaaccccagtatatgcaggtggatggagatcaagattagatccccaaggtttattgacttctgttgtctcctctgctgggccccccatgtcttgatgaatgcatctgttcttctattagtgaatggcccactgaatagcaaaaacagtagtgcaaaaaacaattatggatactgttcttacaaagcatcaaagagatttagctcattacatgcagtcttatatttttcccctgattttatgagtttgggcttcatggtctgggccagtggctccatggtcttcttcctctacagacacaagcagcaagtccaacacaatcacagcaacagactctcctgcagaccttcccaggaagccagagccacacacaccatcatggtcctggtgagctccttttttgttttctattcagtccatagttttctgacaatttggacaactgtagttgcaaacccaggccagtggatagtgaccaactctgtgttggtcgcctcatgtttcccagcacgcagcccttttgtcctcatcatgagtgatactcatatctctc

SEQ ID NO: 7817 - DNA, 6000 bp, Homo sapiens
aatgtgtgtatctaattaacagcaatgactatctttaattttgatgtagttattttatatctgtatataagcacatacacatatatatgacctaggtttatttatcagtatttttatgctgataataagcatcactggaaattaattttcttatggaaattatgtggatccaatggataaaatatgagtttatataaattagtaaatgccaaaatcaaggaagaaacaatttttattttaattgtactttaagttagataaatggtaaggtcaacagcttgttacaacccttaagtattattttcaggctgattgtcaatatgttttgtacaatgttctcacttataggtgggaattgaacaatgagaacacatggacacaggaaggggaacatcacacaccggggcctgttgtggggtggggggaagggggagggatagcattaggagatataactagtgttaaatgacgagttaatgggtgcagcacacccacatggcacatgtatacatatgtaactaacctgcacattgtgcacatgtaccctagaacttaaagtataataaaaaaaatagactctagtactctgtattatgcaaaatttgtctatgttacacttttttaacaacacaatcctattgcccttgaaatcttcttcaaagcatttctcgagtcactcttaaaaagcatctacaacctaaaagtataggaagagatttatttcctggagaagagaccccattgagatcttaaaagcacatataatgtgcctgtgcttaacttaaggtgcttaggacaaagaaggcgattgacatctttcaggtaaaacctggtaagtttggtggtcaaggaacacaactgagacatcacttggatgtatttctatgactattttaagaaacataaattgtggtgactcactcagctcacttttaactactgcatggtaattaaagatgcaaaataaaataagttacaagaagtgaggttttttattggttaaagcaatttttctatattttctccgcaagttggtcataaaagttctaagcattcctctttttataaaatcgaagcattattacttactctcttgttaacctatctggattttaattttgtaactttattatatttgttttgctgtgattctttaaaaagcacctttagactcagtgagatagcaaaaatatccaaataggccaaaaaattgtggcaatgtcctctcactcaggaaaattctgtgtgttttctctaatggccaagggaaaacttgtgagactataaaagttagtctcagtacacaaagctcagactggctattcccagatctcttcaggtacatctagtccattcataaagggcttttaattaaccaagtggtttactaaaaaggacaattcactacatattattctcttacagtttttatgcctcattctgtgaaaattgctgtagtctcttccagttatgaagaaggtaggtggaaacaaagacaaaacacatatattagaagaatgaatgaaattgtagcattttattgacaatgagatggttctattagtaggaatctattctgcataattccattttgtgtttaccttctggaaaaatgaaaggattctgtatggttaacttaaatacttagagaaattaatatgaataatgttagcaagaataacccttgttataagtattatgctggcaacaattgtcgagtcctcctcctcactcttctgggctaatttgttcttttctccccatttaatagtccttttccccatctttccccaggtccggtgttttcttacccacctccttccctcctttttataataccagtgaaacttggtttggagcatttctttcacataaaggtacaaatcatactgctagagttgtgaggatttttagagcttttgaaagaataaactcattttaaaaacaggaaagctaaggcccagagatttttaaatgatattcccatgatcacactgtgaatttgtgccagaacccaaatgcctactcccatctcagtgagacttactataaggacataaggcatttatatatatatatattatatatactatatatttatatatattacatattatatatatataatatatattatataatatataatataaatataatataaattatataaatataatatatattttattatataatataatatatattatataatataatataatataaattatataaatataatatatatattattatataatataatatatattttattatataatatatattatatattatagaatataatatatattttattatataatatatattatatattatagaatataatatatattttattataaaatatatattatagaatataatatatattttattatataatatatattatagaatataatatatattatatttatatataacatatattattatataaaatatgtataatatatattatataaatatatttatatattatataaatatatatattatatataattctaatggttgaattccaagaataatctatggcatgaaagattttacctgtcaacagtggctggctcttcatggttgctacaatgagtgtgtaagattctgaagaactcctttaataagcctaaacttaatgttcaacttagaataaatacaattcttctaaatttttttgaataatttttaaaaagtcagaaatgagctttgaaagaattatggtggtgaaggatcccctcagcagcacaaattcaggagagagatgtcttaactacgttagcaagaaattccttttgctaaagaatagcattcctgaattcttactaacagccatgatagaaagtcttttgctacagatgagaaccctcgggtcaacctcatccttggcatatttcatgtgaagatataacttcaagattgtccttgcctatcaatgaaatgaattaattttatgtcaatgcatatttaaggtctattctaaattgcacactttgattcaaaagaaacagtccaaccaaccagtcaggacagaaattatctcacaataaaaatcctatcatttgtactgtcaatgattagtatgattatatttattacagtgctaagcagaagagaactgaagtgaatgttcatgatttattccactattagacttctctttattcttaaaaatatttaagatcactaaatttttataggactttaaaaacagtaatgtgctgctttgagtgtgtaggactaagaaatgggattcagagtagtaaagagaaaagtggaatttccaagcactatgaattactgttctttaaaaaacagcaaaaatcaaataacagtattcctccaaaaaagatggcaagtgtaaactctataccttcatgtctcccgtggaatgttagtgatcaatttccacttctctcttttacatcttacttgcccattaactcttatacctaatccaaagattgttaatatggctatgcctcactttcaggacaccttttatttgttacttctcttcactgcaaaacttcttgaaacagtacttattttctctcctccatacacaattgaaatggctctcaactcatgcccagaagtcagtgttcagtctctcacctggcagatagcaacttacaaagatgccccaacaatacctccttgtgtctagacagtcatcattatcctttacctttttctgtatttatttctgctcctaaaagggatctctatgtaaagtattgttatactagtgcttgttataattattatcagagttaaagccatcacaatgttcccaattacttaaagacattggaataacattttttttattttccacatcttgccaaaaaatattttgttatcagtaccttaataatggctattatatattgaccattactatttgctagaaaatttatatacctggtcgtatccaatcctcacagaacttctataaagttgtgctattatcacctatattttccagatgtggccgtaagactgaaatcacttaggtgacttgtctaaggtcattcagatacatagtagataacccaggatttgaacacaggcctcctagcacacaagctcatatcttaactactttaatacgttgctcgatgggatcttacaggtcttcattcacccctttcctgctcacacaaccacaacctgcagttattacctactgttaggcttaaaataattacttggcttcatttccaagctccctcccttccaattcacattgagtccagagctaaattaaacaatcattcaaaatttttcagtagttcttgtctctataataaaacagaaatgctttagaaagcattccaaaatctcttaccagttttatctcctatgaaagtccttcacactttctctcatttaaactttattgcattttcctcactttttctcacttcacttttgaattccctattcttttatcctctgttaatttttaagtattatatttgtgatattattttttctttttttctattttttatctttcatttcattttggcctatttttttctcttaagaactttaatatcaccaaataacatgtgtgctacaaactgttttgtagttcaaagaaaaaggagataaacatagagttatggcatagacttaatctggcagagagacaagcataaataatggtattttatattaggaataaacctaacattaatggagacactgagaagccgagataactgaattataaggcatagccagggaagtagtgcgagataaaattatgatcttgttgaattctgaatgtctttaagtaatagattatagaaagtcactgtaagagtgagcagaatgatataaaatgaggctttgaatttgaatataataattctgacttccttctccttctcttcttcaaggtaactgcagaggctatttcctggaatgaatcaacgagtgaaacgaataactctatggtgactgaattcatttttctgggtctctctgattctcagggactccagaccttcctatttatgttgttttttgtattctatggaggaatcgtgtttggaaaccttcttattgtcataacagtggtatctgactcccaccttcactctcccatgtacttcctgctagccaacctctcactcattgatctgtctctgtcttcagtcacagcccccaagatgattactgactttttcagccagcgcaaagtcatctctttcaagggctgccttgttcagatatttctccttcacttctttggtgggagtgagatggtgatcctcatagccatgggctttgacagatatatagcaatatgcaaacccctacactacactacaattatgtgtggcaacgcatgtgtcggcattatggctgtcgcatggggaattggctttctccattcggtgagccagttggcctttgccgtgcacttacccttctgtggtcccaatgaggtcgatagtttttattgtgaccttcctagggtaatcaaacttgcctgtacagatacctacaggctagatattatggtcattgctaacagtggtgtgctcactgtgtgttcttttgttcttctaatcatctcatacactatcatcctaatgaccatccagcatcgccctttagataagtcgtccaaagctctgtccactttgactgctcacattacagtagttcttttgttctttggaccatgtgtctttatttatgcctggccattccccatcaagtcattagataaattccttgctgtattttattctgtgatcacccctctcttgaacccaattatatacacactgaggaacaaagacatgaagacggcaataagacagctgagaaaatgggatgcacattctagtgtaaagttttagatcttatataactgtgagattaatctcagataatgacacaaaatatagtgaagttggtaagttatttagtaaagctcatgaa

SEQ ID NO: 7818 - DNA, 6000 bp, Homo sapiens
aaccaggggagtgggggggtggagcagggagtggggggacggacccaggagtgggggcgtggatcagggcagtgggggggcgcggacccgggagtggggggagtcggacccgggaagtgggggcgcggaccggagagtgggggcacggaccgaggagttggggggcggacccggagagtgagggggtggacccgggaatggaggcgcggaccagtgcagtgggggggcggaccggggagtggggcgcggaccggggattagggggcggaccggggagtagggggcggaacaggtaaatggggacgtggatccgggtcccctcccccagcgagcccccggagcgccaggagggtgtccccgctgagtaacaatgaagaccccccacccagcctgggggtccacagcgggcgagaagggaaggcaggacaggctgaagccccggaagatgagcaacgggagcgaggggaacgaagggaacgaggggagggaagggaaaggaggggaggggaggcggggagaggatctcaggggagggagcccagcccgcccccggcgcccgccgcgccccgcccgcccgcgctcacagcagccgccgcccgcccggggtgccctccgccgcctccgggccgcactcggggttctccagcgcgaccatggctcgcacgctgtcgccgccgccgccgcccggcagggccttcaccgggccgggcaggaagtgacgggcgcccggaggcgggcaggggcggggcctggggctgcgcggcggggcgggggcgcccacctcccggctgccgggaacgaacgcggaaacccaggcgcgcggggaggggatccagcccctggggggacgaacggggaaaccgaggcgcgcggggcggggatccagccaacagggaacgaacggggaaaccgaggcaggcggggccgggatccagccatcagggaacgaacggggaaaccgaggcaggcggggccgggatccagcccctggggggacgaacggggagactgaggcgggaggcggggccggccacgatccctacacccagaaatctagctccgggaaggagggacacctaggcgaggggtcgaaaactcaaccacaaccctgcgtcccgatccgggctgcggactgagccaggaatccagcccagggaggcgaggagacacggacagggaaactaaggcctgagcatcgacgagggaggggacgttcttcttggaggcagaggatggcggaaattaaaactgcccgagccttccttccacctgcccctcccagccctggagcctcggctaggcaaccccttcccctgcttagcctcagtttactcttctctaaaattaggcctggtggccaacgtggtggctcacgcctgtaatcccagcactttgggaagccaaggccagtggatcacttgagtccaggtgtctgagactagcttgggcaacatgatgaaaacccatctctaaaataaaaagaaagggccgggcgcggtggctcacacctgtaatcccagcactttgggaggccgaggtgggcggatcacgaggacaggagatcgagaccatcctggctaacacagtgaaaccccctctctactaaaaatacaaaaaattagccgggcgtggtggcgggggcctgtagtcccagctactcgggaggctgaggcaggagaatggcgtgaacccgggaggcggagcttgcagtgagccgagatcgtgccactgcactccagtctgggcgaggagcgagactccatctcaaaaaaataaaataaaataaaataaagcaagagggaggctgggcacggtggctcgcacctgtaataccagcactttgagaggccaaggccagtggatcacttgaggtcaggagtttgagaccagcctggccaacatggcaaaaccctatctctactaaaactacaaaaattagccgggcgtggtggtatgcacccatagtcccagctacatgggaggctgaggcacaagaatcgcttgaacatgggaggcaaaagttgcagggagccgtccacttcactccagcctgggccacagagtaagactactctgtctcaaaaaaaaaaaaaaaaaaaaaaaaaatagccaggcacagtggctcacgcctgtaatcccagcactctgggaggccgaggcgggtggatcatgaggtcaggagattgtgaccatcctggctaacacggtgaaaccccatctctaccaaaaatacaaaaaattagccgggcatggtggcaggcgcctgtagttcctgctactcaggaggctgaggcaggagaatggagtgaacccaggaggcagagcttgcagtgagccgagattgtgccattgcactccagcctgggcgacagagcgagatgctgtctcaaaaaaaaaaagcaagaaagaaagaaaaagaaagaaagagtaaggaggaaaaagaaaaggatgagaaactgtggatggactcaaaaaagcgtgcactgtgagattcctgtagataaatgtgcaaagaggtgaaaaaggacaatggagagatgtatcaggagtgactggcaggggagctgggcatcgggaatgagtggtttccccatccatcaggcacagggtaagggtagatgctcaaagaatggacctgaacatttattcgtgagagagggaggcaactccagagaacttcctgggccttcctcccattctgggttccagggcttcccttcaggggcctgggcctgtcctgtctgtaccttcttcttcttcttcttcttcttttttttttttgagagagtctcgctctgtcacccagcctacagtgatgcaatctcaggtcattgcaacctccacctcctgggctcaagtgattctcctgcctcagcctcccaagtagctgggattacaggcaccctccaccaagcccgggtaatttctgtatttttagtagagaccaggtttcaccacgttggccaggctggtctggaactcctgacctcaagtgatccacctgcctcggcctcccaatgtgctgggattacaggcatgagccactgtgcccggcctattcattttttttcctcccttttttgtctttttttatgcaaatggaagcacctttttcttcgctgtgtattactccatgatgaccaaatgtcttggactctgttgcaggatggactttgggggaacctcctggatgtcatcctggggtacacttccagctgtgggattatggagtcaaggttgtgctgaccaggctgggtggctcatgcttgtcatcccagcactttgggaggctgaggcaggaggactgcttgagctcaggagttcaagacaagcctgggcaacctagtgagatcttgtctctacaaaaaaatttaaggggggaggggggagggatagccttaggagatatacctaatgctaaatgacgagttaatgggtgcagcacaccagcatggcacatgtatacatatgtaactaacctgcacattgtgcacatgtaccctaaaacttaaagtataataataataaaataaaataataaataaaattaaaaaaaaaactttatttgcaaaaaaataaaaaataaaaaatttaaaaataaattagctggaccgggagcagtggctcacgcctgtaatcccagcacgttgggaggccgaggagggtggatcacctgaggtcaggagttcgagaccagcctggccaacgtggtgaaacctggtctctactaaaaatacaaaaattacccgggcatggtggcaggcacctgtaatcccagctactcgggaggctgaggcaggagaattgcttgaacccgggaggcggaggttgctttgagccgagatcatgccactgcactccagcctaggcaacagagcgacaccctgtctcaataatgataataaaaggccgggcgcggtggctgacgcctctaatccaccactttgggaggccgaggagggtggatcacgaggtcaggagatcaagaccatcctggctaacacggtgaaaccctgactctactaaaagtacaaaaaattagccgggcgaggtggcgggcgcctgtagtcccagctactagggaggctgaggcaggagaatggcgtgaaccagggaggcggagcttgcagtgagccgagatggagccactgcactccagcctgggcgacctgagcgaaactctgtctcaaaaaaataaataaatacataaatcagtaataataataataataatgaggctgtggcgtttgcaaggtgccctccacctggttcccgctgctagtgtccctgcgggtatcagacaccccttgtcagtcatgtgggacacattcagtcccaaaccaccagatcggggacgtccctcacctgccctgaactttccatggctctccagggtcctggggacaaacccaagctatcctcactcagggtctccgctgagggctggcctccccgccaggctgggcccaccccctggagccccagcccctacgagggtcaaagcccttcccatattcacaggccttagagttcgcgccttggctgggctcctagtccgggctgagcgtctactcgctggttaaggtcggtccttccaggtccacagcggcctccacgcggcccaccccctgcctgctccgccccctccagccccctcccgcgctctcactccgaccttgcaccgggaggagggaataggggggttgccgctgggtgaatagagggcgcgtgggcaggggagggagtggcgagcggctgccggagaggcgggaaggcaaggccaggggaggggggcacgggctataaacgctcggccgcagcggcgccggcagaggagccgccgagcccagcacagctgccctctggaccctgcggaccccagccgagccccttcctgagttccacaggcgcagcccccgggcggtcgggcggaggggtccccggggcggtgccagggcgcaatcctggagggcggccgggaggaggaggtgcgcgcggccatgcacaccgtggctacgtccggacccaacgcgtcctggggggcaccggccaacgcctccggctgcccgggctgtggcgccaacgcctcggacggcccagtcccttcgccgcgggccgtggacgcctggctcgtgccgctcttcttcgcggcgctgatgctgctgggcctggtggggaactcgctggtcatctacgtcatctgccgccacaagccgatgcggaccgtgaccaacttctacatcggtgagtgcgggcgctgcgccgcacctgctgccgtcccgggggctccgagggccgagcggcctggggcgccctctcgcgacgcatcggggccctctcggacccggctctgtcccctgcaggggtcccccccaacctcgaatcttttccctgtggtccctgcacctgaggctagaggtcgcaaactccagcgcgggcgggcccgggcgggccggagggtggggagtgtggcacatggaaacctcgacctggccactcgcggggctcgccccggtgcagcgcgggccaacggctcggtgtcagctgaacaaagggctgggggaggggctggcttggcccgcgggccttagtttgcgacccctgccccggtggctctctgagcctgtttatgcatttgtgtcctggggtcccctatcacacacagctgtgagcccagtcggtggctgctgggccggcaccattgtctccagtttgcagttgtggaaactgaggctcagagggtcaggggcctgcttaggctcccccagcccggacagggcccagcagaaccgatttctgccggaatggccaggaaatccgagccggaggcgtaatgtttgagatgtaagggggaattactagaaggcgccccaacttctccgcccgaggaggccaggggcgctgggggaggggggggcctccctgagccatcctgctggtcactcggaccaaggtgggggccaggggtcagggccaggagcgctgggcggttcccgcggc

SEQ ID NO: 7819 - DNA, 6000 bp, Homo sapiens
gtgcggaagtgcgcggtcaaggcccgagtggcgcgttgtcaataaagcacagctggctgagaaaaaaaaaaacaaaaaaaaaaacaccaaaacaaacaaacaaacaaaaaacacagccacaaagagccaatccacggtcaggagggagttgttccggtgatggaactacattctgtatcctgtttatagcagtaatttacacgaatctctacagctgttaaaactcatagaaaccaggccgggcgcggtggctcacgcctgtaatcccagcactttgggaggccgaggcgggcggatcacgacgtcaggagatcgagaccagtctggacaacatggtgaaaccccgtctctactaaaatacaaaaaaaattagcccggcgtggtggtgggcacctgtagtcccagctattcgggaggctgaggcagcagaatggcgtgaacccgggaggctcagcttgcagtgagccgagatcgtgccactgcactccagcctgggtgacagagacagactccgtctcaataaataaataaataaataaataaataaataaactcatagaaccatacaccaaagaaagtaaatacaatgctacataaatttagacaattaaaaacaagatctttttttgggggggacagacccttgctctgtcaacccaggctggagtgcagtgggtcaatcatagctcactgcagcctcaacctctctggcctaagcaatcctcccaccttagcctctggagtacctgggaccacaggcatgagccaccacccccggctaatttattttattttattttttagaaatggggtctcactgggaaggtggaggttgcagtgagctgagaccgagccattgcactccagcctgggcaacaataacaaaacaccgtctcaaaaaaaaaaaaaaaaaaaaaaaagaaagaaagaaagaaaaaagaaaaaaagagatagagtctcactatgttgcccaggctggtcttgaactcctggggtcaagcaatcctcccacttcagcctcccaaagtgctgagattataggcatgagccaacatgcccagctgaaatagatcttattagcaaaaaataccccccaaacccggaaataaatattaataccacagaagtcagaatgatagttactgctgggaaggtagagattactatgaggaaaacactaggggtctttgtggggctaaggtctttttttttttttttttgagacagagtcttgcttgtcacccaggctggagtgcagtggcacgatctcagctcactgcaacctccacctcccaggctcaagcaatactcctcccccggcctcccgagtagctgggattacaggtgtgcaccatcacacctggctaacttttctatttttagtagagacggggtttcaccatgttgtccaggctggtcttgaactcctgacctcaggtgatctgcccaccttggcctcccaaagtgctgggatgacaggcgtgagacaccgcgcccggcctgaaaatgtccttagtcttggcctcagtggattctgtggataccggcttcacaacaatttattaggtaatacattcaggttttatgtgttttctgaaagaaatattttctacacacacaagctcaccctggtgttcccagctgagctaataatacacgacaaatgctcagcatgtggcaaggaagtagctcagcccgtttagggaaccgcaagggaggtttgttcagcagctggagaagtgggcagagcctgggccctggatccagggagccggctcattaattctgaagccagcgggagccacagagggtctgccaccctggtccaggctgtgaagatggcgggtgctggtatcctgtccaaaaatgccgcagggagatgctaggagagtggccccctgggctcaccctgtggggcctgtggctcagcctcgtctcccagttttgctggtcatttctgtttcaaccatcctggaagatctgcacggccatgacctatttctgcgtttctttgcctgtcctgggtgggactgcccctcgttgctgctatccggttgggggcgggaaggtgggtggctgggtgggcagatggcacctgccagccccagtgaccagatgggggcccctatcgtacttcccatctgtcattcgttatgaatcaacagtggagaaaaccacacgtttgtgctgagctggtgaagctgcgtcaacggctgtcaccgagccctggtgtctgggaggaggtggggacggtggctgccaatggctgtgtggccctgggcacgtaattcgccctctctgtgccttgccctatctgtaaagggaccagaggcccccgaagtacaagaattacgtgtatctcttggggaggagagttttgatccagaactttctagaattttctacagcctgtcaatgggggtggggaatcttcacccaaacactctggctctgagtacctaggaagcagcaacgtttctaccaagctgccagccaccagcccacccctagggccctgaagtcccagagggatcaggtcagggcggcctcatggcactcattgggaagatctccttgaccagtgaggtccactcccaaagtccctcttacacccgatctgcctgtctgacttctgatcctgaatatcacttgtctgtgcgacctttgttgatccatttagagcaatgaccttgaaccttccccaacaacatctctgcttaatttttctggcagaatttttcaccatccaacgggctcaggtgtattaaaaaatatatatattttacacgtgtgtgtatatatatacacacatatatatttttatgtataatatacatatatgtatattaaaatgtatacttttatgtgtgtatatatgtatgtgtatatatgtatgtgtgtctatatattgtgtatatatatgtatgtgtatatatgtatgtgtatatacatatatgtatgtgtgtctatatattgtgtatatatatgtatgtgtatatatatgtatgtgtgtgtgtgtatatatatacatagagagagagggagagttttgttttgtttgtttctggagacagggtttcactatgttgcccaggctggagagcagtgttatgatctcggctcactgcagcctccatcttcggggttcaagtgattcccttgcctcagcctcccaagtagctgggactactggtgcgtgccaacatgcccaactaatttttgtattagtagagatggagtttctccatgttggccaggctggtctcaaactcctgacttcaagtgatcctcctgcctcggcctcccaaagtactttgattacagatgtgagctcccgcactcacctggccaaattttttattcttttattttttattttttttgagatggagtctcacttcgtcgccaggctggagtgcagtggcacgatctcagctcactgccacctctgcctcccgggttcaagcgattctcttgcctcagcctcccaagtaggtgggactacaggcgtgcaccaccacgcccggctaatttttgtatttttagtagagacggggtttcgccgtgttggccaggctggtctcgatttcttgactttgtgatctgcccgccttggcctcccaaagtatagggattacatgcgtgagccaccaggcccagcctaaaatttattttattatctgttctttaactagaaccttaggtaaggaggtctgggatctgtgtctcttggctaccgtgcctggcacacagttggcgctccatgaatgcacgcacaatgaagggatggccctgcctggaatctgcctggtaggcgtctagactctggggccccgcaggtgagggataggctcccggctctgccttgtgccagccccaccggtcactcccctgctctatgcctcaacctcctcatcagtcaaacagggatgacagtagtaactatacagggtgatgtgagtgtaaaaccagctaatgtgagccaaaacccggctaatttttgtatctttagtagagacagggtttcgccatgttggccaggctggtttcgaactcctgacctcaggcaagctgcccacctctgcagggtggatcacctgaggtcagggcagagtcgctggaaacagtccatgacacctggcctgagctgtttcttaaaaatatatcagaagggccgagcgtggtggtttatgcctgcaatcccagcactttgggaggccgaggcgggtggatcacctgaggtcaggagtttgagaccagcctggccaacgtggtggaaccctttctctactaaaaatccaaagttagcccggcgtggtggtggatgcctgtaatcccagctactcgagaggctgaggcaggagaattgcttgaacctgggaggcagatgttgcagagtcaagatcctgccactgcactccagcctgggcaataagagtgaaactctgtctcaaaaaaaaaaaaaaaaatatatatatatatatatatatatatatatatatatatatatatatatacacatatatatatatacacacacatatatatatgatatatatataatgtatcagcagtagcacgggtctgacggttcctgattggctccgaggagggggacagctccgggtgaagcctgaggagaatccgccccttctccagaaggaggaagaagggccctgctggtcacacaggacccagtctgcggtgggggttttcccgccaccgccccgccctccctggggcccccacctcaccctctcctggcacccttcaccgtcaacctgtcgggccgggtctgagcaggtctggaggtgggcggggagccctggcctccccacctcctcccgtccccaccctgttcccagcactcaagccttgccaccgccgagccgggcttcctgggtgtttcaggcaaggaagtctaggtccctggggggtgacccccaaggaaaaggcagcctccctgcgcacccggttgcccggagccctctccagggccggctgggctgggggttgccctggccagcaggggcccgggggcgatgccacccggtgccgactgaggccaccgcaccatggcccgctcgctgacctggcgctgctgcccctggtgcctgacggaggatgagaaggccgccgcccgggtggaccaggagatcaacaggatcctcttggagcagaagaagcaggaccgcggggagctgaagctgctgcttttgggtgagtccagggtcggtgggcggtgggtggtgggcagtgggcggtggccagccggcaggggtgtcggggcaaggaggcggatcaggctaggtcagacattggcatcgtggagccgtcgcctcctcccagggaatggggagcctggaacccattttccagatgagaaagactgaggttcagagaagccaagttccttgtccaacgtgcgaccagcggccaggtgcccaggcctgtccactgtgtggggcatatacaatagcagacgtggctctaccgggcccctgccgggcaggcccagcacgccctacctgtctgtgtcatggcgagggaatgatgagctcaggtgtgcaacccgttctggccagcccacccgtaagggaggggccggctccagcctctccttcaccaggacgctccctctcgcctttacctccctgccatggctggagagggcttgtctagggctcctttgggggctagaaaggatggattgattggttcattggttcattcattcattattcattcatttaagatttattgggtagctcccaggaacgaggcagccaaacaggggaagatatttctgtcttcctggatctcatttcctgtgaaggagccaagacatttagtctgtaaactcataagcagataaaataattctggcaacaagaattatctaggagaaaacaaaacagggtgatggcttccatgcggaggcttcagatgggggagtcgacgtcagtaacggttcaagattctgaactctggctgggtgca

SEQ ID NO: 7820 - DNA, 6000 bp, Homo sapiens
catgggacgcctgtgttctcatgggacgcctgtgccctcatgggacgcctgtgttctcatgggacgcctgtgcccctcatgggacacctgtgttctcatgggacgcctgtgccctcatgggacgcctgtgttctcatgggacgcctgtgcctctcatgggacacctgtgttctcatgggacgcctgtgccctcatgggacgcctgtgccctcatgggacacctgtgttctcatgggacgcctgcattctcatgggacgcctgtgccctcatgggacacctgtgttctcatgggacacctgtgttctcatgggatgcctgtgccctcatgggatgcctgtacccctcatgggacgcctgtgttctcatgggatgcctgtaccctcatgggacgcctgtacccctcatgggacatctgtgccctcatgggatgcctgtgcccctcatgggatgcctgtgccctcatgggacgcctgtgttctcatgggatgcctgtaccctcatgggacgcctgtgcccctcatgggatgcctgtgttctcatgggatgcccgtgccccgcatgggacgcctgaattctcatgggacacctgtgccctcatgggacacctgtgttctcatgggacgcctgtgttctcatgggacacctgtgccctcatgggacgcctgtgttctcatgggacgcctgtgccctcatgggacgcctgtgttctcatgggacgcctgtgccctcatgggacgcctgtgccctcatgggacgcctgtgttctcatgggacgcctgtgcccctcatgggacgcctgtgccctcatgggacgcctgtgttctcatgggacgcctgtgcccctcatgggacgcctgtgttctcatgggacgcctgtgccctcatgggacgcctgtgccctcatgggacgcctgtgccctcatgggacgcctgtgttctcatgggacgcctgtgccctcatgggacgcctgtgccctcatgggacgcctgtgttctcatgggacgcctgtgccctcatgggacgcctgtgccctcatgggacgcctgtgttctcatgggacgcctgtgttctcatgggacgcctgtgcccctcatgggacgcctgtgttctcatgggacgcctgtgccctcatgggacgcctgtgttctcatgggacgcctgtgcccctcatgggacgcctgtgttctcatgggacgcctgtgcccctcatgggacacctgtgccctcatgggacgcctgtgccctcatgggacgcctgtgttctcatgggacgcctgtgcccctcatgggacgcctgtgccctcatgggacgcctgtgttctcatgggacgcctgtgcccctcatgggacacctgtgttctcatgggacgcctgtgccctcatgggacgcctgtgttctcatgggacgcctgtgcccctcatgggacacctgtgttctcatgggacgcctgtgccctcatgggacgcctgtgttctcatgggacgcctgtgcccctcatgggacacctgtgttctcacgggacgcctgtgccctcatgggacgcctgtgttctcatgggacgcctgtgcccctcatgggacgcctgtgttctcatgggacgcctgtgcccctcatgggacacctgtgccctcatgggacgcctgtgccctcatgggacgcctgcgttctcatgggacgcctgcattctcatgggacgcctgtgccctcatgggacacctgtgttctcatgggacacctgtgttctcatgggatgcctgtgccctcatgggatgcctgtacccctcatgggacgcctgtgttctcatgggatgcctgtaccctcatgggacgcctgtacccctcatgggacatctgtgctctcatgggatgcctgtgcccctcatgggatgcctgtgccctcatgggacgcctgcattctcatgggacacctgtgccctcatgggatgcctgtaccctcatgggacgcctgtgcccctcatgggatgcctgtgttctcatgggatgcctgtgcccctcatgggacgcctgcattctcatgggacacctgtgccctcatgggatgcctgtacccttcatgggacgcctgtgtgtggttgccatgattactacctgagactgtcactacgacagttactattgttactacttgagaccatcattacaagactgaacgaagggacgaatgtagaaatgaaaacttaagacagaagaaactgttttaaaggaagggaccaggggaagaaaaagagagctccctgcttctagtgagcaaaggcagccccccaagcttctacagcccttcgtacttattgggtagaaagcagggggaggaaacgattggccagctgcttgattgttcacacgttcacgttattgctaacaggtttcagatttgcctacttgcaagaaacacttgtgcctggggcgtgactgccctcagcattccttctgggcggcagacgcagtttgtcagtttgccaacagcctgctttcatgagaacagtttgctgtttactcacgtagcctccagtggtatactgagttgatcacaaccctcattctttcggccttcaacacctgagccctcacgggacatctgtgcccctcatgggacacctgtgtcctcgcagtacacttgtgacccttccaggacaccttactggtagaattagtgtagctgcccccaccctgaggccaaggacaccattgtctcaggaaggctgaagaccacaggctcctggggggacagagggcaggtggggcccctcaggaccctccttggtggtaagtgggcctggcctgggggtgattgcaggcgggaggaggctcccagcagggacttatcctgggtcctactcacacttctggggcctgcattatttcccaaatcaccccacaccccaaggccttctggatggggacgagtggggggtcacagacactgggggagctggagagcagagacctcacactccatccgtgacagatgatgtccaagcccctacatgccccagaccccagggcaaggctgagcctccctcctcagaccccagggcaaggctgagcatccccactcagacctcagggtagggcctcgcctcctcccttggaccccaggacagggcctcacctctcccctcagaccccaaggcagggcctcgcctcccccctcagactcaggacagggccatgcctccccactcagaccccaaggcaaggccaaccctcacccctagaccccaggcaggttcaagcctccccgctcaaacctcagggcagggcatacctccctcctcagacccagggcagggtgtgtctcccctctcagaccacagcacagggcctcgcatccctcctcagaccccaggacaaggctgagcctctccgctcagaccccagggtaaggtcatgcctcccctctcagaacctagggcaaggccaaccctcccccctcagaccccaggcaggtccaagcttccccctcagacgccagggcagagcctgcctccctcctcagacgccagagcagggtgtgtctcccacttagacccacagccacctcacctcaggctgagtcaccgtgagccgttgtcagcagggccatggggatggggtgagcaagtccctacttttcctatgcacctcaatcccagtggggggctgccccagggggccagcagctctgctcccagcagggtgagctcaggggcaggagaggcaaccatgaatcccaaaatgggcgcctggccccgagaccctaccagcttgtccctgggggtctctctccctggacctgtgtgtcctcccatgggcagaaagttggcctcaggccgcctttgtgggcctcagttttcccttctgtaacgcatcaggctctctgggcctcagtttccccttctgcaacgcatcgggctctctgggcctcagtttccccttctgcaacgcatcgggctctctgggcctcagtttccccttctgcaacgcatcgggctctctgggcctcagtttccccttctgcaacgcctcgggctctctgggcctcagtttccccttctgcaacgcatcgggctctctgggcctcagtttccccttctgcaacgcctcgggctctctgggcctcagtttccccttctgcaacgcctcgggctctctgggcctcagtttccccttctgcaacgcatcgggctctctgggcctcagtttccccttctgcaacgcatcgggctctctgggcctcagtttccccttctgcaacgcatcgggctctctgggcctcagtttccccttctgcaacgcctcgggctctctgggcctcagtttccccttctgcaacgcctcgggctctctgggcctcagtttccccttctgcaacgcatcgggctctctgggcctcagtttccccttctgcaacgcatcgggctctctgggcctcagtttccccttctgcaacgcaccgggctctctgggcctcagtttcctcttctgtaacgcatcaggccctgtttcggggatcaagtcggatgagtcagtgctcaagggcatgcaggcacttgacatttattaggcacctgctgtgtgctgagcgccggtggagcatgtggggagacctcagtggagccgacgggtgcttcgggggtgatcagggctggtggggaggagtcgtccggctggaaaggggtggcccatcccgagtggggactcatttcccctccgtgactgacggctccggggctccctgcgggtctccggctttcgaggacaggaagaaggcagccagggcaggggtgggggtcctcacagccagggcagccccagcgcgttggctccaggagcccgggtgggggccgaccgttggggtgcccctccctgtcctcggccttacctccaccctggagggcaccttgaacataacaggaaatttcaaataacaggaaaccaagaccagcaaggcgggtggctccaccctgcgtcgggcctcagtcagcccccgggggaggccatgaacgccacggggaccccggtggcccccgagtcctgccaacagctggcggccggcgggcacagccggctcattgttctgcactacaaccactcgggccggctggccgggcgcggggggccggaggatggcggcctgggggccctgcgggggctgtcggtggccgccagctgcctggtggtgctggagaacttgctggtgctggcggccatcaccagccacatgcggtcgcgacgctgggtctactattgcctggtgaacatcacgctgagtgacctgctcacgggcgcggcctacctggccaacgtgctgctgtcgggggcccgcaccttccgtctggcgcccgcccagtggttcctacgggagggcctgctcttcaccgccctggccgcctccaccttcagcctgctcttcactgcaggggagcgctttgccaccatggtgcggccggtggccgagagcggggccaccaagaccagccgcgtctacggcttcatcggcctctgctggctgctggccgcgctgctggggatgctgcctttgctgggctggaactgcctgtgcgcctttgaccgctgctccagccttctgcccctctactccaagcgctacatcctcttctgcctggtgatcttcgccggcgtcctggccaccatcatgggcctctatggggccatcttccgcctggtgcaggccagcgggcagaaggccccacgcccagcggcccgccgcaaggcccgccgcctgctgaagacggtgctgatgatcctgctggccttcctggtgtgctggggcccactcttcgggctgctgctggccgacgtctttggctccaacctctgggcccaggagtacctgcggggcatggactggatcctggccctggccgtcctcaactcggcggtcaaccccatcatctactccttccgcagcagggaggtgtgcagagccgtgctcagcttcctctgctgcgggtgtctccggctgggcatgcgagg

SEQ ID NO: 7821 - DNA, 6000 bp, Homo sapiens
ttatggagctcatggcaggcactcacctgccgcatatgctgagcggtttccagcatccctacatgctcaaggatcctgtgggacagggctgatcattatccctattctcctgataagagactgaggctcagagaggtgaatcacctcctgtggtcactttggaaataccttacagagtcaggatttgaacccatggctgtctgagttcagttcctgtcactgcaataaccaacacttggaacgttgggtgccaggctctgttcttggtatgccatatatactcactcctctgatgcccacaccaggtccatgaggcagatcctactcttttttttttgagacagagtcttgctctgtcacccaggctggagtgcagtggcacaatctcagctcactgcaacctccacctcccgggttcaagtgattctcctgccttggacttccaagtagctgggattacaggcacgtgtcaccacgcccagctaattttttgtagttttagttgagacgggatttcaccatgttggccaggctggtctcgaacttctgacctcaagtgatccacccgcctcccaaagtgttgggattacaggcatgagccactgctcctgggtgagatcctattcttaatgcgcccattttacagatgagaatatttgaggcaagcagtggaggtgggatttgaacctctggcaatatgtttccagagttcatctccagtgcttccggaaaccacaatgcagctctgtttgtaccccttcctggtggaatttactgtattttcatgctgactcttaagttcagcctctccaggcagtgtcccttattttccccttaagaaaaaaaaaaagtgcaactggctgtcagcacttacttaattttacataaacaccctttttggggctgaagcaaatctgacttcttttcttttttttttcttttagaaaaacacactttattcatatttctttggggttttgttttgttgttgttgttgtttttgtttgttttttgagaccaagtcttgctgtgtcacccaggctggagtacagtggtgcgatctcagctcactgcaacgtctgcctcccaggctcaagctattctcctgcctcagcctcccaagtagctgggactacaggtacgtaccaccatgccgggctaatttttgtatttttagtagagacagagtttcatcatgttggccaggctggtcttgaactcctagcctcaggtgatccacccacctcggccttccaaagtgctgggattacaggtgtgagccaccgtgcccagccaaatctgactgattttcaatgtgaaaataaaatataaaaacagttcttggagttatttctaaccagaactaacatcagaatcgtcaattttggaaaaattggattcatcagataaattttcagccaacaactgtttgagaatgatagtaacatcatgcgtaggaatgctacacttttctaggatctgacattttcagcaatcaagaattactgtattttgtaaaatatactatagtatatagtaaaaaataccatattttgtaaaatatagtaatctggaaatatccctactaaaaacagaacactataaatagaatcatgtcttttgttttcaaagttgatacactagagcaatgcaaaaataataataaaggtgagatatttcacggcaaagttatctctgggtaaatgctgcagccacaagcgccaccagctagtattcttggggccaacggggaaagaatgaaggcacaaacagaaagccactgatgaatctggctagacgcggtgtctcaggcctgtaatcccaacactttgggaggccaaggtgggaggatcacctgaggtcgggagttccagaccagcctggccaacatggtgaaacctcgtctctactaaaaatacaaaagttagctgggcatggtaatacacgcctgtaatcccagaaactactcgggaggcggaggttgcagtaagccaagatcacgccactgcactccagcctgggtgacagagcgagagtccatctcagaaaaaaaaataaaataaaataaaaaaagaaagccattggtgaatctttgttccagtgacaataactccaaagctggtagtttgctttgcaaagaacaaaaggggaaggcaaaaacacgtggagcttttctttctaagaattcggggatgttctatgcacctcctttgtaccttgtgacagctgctatcagtggctgcccacacccataacctaacaacacattaatatgccctagcttaacgctgatacgggagctagaaagaagttatttaggcagagagtgagggcaagagagtcctcggtaaggtttgccttttaataaaaagcagcccccaaatcatttattttattttatttttttttttttgagacagagtcttgctctgtcgctcaggctggagtacagcggcacaatctcggctcactgcaagctccgcctcccggattcaagcaattctcctgcctcagcctcccgagtagctgggattacaggcgcatgccaccatgcccggctaatttttgtatttttagtggagacggggtttcaccatgttggtcaggctggtctcaaactcctgaccttgtgatccacccgcctcggcctcccaaagcgctggaattacaggcgtgagccaccgcgcccggccaaataatttcttttctaaaaaagagcagtctgaaaaatcagccggcagacatagaaaagcaagctggaagcttgctcgggtgaatgccggcagctgtgccaatgggaataggctacctgggtgccaggcgtgttcaacatgcaggcttgctccatgttcccttttctttatcaaccacgtgtacggtaaaggaacaggcaacatggtcctggccaggtagagaccccatctgcataataaaatattagggtgggcagccagcttctttgtactctatgtaaacggcacacctggtccaactaatctttgggcccttatgtaaatcagatatcaccacctaaagctcatctataaaaccccgtgcatttcaccatgaaactggaagacccacttgggagccccctctctttgcaggagagagagcttttctctttctctcgcctattaaatttcttttctttctttctttttttttttttttttgagatggagtcttgctctgtcacccaggctggagttcaatggcacaatctcggctcactgcaacctctgcttcccgggttcaagcgattctcttgcctcagcctcctgagtagctggaattacaggcatgagccaccacacctggctaatttttgtatttttagtagagatggggtttcactatgttgcccaggctggtctcaaactcctgatcttaggtgatccacccgtctcagcctcccaaagtgctgggattacaggcatgagccactgtgctcggcctaaacctctgctctaaaagtaattttttgtgtgtctgcattttattttattttattttattttattttattttattttattttattttattttaagacagagtcccactctgttgcctaggctggagtgcagtggcacgatctcggctcactgcagcctccgcctcctgggttcaagcaattctctgcctcagcctccggagtagctgggattacaggtgcctaacaccataccacactggctgattttttgtatttttagtaaagacggggtttccccatcttggccaggctggtcttgaactcctgacctcgtaatccaccctcctcagtctcccaaagtgctgagattacaggtgtgagccacggtgcccggccatgtctgtattttctatttccttggtgtgaggcaatgaacctcgggtattaccccagatggatgacactgcttcaatatctgccagtcactacactttgttatcagtgggattacatcaactggagcccattctatctgcttggaggccaggcctgaagattcaaggggttgacaccctctaggagcaagcctcaagtcaacccatgactgacagtaggtgggatataaatacctcagctccctcacccctcggttggaataactgaagagtatgttccatgccgctccccagtcatccctggggaggttaagttccactttctcaccatgtaacttatttgaagacacacccagtattggctctttgcctttcctgattcactttctcctcccccagctggtgctttctggggccaccttcttgataaactacttttgctagaatccttgtctgagggtctgcccttgtgagaccctaagatgttaccagagagagttaggaagctgggaatggggtggaagtgttgctgtataatcgtcagacagagttgagatctgaaggaaaataagatggttaaagctcttgactctggaatcagagggtcctgggttcaaatctcaagtctgagagatcttggacaagttataactcctctgcaagtctcagtttccattttgttggtgaatagagggagggaggggaattcctactttacaaggttaacatgataatgaaattacactttgttgccaatgtgcctagcacactgcctggtacatgatggttgtgatggctgtctttatacgggagactgggaagagaccctaaaggctgagatttgcttcactggaggcaggaagcggaagctcctttattgggtgcaatgaaagaaggtgttgagagatgggagatagatgttgatgggaaagaaaaagggagagaccatgggaaggagagagagagagaatgatatacattaggcagattaacttctctttattgtgaagaaagggggaaattaggattttctaggctgtcttttagttgcagcaagtcagcaaaaagggctatgatgaccaggcagcattgagcaactctgactccgccttcccctcttcgcacaccttctggttactgaaaacccagcgttagtagaaaagtttcttttctttgaatgacagaactacagcataatgcgtggcttcaacctgctcctcttctggggtgagtgtgaggctgaatggggggctaggggaggcctggattggaaatagacttcaggagaaatgggagggccatggatggtccagccaagagatcataagtccagactggatgctgcaaacaccttcattcagggaacctttgacaaaattccatagctcagggaagtccatctgttaggatagatttttctctatagtcattcatttgacctgagcaagtcctgtgtgtcaggtgctgttctaggcactagaggatatagcagtgagaaaaaaagactaagttcctgcactcttgaggctgatattctagtgggtaggagcagacaggaaagaaggcacagatgatcatagcccacttagcactgctgtaacttctttaaacatagagtgtatccaattgtcacaacatttctatgacattgggtcattattagtcctattttgcaaatgagaaaactgaggcaaaagagataaaataattttcccaaggccacttagtcaataaggggtagaggcaggatttcaagccagacagtctgacttcagagtctgtaagcttttccactatactatgttgccccaaaaaataagtaaacataggaatttcaggtagtgataagtgctatgaaagaagttgttatagaatgtggtcgggagttatgttgaagggagaagtctggggttgaggaggggcagttcgagctgagtcctgaaggatgagatagacccttcctgtgctcttatttctctttcttcaggtgtcagtttgtctcagccttgtttatcttctgtgtttctggtttttcttctatgtcttgtgtgttttggtcattggatcaaatttaagaatggaggatattggggacatattctaagtagcaagtatgggtttcctctgctgttgaagagtggatctgaataccctattttaccaagg

SEQ ID NO: 7822 - DNA, 6000 bp, Homo sapiens
tcactcccctttcaggcttttgcatctgttgtcaacatgagattaatttgcagatttcttgtttgtcttatatgtgatttttttttttttttaccttcattcagctttccatgatgagtacaaagccttggggaatatctggataaagtaaaattttctagaatgtgatctggacttgccacaaagaaacttcaggttcgtcgggcttcatggtgtatttgtctaaatatttaagtaaaaaataatgctggctgggcacagtggttcacgcctgtaatcccagcactttaggaggctgaggcgggtggatcacctgaggtcatgagtttgagactagcctggccaacatagtgaaaccctatctctattaaaaatacaaaaattagccgggtgtggtggcgagcatctgtagtcatagctactcaggaggctgaggtgggaggatcgcttaagcccaggaagtggaggttgcagtgagctatgatcatgctactgcacttcagcctgggcaacagacccagaccctgtcaaaaaaaaaattgtttcacataactacagtgcaatgatcacaatcaggaaattggcattaataccatattatatatagtattatagatatataatacactatttgctatatactatattagtaatatagtaattagtatatagcattaatataatactataaaatttacagagctcatttatattttatttttttatttcttctcatttatattttaattatcccaataatgtcatctatagcaaaagaaagactcaagtcatccattacatttgattgatatgtcttttttgcctcctttaatctggaacatttcctagacttttttttttttttttttttttttgagatggggtcttgctctgtcaccaaggctggctgggttgcagtggtgcaatcatagctcactacagcctcaacctcctgggctcaggcaattctcctgcctcagcctcccaagtagctgggacaacaggcatgtgccaccatgcccagctaatttttgtattttttgtagagaaggggtttcactatgtttcctaggctggcctcaaactgctaaactcaaacgatactctcacagcctcacaaagtgctgggatcccaagtgtaagcctccatgcctggcatttctttgtattttatggcactgacatttttgaagagcacaagtgagatattgtgcccctcaagctcagtttgtgtgatgttccctactctttaaagttctgcgtctttggcaggaatcccacagaaatgatgtttcgctgtttccagtgaatcctatcagaaagcacatgtttattatgtcccattaagaatctccttgaccatgtaataggggtgctataaaatcagtgttaagatagatggttgggattagagagtccattttctagaattctattttgtttgggacgttataaaatggatatttaatatgggtggttaactatgagatatttcctcacgcctgttagaattgtttattattattattcttttacctatgaattggcatttttgtttatttatcagtttgtgaaaatgtccttaatttgttgaggtagcaaacaaatttcaactttgattgctatgcaaaaccagaagataatctgctttgcaatgaactttatacagttcagctgcatataggcaacatgctatatatgaaaaaaatactaactgaactacaggtattaaatactgaaatgagttaacagtttattataatttattgtatttaacaatctaggaagttcgcagccatcagcagttctagtgcaatttcaggcgcaactgggaattcgggaatctcggtggagctgttagcgtagcgaaccttgtacataaaatacatgcatactttatttatttatttatttatttattatcattattattattatttttgagacggagtctcgctctctcgcccaggctggagtgcagtgtcgcgagatctcggctcactgccagctccgcctcccgggttcacgccattctcctgcctcagcctcacgagtagctgggactataggcgcccgccaccacgcctggctaattttttttgtattgttagtagagacggggcttcactgtgttagccaggatggtctcgatctcctgacctggtgatccgccctcctcggcctcccaaagtgctgggattacaggcgtgagccaccgcgcccggccacatgcatatacttttgatagcacatgtgaagggatctctctaaaatggacctcatcggcttcgttctcagcaaattgacctgggccactcaacatggcttttatcgtgcccgatgttaatgcacgttcttttttgacaataaattcatggccatcagataatatcaatttgacatacacggcatcagggccttcacagccaccgtaggttttcttctcaccatccattttgttcttacgaaattctactttgcttccccaggaactttagtagtttctcgtcaggcccacagccagcgcagcagggtccgtgtgtactgccacagcccctattccaaggccgccccaccccgccccgccaacccagctgcctgctcccgtgggtgggttccggggcagtggaaagaattacttcagctgggtcagagccgctttctgtgactggtgggagatccgtgtaattttttattttaagacatggtctcgccctgtcacctaggctcaagttcagtgtcacaatctcagctcactgcatcctcgaacactgtggctcaaagcgatcctcccgcctcagcctcctgagtggctgggactacaggcacatgccaccatgcccagctaatttggtttatttttttgtagagagcaagtcttactgtgttgttcgggctggtcttgaactcctggcctcaagcaatcttttcatctcagcctcccaaagtgctggtattacaggcgtgagccaccatgcctgaccttagaattattaaccattactagcggttagctaacaattggctctattattagctaactattaactaactattcactattattaaaaagacaagagttggccgggcgcggtggctcacgcctgtaatcccagcactttgggaggccgaggcgggcggatcacgaggtcaggagatcgagaccatcctggctaacacggtgaaaccccgtctctactaaaagtacaaaaaattagccgggcgaggtggcgggcgcctgtagtcccagctactcgggaggctgaggcaggagaatggcgtgaaccccagggggcggagcctgcagtgagccgagattgcgccactgcactccagcctgggcgacagcaagactccgtctcaaaaaaaaaaaaaaaaaaaaaaaaaaaaaaaaaaaaaagacaagagttggcaagggtgagaagaaaagggaaccccttgtgccctgtcggtggtaatgtagattggagcagacattatgggaaatagtgtgagggttcctaaaggaattaaatagaggccgggtgtggtggcttacgcctgtaatccccagcactttgggaggccaaggcgggtggatcacttgaggccaggagttcaagaccagcctggtcaacaaggtgaaaccctgtctctactaaaaaaaagaaaaaatacaaaaaatacaaaaattagctaggcgtggtggcacatacctgtaatcccagctactcaagaggctgaggcacaagaatcgcttaaacttgggaggtggaggttgcagtgagctgagatcacgccactgcactccagcctgggcgacagagaatctgtctcaaaaaataaaaaggaaaaagaaattaaaattttgagactctttctcaaaaaataaaaataataaaatcaaaaagaagaaatttaaaataaaagaaatttaaaataaaaagaaattaaatatgatccagcaatccctcccctggatatgtatccaaagaaaatgaaattgccactcgtaaagatatctgcatgctcatgttcattgcagcattacttgcaaaagtcaagatatggaaacaacctaagtgtctgctgatggagaaatggctaaagaaaatgtgatatatatgtatatgtacatttgtgtgtgtgtatatatttgtgtatatatattccattgtgtgtatatatatgtatgtgtgtgtatatatatgtatgtgtatgtgtgtgtatatatatttttacacaatttttacaatcaatattattccactgattgataaaataggaatagatcctgccatttgccacaacatggatgaatctggaggccattatgttaagtagaataagtcagatgcagaaagaaaaatattgcattttttcacttctatgtggaatattttttttaaagtcaaatatagagaataaaacagtggttaccagaggaggggtgcggctgggggagaaaatgaagaagatgtaggataatggatataaagtagcagatatataggataaacgagtctagagatccagtgtacccatgaaaattatagtcaataacagtatgtagtattccggatttatgctacatcagtagactgtagctgttcttgctataaagaaaatgggtaactatgtaagacgatggatatgttcatttgtttcactacagtaaccattttactatctatatgtatctcataacatatatagtatacgttgaatatacagaatataattaatttttaaataattaaatatatgggtggttgagatgagagacttcattttttagaattccatttacgtatgaaagattagacaaaatgagtccataaatcacaagtaaatagtatggacaacatttctattacatgaaggatgcccgttggatgttaactgatgtttctcttaccgcttccttttaaataaataaataaatataattttaaataaatatgtatattttaaaataaatacatatatacatagttttatttttattttattttttatttttattttttgagacagttctccctctattgcccaggctggagtgcagtggtgtaaacatagctccctgcagttgcaaattcctgggctcaagtgatccttccatctcagcctcccgagtagctgggactacaggtgtccaccaccatgcctggctaatgacctcttcttttgtagatacatcagctacatggaagcaggaaaccaaacaggatttttagagtttatccttctcggactctctgaggatccagaactacagccgttcatatttgggctgttcctgtccatgtacctggtgacggtgctgggaaacctgctcatcatcctggccatcagctctgactcccacctccacacccccatgtacttcttcctctccaacctgtcctgggttgacatctgtttcagcacttgcatcgtccccaagatgctggtgaacatccagaccgagaacaaagccatctcctacatggactgcctcacacaggtctatttctccatgttttttcctattctggacacgctactcctgaccgtgatggcctatgaccggtttgtggctgtctgccaccctctgcactatatgatcatcatgaacccccacctctgtggcctcctggtttttgtcacctggctcattggtgtcatgacatccctcctccatatttctctgatgatgcatctaatcttctgtaaagattttgaaattccacattttttctgcgaactgacgtacatcctccagctggcctgctctgataccttcctgaacagcacgttgatatactttatgacgggtgtgctgggcgtttttcccctccttgggatcattttctcttattcacgaattgcttcatccataaggaagatgtcctcatctgggggaaaacaaaaagcactttccacctgtgggtctcacctctccgtcgtttctttattttatgggacaggcattggggtccacttcacttctgcggtgactcactcttcccagaaaat

SEQ ID NO: 7823 - DNA, 6000 bp, Homo sapiens
ccggaaaggccacatcacctgcctgagaccacacagcccaaaagggagctctgggcgtggtggcttatgcctgtaatcccagtacttttggaggctgaggagggtggatcacctgaggtcaggagttcgagaccagcctggccaacatggggaaaccccgtctctatcaaaaatacaaaaaaattagcctggtgcggtggcaggcgcctgtaatcccagcttactcaggaggctgaggcaggagaatcgcttgaacccgggaggcggaggttgcagtgaaccaagatcgcgccactgcactccagcctgggcaacaagagcgaaactccatctaaaaaaaaaaaaaaaaaagtaaaaaaagttagccaggcatggcggcacgtgcctgtattcccagctacttgggaggctgaggcgggagggtggcatgagtccaggaggtgcagtctgcctcaagccataattgtgccactgagttccagcctgggcaacagagaccctgtctctaaaataataataataaattaggctgggcgtggtggctcacgcctgtaatcccaacagtttgggaggccgaggcagtcggatcacctgaggtcgggagttcgagaccagtctgactaacatggagaaatcccatctctactaaaaatacaaaaaaaaaaaaaaaaaaaagaattagccgggtgcggtgtcagatgcctgtaatcccagcttactcgggaggctgaggcaggagaatcacttgaacccaggaggtggagggtgcagtgagtcgagatcgcaccattggactccagcctgggcaataagagtgaaactccgtctcaaaaaaaattatactaatatattataattatattataataattattatattatataatataattattattattatattatataatataattattataattatattataataattattatattatataatataattattactatattatataatatattataatgttacatattatatattataattattatacgattataataattattagattatataattatacgattataattcttagattatataattattattatatgactataattcttagattatataataattatattatataataattattatactataattatattatataataattattatacataataattctattatataattattatcatactataataattatataatataattattttatactataataattatattatataattattattatactataataattatattatataattattattatactataataattattattgttggttggataatcttgggttgcttctttttttttttttcttttttttgagatggagtcttgctctgttgcccgggctggagtgcagtggcgcgacctcacgatctcacgatctcagctcacagcaatctacgtctcctgggctcaagcaattctcctgcctcagctgcccaagcagctgggattacaggcaatcttgggttacttctgagctgagcaacctggggccagtggctcaaaacgcccaggtgccagtttcccttttgacaaatgaggaccatgttcccgcccctcatcattgcagaacaaaagtcatgaggttgtccagaagctgcaaaataggtcagcaggactgagacttcaggacaaagagaaagtggagaaacataggcagacgccccggcagggaccagatcagcgaggctgaaggaggcttcctttagctgggcggcagcggagtggagtggcaggagtactactaatttgcatggtttaccatatagggccccactcagcacaggctctgtgctggtgctctgcagagaaaaagacaaaagtcactcagggggctgacagcctaatgcggctcgagggcagattgttgcaagggaagaagggagatggtgagaagtattggagagactcaagaaagccgccaggaatggtgactcacgcctgtaatcccaacgctttgggaggctgaggcgcgtggatcatttgaggtcaggagttcgagaccagcctggccaacatgatgaaacttcatctctactaaaaatacaaaaaactatccaggtatggtggtgcatgcctgtaaccccagctgcttgggaggctgaggcaggagaatcgcttgaatctggaaggcggaggctgcagtgagccgagatcgtgccactgcactccagcctgggctacggagagactctgtctcaaaaaataataataatgaaaataaataaataaaaattaaaaaatgaggacctggttgtgctcacctggaatcccagctactcgggaggctgaggtgggaggatcgctggagcccagcagtttgaggctggaatgagctatgatcgtgccattgcactccagcctgggcaacagcagactctatctctaacataaagtaaaataaaataaaataaaataaaaaagtgtcgatgatcactatgaaggggtgtagggacaatccctggcatcaggaagcgcctcctgcctccctgagattctgcagacaccagctgtctgacgtgcccatctgatctgcagagaagggacgttgagccctggggttctagctggagtttctgactttctgagaaaaaaagggcaaaatccctccagagctggtctggccctctctccttccagcttctgctggtgttcattcccctcccccacagcccaggccacccccacaggagcccaggacaggaaggggtaaattctaggactggggatgtttgattattcccaggacaatagttctgtgacttcagtgattagtgactttttttccccatcgctgcaatctccccctttgaacaattgaactatattttgcttagcattcatcacttctgcatcttgaatttattcatgtaacaaggagacttgatttcggcatcctcactgaaaaaccctcctcattgccccaaatagtagggaaacctaaaaataaatgtgaatataaggaactcaaaaccaagtccttgaattctggctggacacagacgcctgctaagcctcagggtcacggaggcgctaaagacatgttagtgcccagtagagactttcccctgggctcattgtagggactctggggctgggctgcccgcctatggatcttctcagctgggtaggtcacttgtgcctcagtttcctcctctgtcaaatgggaatgacaacatcattgcagatgttttgaggagtaaatgagttaaaatagattaaaaaaaaaacaaacttatgaccaggcctggtgcagactaagtgctctataaataatagcattttcttggcagcatagcgagagcttgtcttaaaaaaaaaaaaaaaaaaacttaagaaaaaactagccaggcgtgatggtgcacagctgcagtcccagctcctcaggaggctgaggcaggaggatcctttgagccctggagtttgaggctgcagtgagctgtgatggtgccactgcactccagcctgggtgacagagtaagatctcttaaaaatatatatagcgtttgtttgtttgtttttagacagtttcactcttgttgcccaggcttgagtgcaagggcacaatctcagctcaccacaacctccgcctcctgggttctatcagtcctcctgcctcagcctcccaagtagctgggattacaggcatgtgccgccacacccggctaattttgtatttttagtagagacagggtttctccatgttggtcaggctgagtctcgaactcccgacctcaggtgatccacccacctcagactcccaaagtgctgggattacaggtgtgagccaccgcacccagccaaaaaatagcgttttaaaaaattatgaggtagctcaagagacaagctaatcatgtgatttatccagaaaggaaagaaccctcctatcacatgattctctgttgattaacgaagaggcctctgaaatataagtttcccacagggggaaactggcttagaaagatcagaaagatccaggaggtctgctctgtgcggtgaagcttctcttcttggcacctgcctggcatcggaagagggccccttctccctccctgggcttttatgtggacactgtaatgcctcagttttctttctttctttttgtttttgacacaggatctcactctatcacccaagctggagtgcagtggcaccatcatagctcactgcagcctcaaactccccagctcgggtgattctccccgcctcagcctcctgagtagtagtagctgggactacagatgtctgccaccagcctggattatttatttatttattttgtagaaacaagagtttcgccatgttgcccaggctggtgtcaaactcctgagctcaagcgatcctcctgcctcggcctcccagagtgctgagatcacaggtgcgagcctctgcacccgacctgtttcctcatctggaaaatggcagggaaacgttctgccagctgggacgcaggctctgccaactctggcatgccaaagctctgggcacagggcgagtcccaccagcgtgggcgtccagagctatttctgacaagacccctttgcgcctgcccagggaagagccaagtggccccaggcaagaccgccccgcccggctgccacaccttcccctcagagcagccagccccaacacagaggccaaagggttcgtcagagccacatggtggaaactctagcagagggtttttgaaagcaggttgcacttcattcttactgagtgcacgtgtgtgtgtgtgtgtgtgtgtgtgtgtgtgtgtgtgtgtatgcagcgcccctgggtctgtgtttttattgcactttcctgctggcttccagctgcaccgccagttccggggagggccctgggccagcggctgtccgccccccctccttcataaagtcctggcctcgggacagcctgcacagctgcctagcctgtggagacgggacagccctgtcccactcactctttcccctgccgctcctgccggcagctccaaccatgggaggccgcgtctttctcggtaagtactttggggccccgctgggaggggcgaggaagctccagcgggaccccttggctgcgtctgagaaacgggaggcgccgctggtgtctgtggggcctgcgatagaggaagccacatggtcaagcaggcactcacgggcacacggcgagaggggctggtggtgcttgggcacccccacaccccggcaggaactccagggtgctcttggagcctgctaccctgcctggagggatcctcaagctttctactggagccagtctggcatctgctccctaagaggggaaactgaggcacgggggaaggaaaggggcaaaaagtgagtgctgggaccctgagagccgctgtgcttaatataacgcatagaaggacatgggcgggggtggggaagctagaagccaggacttctccactgcaaggtacccccaatttgtccctcgcagtctcagcagcaggggcagcccccagagaccccagttcttgctccccgcagacctggctggggctcagctgcggatcgaagggactttgcctggttctgggtttgaatttgatttttgttgtgacttcctgggactccctttcccgccccacccaaggtgactgtaacggttatcagggtagctcgttgcctaagcaacggggcaacaaagagagtgaagaaatgacatttggggcaaaaaccagaacttcctggaccacagggacacagcttccctgggccagccccaagtggcaggtgtcagctcagcaccccgccttggcttgagagtgagagacaagagcccaccttgggtttcttgggggcacacttgttgggggcagttgccaagacctggcttcccaagggttccacgccctggctgtctgtgtcaccagggccaagtcagagagcctctgcgcctcacttttctcatctataaaatggagcacaacccgtctccg

SEQ ID NO: 7824 - DNA, 6000 bp, Homo sapiens
ttccagaatatttcttctttttagttcattaattctgctttgatctttattagctactcctttctgttttaacagaatgttaaatattttgtgataatttttaacaaaatcaaattttacaatattgattttataacacttgtattgacaatatcttcaaatttttaagtttttatttcttgaggataggctacacatgtattcatttgcaattttcaaacaatatgctaaaaaaggaatctaaaaatcaaaattaatgttaacactcaaagatgatccctcttcatactttggggtatgttgttatggatcttttttttcttttggtgccaatatgtgtatagtttaagagatccataggctgagttcatttctctagctcagaaaaggagaccaaatgtcttttcatagcagtatctgaaatgttttctttccacatgatggaatttttttttccccctagatggagtctcactctgtcgccagactagattggagtacagtggcgcgatctcggctcactgcaacctccgcctcctgtgttcaagccattctctctcagccttccgagtagctgggagtagctgggattacaggcacgtgcaaccatgcccagctaatttttgtattttcagtagagacggagtttcaccatattggccaggatggtctcgatctcttgacgtcgtgatccgcccgccttggcctcccaaagtgctgggattacaggcatgagccaccgcccccaaccgaaattttgcattcttactcttctttcatacagacattttaattccctcagtgaaaggggtatgttattgttaattttacttttttagattaacagtaaaaataaaacattttctcaaacatttattatccttttacagttcattttatgaacctttaatattctatttattttccccatcagtgcattaatatttcaatgatttataattgtctttataaagatattaacttttgtcagttacataaattttttttttgcattctaactttctgcaaggcacattttctcattcagaatttttcaatttatggttctagttgctgatctctttttctatcaaaggtgaattattcagaaagaatttgtactttcaaagattatatctatccatgtataaatttatataatctatatgtttatctatgttttcttcagatagcttatgtagtctcttgtctgtttgaaatgtatttgggactacagagatgggatttgacattattttttctaaataattaatcattaaacacttatttatacctttaaaaaacactatttaaaataactaaaggaggccagggaagatggctcacacctgtaatcccagcactttgggagcctgaggtgggtggatcacctgagatcaggagttcaagaccagcctgaccaacatggtgaaaccccgtctctactaaaaatacaaaattagccaggaatggtggcacatgcctataatcccagctacttgggaggctgaggcaggagaatcgcttgaacccgggaggcggaggttgcagtgagccaagatggtgccattgcacttcagcctaggcaacaagagtgaaacttcatcttaaaaaaaaaaaaaaaaaaaaaccacaaaacaaacaaacaaaaaactaaaggattataattggattgcttgtaacacaaaggataaatgtttgagaggatggatgccccattctccatgatgtgattcttatgcattgcatgcctgtatcaaaacatctcatgtaccccataaatacatacacctattacgtacccacaaaaattaataataagttttaaaaagagaaataataaataagacctagtatttgctagcacaacagggtgagtacagtcaaaatcaatttaattgcacattttaaaataacaaaaagaatataatttgattgtttgcaacacagaggataaatgcttgagggaatggatgctgcattttccatgatgtgattactatacgcattgcatgcctgaatcaaaatatgtcatgtaactcatagagatatacacttacccacacaacttaaaaaaataaaaaaaaaattttaaacacactcaagtatccagaaataaaaaatgcaagttaacgtgataaaaattacacattctaaatcacagtgaacatcatattaaattacaaaactctagggttattctatttaaaaaagaagaagaaaaagaagaatgccaactcctaccataaattttaaaaggattctaaaatttcaaaccaatgcaataagacctaaaagagaaataggtgttattaattagtattatttggagaaaatagatgaattttagagaaaaacatgaaactaagaagaaaacccagaaaaagaatatggcacctcttcaatacaaaaaaagcaaatgacttcctaatataataccaatagcagagatgttatgtgggggggtattacattaaaatattaagaaattaacataatctatatgtgtatttttaacacgtgaacaaaaatgtctacccaaaaaaggattaaaatatgcagaggaacatttctgctactggaatgagaatttgaacataataaagatgtcaatttctctccaaattaattgataactttaatgtaatctccaataaaattccaatggtatttttcttgcaacatggctagaggattctaaagctcatctgggaggataaactggcacatcagaaataaaattatgaaagaaacaatactaagcaaatttctcaactcaatgtttaagtatattttgaagatagacaattaaaaatatggaacaaaagatttgataccctgcttgctgtcatggcacagatgaccatttaaaattatctatttataagagtgtgaacaagaaaatgtcttaatgtttttgttgttgttgttgttgttgttttttgagacagagtctcgctttgttgcccaggctggagtgcagtggcgtgatctcggctcactgcaacctccgcctcctgggttcaagcaattcttctgcctcagcctccctagtagctgggactacaggtgtgtgccaccacgcccagctaatttttgtatttttattagagacggagtttcaccatgttggccaggcttatctcgaactcctgacctcgtgatccgcccaccttggcctccgaaagtgctgggattacaggcgtgagccaccgcgcccggccggaaatgtcttaattaaaaaaaaaaacaacaacaactgagaaaggccatttacagattaacctaagagaagaaaatataaaaaatataaaactatagttaatcaaaaactttctttgtctttaagaaaacttagaaagtaagtaaatgtccaacatggacaagttttaaagagccatttctgtatggcagaatattttgatctgatggaatcagatgatggaaaatggggataaaatttaattctatatctagaaactctagggcttttctatttcaaagttccatttttgttgagtttagctagggagattgataatataaatgaaatgtaaacaatgatgattaaaaacagtggttattattttttagcagaaggggcatccaagatccagaggatttaacatgtagacattacaactgggcacagtggcttgcacctgtaatcccagctacttgggaggctgaggcaggaggatcacttgagcccagaagttcgagactgcagtgagctaggatggcgccactgcactccagcctgggcaacagagccagaccttgtctctaaaacaaaatgaaaaataaattacaggaatgcagcacaatagaagaaaaagccttctgaggattgacaatctgcctagaattagggaattctcattgcctgatttcctaatccccatgccttaggcagaaagggcaagagcagccaccagggatgctgcggtgggaaggattgcttagggatacaggcaagcgctgaagcaatagtcctcaaacttgagtgtgcatcagaattccctagagggcttgttaaaacccagaatgcaggccaggcacggtggctcatgcctgtaataccagcactttgggaggctgaggcgggcggatcatctgaggtcaggagtttgagaccagtctggccaacatggagaaaccgtgtctctcctaaaaatacaaaaaaaaaaaaaaattacctcagcgtggtggtgcgcgcctgtagtgccagctactcaggaggctgaggcatgagaattgcttgaacctgggagccagaggttgcagtgagctgagattgcaccactgcactccagcctgggcaacagggtgagactctgtctcaaaaaaaaaaaattaattaattaaaattaaaaggccaggcgtggtggctcatgcctgtaatcccagcactttgggaggccaacgcaggaggatcacgaggtcaggagttcgagaccagcctgaccaacatggtgaaaccctgtctctactaaaactacaaaaattagctgggcgtggtggtacatgcctgtaataccagctactctggaggctgaggcaggagaatcacttgaacccgggaggcagaggttgcagtgagccaagactctgccactgcactctagcctgggcgaaagagcgagactccatctcaaacaaaaactaaaccagaatgctggctccatacccagagtatcagattcagtcggtcaggtgggcatgataaggcacatgtctaatgagttcccaggtgatgctgatggggctgttccaggaaccacagtttaaggaccaatgatgtagagatgacttctccaggtagcgatggtaactgtaacttgtcggcaaagaaatccaataattagccaaaatgcatgatttcttgagttccctgggtttgaataaaggatattgcagtcattctggggaatgcttatttggagtaaattttgtgtggctgttttttttcctccttctcggcaaacccagcggccccatggaaagaggaaaccaaacagaagttggaaactttctcctcctgggattcgcagaggactctgacatgcagcttctcctccatgggctgttcctctccatgtacctggttaccatcatcggaaacctgctcatcatcctgaccatcagttcagactcccacctccacacccccatgtacttcttcctctccaacctgtcctttgctgacatctgtttcacatccacgactgtcccaaagatgctggtgaatatccaaacacaaagcaaaatgatcacttttgcaggctgcctcactcagatattttttttcattgcatttggatgcctggacaatttgctcctgaccatgacggcctatgaccgcttcgtggccatctgttaccccctgcactacacggtcatcatgaacccccggctctgtggactgctggttctggggtcctggtgcatcagtgtcatgggttccttgcttgagaccttgaccattttgaggctgtccttctgcacaaatatggaaattccgcactttttttgtgatccttccgaagtcctgaagctggcctgttctgacaccttcatcaataacatcgtgatgtattttgtgaccattgtcctgggtgtttttcctctctgtggaatcctattctcttattctcagattttctcctccgtcctaagagtatctgccagaggccagcacaaagccttttccacctgtggttcccacctctcagtggtcagcttgttctatggcactggccttggggtctatctcagttctgcagttacaccaccttctaggacaagtctggcagcctcggtgatgtacaccatggtcacccccatgctgaaccccttcatctacagcctgaggaacaaggacatgaaggggtcactggggagactcctcctcagggcaacgtctctcaaagaggggaccattgctaagctctcatgaattgcagtgaacacaatactgaggccagactggcctctttc

SEQ ID NO: 7825 - DNA, 6000 bp, Homo sapiens
tgcaggtgcgtgtccacctccgcgtgcagggtctctgcctctgtgagggctcaggtctgaacattcttgctagtgcgcgcgcgtgccggttgggtgcacgcttggtgttggcgacagagcctgcagcacgtggggagaggtggcaggcggatgcaggtacatggacaggtgtgtgagggacacagtgggcacccgtgtctcagtctgtggaggcggaagccgcccatccctgagctttcctgaggagcctccccctctgctttcagacacagctggggtggggctcagcgctgtcctgggcgggagcaggaaggctgagccgggacagcgctgtgggttctgcctcccttagctccggactgaccctgggcaccccaggaccctctcccttcctgagcacaggctaggctgtgaacacagtgcagagacagggagaggtagaacaaggctgagggtggcccacggtccattttttttttttttttttgagatggagtttcgctctgtcacccaggctggtatgcagtggcgcaatctcggctcactgcaacctcctcctcccgggttcaagcaattctcctgtctcagtgattctcctgtgattctcagtgattctcctgcctcagcctcctgagtagctgggattacaggcatgtgtcgccacgcccagctaatttttgtatttttagtagagacagggtttcaccaggtcggccaggctggtctcgaactcctgacctcaggcgattcacctgcctcagcctcgcaaagtgctgggattacaggcgtgagccaccgtgcccggccccatggtgtactttttaaaaattgaaataaaattctcataatattgaattaaatagtataaagtgtacaatttagtggtgtttagtacattcacaaggttgtacaaccaccacctctatctagtttcagaatatttttgtccccacccttaaaaacccgtacccatgagcaatcactccccattcccccctcccagcccctgtcaaccaacacctgctttctgtctctatggattggcctgttctggacatttcatagcaatgggatcagaatatatgtgactcttttgtctggcttcttccactcaatatcgtgttttcaaggctcctcattttgcatgggtcatgatccgtgttgcatgggtcagtgctttattcctttttattttttataggtatatagtaggtgtgtatacttatggggtacatgagctgtttggacaaaggcatacgatgagtaataattacatcagggtaaatacaggatccatcacctcaaccatcacctcaagcatttgttgtttctttgtgttacaaacattccaattatatatatatatatatatataatttttttttgacagagtcttgctctgtcgcccaggctggagtgcagtggcatgatcttggctcactgcaacctctacctcccaggttcaagtgattctcctgcctcagcctcccgagtagctgggactacaggcacatgccaccacacccagctaatttttgtatttttagcagagacggagtttcactatgttggccaggatggtctcgatctcttgaccttgtgatctgcccgccttggcctcccaaaatgctgagattacaggcatgagccaccacacccggcctccaactatacttattatattaactaattatatttagctcttataaaatatacattaaattattgttgattgtaatccccctgttgtgatatcaaatactagatcttattcattctgtctaactatacttttttacgcattaatcatccccactcccccccagctatgtgcactacccttcccagcctctaataaacatccttctgctctctatgtccctgaaagcaattcttttaacttttggctaccacaaatgaatgagaacatgcaaagtctgtctttctgtgcctggcttatttcacttgacataatgacctccagttccattcattttgttgcaaaggactggatctcattccttttttgtgtctgagtaatactccattgtgtatatgtaccacattttctttaactaattctctgttgatggacacttaggtttcttccgaatctgggctattgtgaatagtgctgcagtaagcatgagtgaagaaatctcttcaatgtactaatttcctggctcacatctgtaatcccagcactttgggaggctgaagtgggtggatcacttgaggtcaggagtttgagaccagcctggccaaaatggtgaaacccctctctactaaaaatacaaaaattagctgggtgtggtggcaggcacctgtaatcccagctaagtgggagggtgatgcaggagaatctcttgaacctaggaggtggaggttgtagtgaggtgagaatatgctattgcactccagcctgggcaatacagtgagactgtctcaaaaataaaattatgattttctttctttagggtatatgcctagcagtgagattgctggattgtaaggtagttctattttagtttttgggaaacttccatactgttctccatagtggctgtactaatttacatcgccaccaacagtgtatgaggattcccttttctctgtgttctcacctggattctctatcttttggacaaagctatttattgtcttctatcttttagataaaagctgttttaactggcatgagctttcaaaaatttagattaaatttatttaacctgaaattatcctttaaatattttaaagtggacaatcagtggcatttagtacattaacatgttgtgcagctactacctctagttacaagacattgtcaccattccaaaaagaacttcatatccattcatcagtcattccccatcccacgctagccccattccctgacaaccacacatctgctttctttctcagtggatttaactattctggacatttcttataaatggaattatatactatgtggccttttgtgtctggcttccttcactcagcctcatgttctcaaagtgcatccacgctgttgcatgtatcactgattcaatctttgcgtggttgcataatatttcattgtgtggtcggaccacattttgtttatccattcattcattgatccagtttgcattgtaacataaacttttgtattttgcatctagcctgtttgcagactggcaagaaagagagtgggagaggagtcacagcctcctagtttagtttgttggggaacttccataaactaaataaagtagaagggctcctattggtgcagggaggagagctgccctggcagagaaattgggcagatctgactctgtggccactcagggaaggtgatgagagaagccatggctgatagcctaggtttttgctgttaggtttgggattggaggattggggttggggtcaaaaagaggaggagaccagcagagtcacgtagtggaagcatgctgggcccatagcctagaggtcagtggaccataaccattttctgctaagaagtttttgactgggcatggtggctcacacctataaatcccagcactttgggaagctgaggcaggctgatcacttgaactcagaagttcaagaccagcccgagcaacatggttaaaccccatctctactaaaaatacaaaaattagccaggtgtggtgatgcgggcctgtaatcccagctactcaggaggcggaggcaggagaattgcttgaacccaggaggcggaggttgcagtgagccgagatcatgccactgcattccagcagggacagagtgagactctgtctcaaagaaaaaaaaaaaaaaaagcggaattgtgatagagaaagagtaattcacacagagctggctctgcaggggactggagttttattattactcaaatcagtctccctgagcacttggggagcagagtttttaaggacaacttggtgggtggaggggaagccagtgagccagcagtgctgattggtcagagatgaaatcaaagctgtcttcttgcggagagtcagttcctgggtgggggccacaagatcagttgagccagtttatcgacctgggtggtgccagctgatccatcaagtgcaggatctgcaaaatatctcaagcactgatcttgggagcaatttagggagggtcagaatcttgtagcctccagctgcatgactcctaaaccataatttctaatcttgtggctaatgttagttctacaaaggcaatctaatccccagacaagaaggaggtctgctttgggaaagggctgttatcgtccttgttccaaactataaactataaactataaactaaatttcccccaaagttagttcaccctatgtcctggaatgaacaaggacagcttggaggttagaagcaagatggagttggttaagttagatctctttcgctgtctcagtcataattttgcaaaggtggtttcaattttccaggggagcaatgaggctcagagaggggaagcaacctgccctgcatctcacagctagaaagcagtggtgccgagaattaaacagagtctggacgtttccatgacatagggaagagatgacttccagctgaaggtggcaatcagggagcagcttgctcataaaattcaggtaggatttggacccataaagatagggaaaagcatgaaaagaccagcatgaacaaaggcagaaaagcaaggtgtaggtggtggtgcatggatctaataatcgtgatggcaataacaatagcagaataattattactatcaacatttataatttattaaattcttactttgtgtcaggacctgcacaaagcacttaaggtgagtgatcttatttaaacctcaatacattattattaatgcctttctgcagatggagtaaccatggcttggacagatgaaggaggcgctctcagatgtcctcccaggcaggaatcactagacacccccatgctcctaaccactgggtcttctttcctctcttccccaactaggggtggccgtcatgctggggctaaaccacacctccatgtctgaattcatcctcgtcggcttctctgccttcccccacctccaactgatgctcttcctgctgttcctgctgatgtacctgttcacgctgctgggcaacctgctcatcatggccaccgtctggagcgagcgcagcctccacacgcccatgtacctcttcctgtgcgtcctctcagtctccgagatcctctacaccgtggccatcatcccgcgcatgctggccgacctgctgtccacccagcgctccatcgccttcctggcctgtgccagtcagatgttcttctccttcagcttcggcttcacccactccttcctgctcaccgtcatgggctacgaccgctacgtggccatctgccaccccctgcgctacaacgtgctcatgagcccacggggctgcgcctgcctggtgggctgctcctgggctggtggctcggtcatggggatggtggtgacctcggccattttccaactgactttctgtggatcccatgagatccagcattttttatgtcatgtgccacctctgttgaagttggcctgtggaaataatgtaccagctgtggccctgggcgtgggcttggtatgtatcatggcactgctgggctgttttctcctcatcctcctctcctatgccttcatcgtggccgacatcttgaagatcccttctgctgaaggtcggaacaaggccttctccacctgtgcctctcaccttattgtggtcattgtgcactatggctttgcctctgtcatctacctcaagcccaaaggtccccactctcaggagggtgacaccctgatggccaccacctacgcagtcctcacgcccttcctcagccccatcatcttcagcctcaggaacaaagaactgaaggttgccatgaagaggaccttcctcagcacactctattcctcaggcacctgagtagctggtgtggaagtgctgatagaatatgataggaggatgaccatcacct

SEQ ID NO: 7826 - DNA, 6000 bp, Homo sapiens
ttttccagaagatgaggggattcattactcagagctgatccagtttggggtcggggagcggcctcaggcacaagaaaatgtggactatgtgatcctcaaacattgacactggatgggctgcagcagaggcactgggggcagcgggggccagggaagtccccgagtttccccagacaccgccacatggcttcctcctgcgcgcatgtgcgcacacacacacacacacgcacacacacacacacacactcactgcggagaaccttgtgcctggctcagagccagtctttttggtgagggtaaccccaaacctccaaaactcctgcccctgttctcttccactctccttgctacccagaaatccatctaaatacctgccctgacatgcacacctccccctgcccccaccacggccactggccatctccacccccagctgcttgtgtccctcctgggatctgctcgtcatcatttttccttcccttctccatctctctggccctctacccctgatctgacatccccactcacgaatattatgcccagtttctgcctctgagggaaagcccagaaaaggacagaaacgaagtagaaaggggcccagtcctggcctggcttctcctttggaagtgaggcattgcacagggagacgtacgtatcagcggccccttgactctggggactccgggtttgagatggacacactggtgtggattaacctgccagggagacagagctcacaataaaaatggctcagatgccacttcaaagaaccagtgaactcttttcagtctgtggagtcagagtggggatgaggagaggggaaagtcttcatggggcctggggggaaggaaatggagtcacagtggtttactgatcaaaccagcagattagagagtctggtgtcttgttaggaaaagcatactggctttgcagacagacaaacatgagaacttgaatcttgattcttcggcttaactagcccggtgatcttggcagggctcgccagcttgcctgagtctcggcttctccatctgtaaagtggagagggaaaggccactgcctaccacgcaggtggcccacgataggaagtgaggcatcgtcttctatatgctggagccacattgagacccagcacagaagccgaaagtcccccagaaaaccaacctccatcctttatttgcatttttcgaagaatgtgaaaaggggaagccgattcaaaacagctcttcccaaaagtgacgctacccaattcttgcacaacccatagctgccagagaaagtcttgaagaccagccaccctgagaaacctcacagcttttctgtcattcgaggtcctctgcacccgttctctaattctgttcactgattcagactttccagttaggtgccccagctcccctctccgcttctcgggtttgatctttctccacccattcacctgcttctgcaaaggggctaaagcccattctccttagagggcaggggtgtaattatctgatcatcagggagattggctcctggcacgtggcaggtgtccccaaactgccaccttcctctcccaccttcctttccctcccatctctgctcagtacccggacggtaactctaggaattatggttcagggaggccttgatcgccccatcaatccactttgtccctggtttgattcttgtgagcaccattaacttttctggaggaaggtgaggctttaagaactgtttaaagcccaggcgtggtggatcacgcctgtaatcacagcactctgggaggccaaggtgggcagatcacctgaggtcaggagttcaagaccagcctagccaacatggtaaaatcctgtctctaccaaaaatacaaaaattagctgagcgtggtgattcacacctgtaatctcagctacttgggaggctgaggcaggagagtcgcttgaacctgggaggcggaggtagcggtgagccgagatcacgccactgcactccagcctatgcaacagagtgagactccgcctcaaaacaacaacaacaaaaactgtttaaatgagacaggagggtgttggggtgtctgtgcccaaaatggggtctggtgtcattcaactctttcttcattcattctgcacacagatactgagcacctggaaatgcacccagtacagagccagttgttaggacaccaaaaagataaggcgtaggaccaaccttggggatctctagtcgagagccgccaagggtttttaaggcaagataccctggagggagctgaggcagtcctaagcctgaagggcctggcttaagctccctggcaaccatcgagcatcttccccttcccaccctgtccctcagcacagctgctgacataaacctactacatggctgattgaccatgagatatggccatcaatagacattgctgaggcgtgaagagcaggtgaagagcaggtggccaggaagctagggggccaggactccagacgcaggccgccctccacaaccccagctctcacagtcctcccagggtccagacaatggatcgtgcatttaggttcccaaacacctgctgtgcaacgtgtagtagacaaagcagaccaaagcctttgccctcaggaggccggcattctagctcaggagccagccaagacgatgtcgcactgaagaaagacaacaaaagtgagattcacaggagggatgagtgtggctgaggcacccgggaaggccctcggagaaggtgaccttgggcaaagatccagacgccaggtgggtggggccaaagcagagaagatctggaaaacccaatggctccccagggcttcgctcttgctgcaggaggggaaaccacactgctgtggattcttcctccattctgtccatttctcagttcccaacaacacactgaacagtaggaggccagttctccgctcacagcgggcgctgcaccccaggtgctgctctcgagaaaaaggcgagcatggaccaatttagtggctccgaggtatgaaaagcagtgagatggtgtctttgagggagttagtgataggctgagacccccttgctgtcccccctgaagcctggtgaccagagctgccaggaggccacacagagagaggtttatgatgggggacctggaattcggaaggggcagagtggtcaggtgacccatacacgcctgagaaaactgatgtggagagctgtgttgtcattctgaggcaggaaatagagacagactgacagacagacagaaagacacgggcacattgagagacagagacagaatcacagagcagagctggcttctcaccagcaggcgtgggcacacctgagagagcatccagagaggttagaaatcttccttaggtcctcctgggaggctcaggtgaccccagtgggaaacatgaaaggctgggaggacttccagggctgagagaaggaagctacgcagccggccggtgccacattccctgtgccttggggagtgtcccccagtgtccccagccatgcaccctggggggagtcggcttggacatctgtgccaccccttgacaggcagagtgggggccacaacctgggccctccagtgctggtcagcagaggctgcccccgccccttgccttcctcctcccgctccttcctccagccctgggaaggtcggaagccaccaccatggggctagtgcggaagcagagggagaacagaggggccctcctcgcaaaaactaaaacaagcccacagcctgtgcagaaccgcacccgggtgtgatcactccttaccccacacacccactgccacttggagatggcttcatggctgcagtcacagggcaccctgtgttgtcaggggtgagccagtgaggcccgggacctgcccaggggtgcatcaagggtggagaagacctggccccagcgcaggtgtgaacaggcaggagggctggggagggaatagcgctgggttgtggccgagcccccaagccctgctcttgagaggcactggctacacactcggcccctacccagacaggaccccaattcctccctggcccctctgtgttcctgcatcttcccagcccctcacctcctctggcgtggcctcacctccagccgggatgccccattagctgctcacccaagctgctagaacctcaggctaatggccctgtcacccgccctcctccccttccggctcactgcccatcccgggcatcctccatcagcccgctgaggggactgctgagcctcagagacatctggcagcaccaggaggtgggtccctctctctgtggctcctctcttcacctgactgttccccagacccccagaccccctgcccaggtggcccctgagaactgctaagctcaaccgtgacatggatggggcctggctgacccttgggctctccctgggggacccccttttcctgtccctggccacaccctcaccttatccacacccttctcctccctgctgccccgccggctttccaatgtgggtggggggtgggggcagctcctgccttgccagggaaccagggagggcagtgggctcaggagtcaaactcccattcccagggaaggctcaggctgtgggcccagccctgttctgaattctctccacccctcctccccacagagtctcagaaatcgagaagctttcttcctctgggacctgtgcgccacatcctatctcctgtgacgctgcaggagcttccctggttttaagaggtgacatggtggagagaaagcacaggactgggggccacaggtcctggcttctcatccaggctccgctgctccctgactgctgcctttctctgtgggcctcgtttcctccctgatcccaccaggtgaattgtaattctccacacagggctggaacccgcgagtgatcccaggagcccctcctctccggggccccaagatctgaggacagggagccaggttgcacacaggagccgtgcaggccaggacggcggccccatggacctgcccccgcagctctccttcggcctctatgtggccgcctttgcgctgggcttcccgctcaacgtcctggccatccgaggcgcgacggcccacgcccggctccgtctcacccctagcctggtctacgccctgaacctgggctgctccgacctgctgctgacagtctctctgcccctgaaggcggtggaggcgctagcctccggggcctggcctctgccggcctcgctgtgccccgtcttcgcggtggcccacttcttcccactctatgccggcgggggcttcctggccgccctgagtgcaggccgctacctgggagcagccttccccttgggctaccaagccttccggaggccgtgctattcctggggggtgtgcgcggccatctgggccctcgtcctgtgtcacctgggtctggtctttgggttggaggctccaggaggctggctggaccacagcaacacctccctgggcatcaacacaccggtcaacggctctccggtctgcctggaggcctgggacccggcctctgccggcccggcccgcttcagcctctctctcctgctcttttttctgcccttggccatcacagccttctgctacgtgggctgcctccgggcactggcccgctccggcctgacgcacaggcggaagctgcgggccgcctgggtggccggcggggccctcctcacgctgctgctctgcgtaggaccctacaacgcctccaacgtggccagcttcctgtaccccaatctaggaggctcctggcggaagctggggctcatcacgggtgcctggagtgtggtgcttaatccgctggtgaccggttacttgggaaggggtcctggcctgaagacagtgtgtgcggcaagaacgcaagggggcaagtcccagaagtaacgccactgctcgggggaaggagcatggggcaggagggcccggctgcttctccaggcccctgcggggggctgcttcggaggaactgcagggcagcctggcccggaggcctccctggagccactcaagcagagagcggc

SEQ ID NO: 7827 - DNA, 6000 bp, Homo sapiens
aaaataccttcacagcactgtgctgtatttatcaatactgtaagttttgttgtctgtttataagagaagttgtctgtctcaagcggcagtaaccgcggctgcagatctcaatctgtggtagatatcaagcagttcaacccttttttataatgtcatgacttttctttgcttcttggaacagctctggcatcactagtggccccgcatttggggccaagggggttattcaaagtttacggtattgcattaaacatggtgaaacatatgcaatgactatgaaagatcactttttacttctgtacacagtgtactggcgagaactgctcaccaggaggtgattagcttcacgtggtgttggaagcagatactcaacagttgagctcacggagaaagcacaggaggtggctacgaaattattataggagtacagtatgtctacagtaaatatgcacttatgactttaatactgcacatctttatgtttgcttgcatttctcttgacttcaaatggcatcaaatagagtttgtgtttgcgtgcatatatttttgataaattttaacttttttgttttgttttgtttttagacagagtcttgctctgtctcccaggctggagtgcaatggtgtgatcttggctcactgcaacctccgcctcccaggttcaagcaattctcctgcctcagcctcccaagtggctgggattacaggcacctaccaccacacctggctaattttttgtattgtaagtagagatggggtttcaccatgttggccaggcctgtctcgaacccctgacctcagttgacccacccgcttcggcctcccaaagtgctgggattacaggcgtgaaccacggtaccctgccaattttaactttctataagagatttgcccagcctgggcaacatggagaaaccctgtctttaccaaaaatacaaaaaatttagctgggcatggtggcgtgtgcctgtagtcccaggtacttgggaggctgaggtggaaggatggtttcagcctgggacgcagaggttgcagtgagccgagatcatgtcattgcactccagcctgggtaatagagccagatcctgtctcaaaaaaaaaaaaaaaaaaagctttgtatccattttggcatacatagactagtatgtatggcagtaaatagactagtggcagtaaatagactagtacctacatatattttttgtattcgtggcatacttaacttttgcttaattttaaaaatatatttctaggcttgtagttcctctgtaagttttttcaaattgttgcaaatctctgaaaatgtttccaatgtatttattgaaaaaaatccacaagtaagtggacctgcacagttcaaacctgtgctattcaaaggtcaactatatagtctgtaatacgtgatgggtgtcacgctgagtgtctacagtgagtgttgtctcacttcagcttcacacaacgctgtggtttagccttgccactgccgtacggatgagcgggtgttcactacacgaaggtactgggcagaggagcaaacactgactaaattctagcctgtgctttgctcaacaagccacatgcctgccttgcttgcatcaagggaaggagtattgtgttctaatttgaagaaatacaccagccactccttaggcagcacttggtgcgggatgggctcctctggaaagggagcacctaatttgcacaaaggtgctgcaccaggtagctacgatcctggaatgggatgaagaaacttgcctaaggccctacagcaaggaaggggtaaaagcaggatgtgatccttccaagcagaacccccaagagccaggggacatttgggaaacctgggggtgtgggggttaaccctgtatttgtggtccatttcgcaaaggatagcatcccacatccatgagagggaggtcagaagggagtggctgtggctgtgaaggagacagacacctgggcacctgctctaaattacagcaatgccatgcacatgatgatgtattggagcacaacaaatggcagccaccagctggggtgcacgcaccaatttctacaaatgagctctgttcaggctgaaatgtctacgcatgcaaggatttttcttgtaattgatgatatatccccagcgcccagaagacagagtggcacgcagtaggtgctcagtaaatgttcgctcaatgaatgaatgaatgcctctactagccttccaaagaaagttctatgtctgttttatcaatatggaaacaggccagagaaattaagtaacttcttttggaagccagaaacaagcccggcacttgtgcagtgacaacaccagggaatttcagtaaaaacccaaactccaccccagggagccccagtgcctcctcccgcatcacagggtgccagggcccactctctttgactcctgctccatagcccctgctgggtactgggctgcttctcccagttcctcctgcctccccccacttagggcaaatccagtgcctccctggggcccaggagactcagtgtgatccaccccaggcgcctctcactcctgtgagacccaaacctcctatcagctcccccagcaggccaagtctgtgcacccgtgactcccctgccccaatgttccctccagtggctctttgcctcttcagtatccacgtcttcatgatccttcccctactccatcccccaagccctcaccaccaaatgtaatgtaaacagcatgacagcaaaaactttttgttcacaactgcgtgttgttttttttttttttttttttttttagacacagtctcactctgttgctcaggatggagtgcagtgacacagtcatggctcactgcagccttgaattcctgggctcaagcgattcttccatttcagcttcccaagtagctgggaccagaggcacatgccactaaacccagctaatttcttttttctttctctcttttttttttttttttcccctgtggacatagggtctcctcatgttgcccaggctagtctcaaacaacctgtgctcaagcaatcctcccacctcagcctgccaaagtgctaaaattacggacctgagccaccgtacccagcctactgctgcacttttaacagcttaattgagatattatgtacatatcatcaaattcaccaatgttaagtgtacaattcaatgatttttagtaaatttactgaggtgtgagtccattaccatcagctagttttagaacattttcatgaccctagtaaaggattttacttcatgttcatttaaacttaatcttgggccaggcggggtggctcacgcctataatctcagcattttgggaggctggggtggacggatcacctgaggtcagtagttcgagaccagcctggccaacatggcgaaacctcatctctactaaacatacaaaaattagccaggcgtggtggcgggcacctgtaatcctagctacttaggaagctgaggcatgagaatttcttgaacccgggaggcagagtttgcagtgagccaagattgcaccattgcactccagcctgggcgacaacaagaccctgtctcaaaaaaaaaaaaaaaaaaaaaaaaacaacttaatcttcatttctacctccatcccccagacaaccacgagtctactttctgactctataactttgcctattctggacatatcatataaataaatgaaatctgacaatatatgtacatggtcttttacgtctggcttgtttcactcaacataaggctgtagtgtgtatgggtagctcattccttttctttgccaaatagaattccagtatatggatgtgccacttttttattcactcaccagctgatgggctgccaggtaacatttccactgttggtgactatgaccaacactgctgtgaacatttaggactgagtctttaagtagacctgagtttccacttctcttaagtaaatacctacggtggaattgttggatcgcatggtgaatttatgtttaactttttaagcaactgccacctgctttccaaagcagggacaccacctcccattattctcaccagcagtgaatgaggcccctatctctctacattctcgccgaccataggcattgtctgactttttgcttgtggccattctagtggatgtgaaatcatatctcattgtgccctgtgattgtttgaatgaactaatagatcacctgtgaaactggacagcacttgggtttgaaccctagtggtgacatttcacaagctgtatcacctggagcaagtcacttccctacggtgaaggacaaggattttatgacataaaagcgttgccctagaagcagtgtctgctatggattatgtgcccatgaaaaggcagctgctgtcatcatcgccaccaccattattattgttattattattacattgtcaccccagagataatcctgcaccagtgacagggaaaatagcagctggcatccgctgcctgctcacgaccacacgccaggcttccgtcaaaccactcaacatgtattagtaatcttttaatcgacctacatattgttttaatttgcatgtgttaatgcgttgatctatgagatgggtattatgatgagctctgttctgcaggggagaaagcagaaacatggagaatttaagtcatttcccccaaatcacaaagtcaggaagaaacagacctcacggagctcgctctctgtcattgcatcacacttcctgcccttacaaggcaaattggataaatgccattctagagaagcagacaaaattcaagtgaagaaggggagaggaagacgtcggctggggcctgcttagagcatcccagctgagactgcatgaggagggaggcacgcagttgtggaatttgttccccttttagcatgctgaccagccctggcaacggagctcaaggcatctatgtgccactgctcaacagtgagtgacgtcatgggcacggccaggtctttatcagttctgccggataaatagccaactgcactaggtctggagagacagcaaggtgctgtgcggcagagcatttggggtctcaaagaagcaggtgagcctgggcccgaggggctgggtggaggagcaccttggtgcttctctgctggggaagggacaggggacagggcatgctcaggaagacaggcaggctgaccccgcctggaaggcacccagagacaagaggggtgggcgtagtgacctcgtgcccttttaggggagatgctgctggccagaggccgttagggcccccactaccaactccatgttactctctctcaccagtggccaccaccatggatacaggccccgaccagtcctacttctccggcaatcactggttcgtcttctcggtgtaccttctcactttcctggtggggctccccctcaacctgctggccctggtggtcttcgtgggcaagctgcagcgccgcccggtggccgtggacgtgctcctgctcaacctgaccgcctcggacctgctcctgctgctgttcctgcctttccgcatggtggaggcagccaatggcatgcactggcccctgcccttcatcctctgcccactctctggattcatcttcttcaccaccatctatctcaccgccctcttcctggcagctgtgagcattgaacgcttcctgagtgtggcccacccactgtggtacaagacccggccgaggctggggcaggcaggtctggtgagtgtggcctgctggctgttggcctctgctcactgcagcgtggtctacgtcatagaattctcaggggacatctcccacagccagggcaccaatgggacctgctacctggagttccggaaggaccagctagccatcctcctgcccgtgcggctggagatggctgtggtcctctttgtggtcccgctgatcatcaccagctactgctacagccgcctggtgtggatcctcggcagagggggcagccaccgccggcagaggagggtggcggggctgttggcggccacgctgctcaacttccttgtct

SEQ ID NO: 7828 - DNA, 6000 bp, Homo sapiens
ccgaaagcatccagaaatgaagccagttgatcatacacaacacacaccatagtcataccttcaacagaaaaaaagaataaaaaaattaaaaagccccacccaaatgaaagcaaattttgaaaaagaagcatcagccctctcagatgagaaggaatcagcacaggactctggcagtacaaaaagccagaatgttttgtcacctccaaaggatctcactagctccctagaaatgtatcctgaccaaattgaaatgctgaaaatgacagatctagaattcagaatgtgagtggcaaggaaactcagcaagacccaagagaaagttgaaatgcaatactaagaagccgtaaaaatgagccaggatgtgaaagatatatatatagggggggaaaaaaactatatatagagagaaagaaccaaaacacaaaaagaatcaagcagaacttctggaattgaaaaatttactacaggaatttcaaaatactgttggacacctcaacaatagactagaccaagtagaagaatttcagaggcagaatgaattttttaaattaacctagtcacacaaaaataaagaaaaataattttaagaaatgaacaaaggctttgagaagtataggattatgggaaatgaccaaactatgacccactggcattcctgacagagaagaagaaaaaataagcaacttggaaaatgcattttaacgtataattcaggaaaatgtccctaatcttgctaaagaggtcaacatgcagatataagaaattcagggactgcctgagaggtactatacaaaatgaccatccccaaggcacatagtcatgagactgcatgaaagaaaaatatctttaaggaagctagaaaaaagagccaaattacctataaaggaagtccactcagaataacagtggatttcttagcagaagtcttacaatttagaagagattgggtgcctatttttggcttcttttttttgatggagtcttactctgttgcccaggctggagtgcagtggtgcgatcttggctcatggcaaactctgcctcccgggttcatgcaattctcctgcctcagcctcccaagtagctgggattacaggcatgtgccaccatgcccggctaatttttttgtatttttagtagagacggggtttcaccatattggccaggctggtctcaaactcctgaccttgtgatccacccacctcagcctcccaaagtactgggattacaggtgtgagccaccacgcccagccttctaggcttcttaaagaaaaaatgccagccaagaatttcatatcctaccaaactaagtgtcacaaaggagaaataaaatctttcctagacaatcaaatggtaagagaattcatcaccaccagactggtccaacaagaaatgctcaaagaagctgtaagcatgaaaacaaaagaatgatacttgctaccacaaaagcacacataagtacaaagcccacagaccctataaagcaactacccaaccaagactacaaagtaattaactaacaacacgaagataaatcacaacagggacaaaacctcacatattaaccttgaatgtaaatggcctatacactccacttaaaagacatagtgtggaaaattggataaaaatatgagacccaaccttctgctgtcttaaagagacccatctcacatataatgatacccaaaccctcaaagggttggagaaagatctctcatgcaaatggaaaacaaagggttgctattgttgtatgagataaaacagactttaaaccaacaacagtaaaaaagcacaaataagggcacttcctaatgataaagggttcgattaaacaagaagatttaacatcctatatatataaacacccaacgctggagtacctagatttataaaacaattactacgatacctaagaaaagagatggacagccacacaataatagtggggttcttcaacagcccattgacagcattagacagatcattgaggcagaaaactaacaaagaaattctggacttaaattggacacatgatcaaatggacctaatagacatctacagaatactctacccaacaaccacaaaatatacgttcttctcatctgcacacagaagatactctaagattgacccaatgcttagtcatgaagcaaatctccataaatttaaagaaatgaaaattataccaaccttcttctcagaccacagtggaataaaaatagaattctcaaaatcacacaaatacatggaaactaaacaactatttcctgaatgactttggggtaagtcattaaggaagaagtcaaaaaattaaggcagaagtcaaaaacttctttgaaacaactgaaaatagaggcacaacataccaaaacctctgggatacagcaaaagcagttttaagaggaaattttatatcactaaatgcctacatcaagaagttagaaagatctcaaattaataacctaacattacacctgaaggaactagaaaaacaagagcaaactaaatccaaagctagcagaagaaaagaaataactaaaatcagagtagagctaaacgaaattgtgacaaataagccattcaaaggatcaatgaaatgaaaaattggttctttgaaagaataaacaagatttataggctgcaagctagattaacaaaggaaaaaaaaaaacctccaaaaaagcacaatcagaaataacacagacaagattacaactaattccacagaaatacaaaagatcctcagagactgcgatgaacatctatattcacatgaatcagaaaatctagaggaaacaaataaatttctggaaacatacaaccaagattgaaccagaaagaaattgaaactctgagcagaccaataatgagttacaaaattgaatcagtaataaaatatctaccacctttaaaaagcccttgaccagatggattcacagccaaactctaccagacctgcaaagaagagatggtaccaatcctactgaaactttaccagaaaattgaggaggagagattccctactcattctacaaaaacagtctgattctgatatcgtaatctggcaggacacagtgaaaaaagaaaactgtaggccaatagcccgatgaacatagatccaaaaatcctcaataaaatactagcaaaccaaatccagcagcatgacaaaatcataattcagcatgatcaagtgggctttattcctgggatgcaaagatgtttcaatatatgcaaatcaataaatgtgactcaccacataaaattaaaaacaaaaattatatgatcatctcaatagatgcagaaaaaaacatataataaaatccaacatcccttcatgataaaaaccctcaaaaaactaaacatcgaaggaacacacctcaaaataataagagccatccaggacaaactcacagccaacatcatactgaatgggcaaacgttggaagcattccccctaagaaatggaaaaagacagggatgcctactcccactactcctattcaacatagtagtggaagtcctagccagagcaatcaggcaagaaaaaggaataaaaggcatccaaatagaaaggggaagtcaaattatctctgttcactgatgatatgattctatacctagaaaaccctacagattcctccaaaatactcctagacctgataaatgactggcagtttcaggatgcaaaatcagtgtataaaaatcagtagcattactatataccaacaattgtcaagctgtgagccaaataaagaacagaatcccaattacaatagccacacacaaaaataaaatacctaggaatacatctaaccaaggaagtgaaagtgaaagatctctacaaggagaactaaaaaacacaaataaatgaaaaacattccatgttcatggattagaagaatcaatatcattaaaatgtccatactgctcaaagcaatctacagattccacccaattcctaccaaattatcaatgtcatttttcataaaatggaatcattctaccaaaaagacacctgcatgtgtatgtttgtcacagcactattcacaatggcaaagtgatggaatcaacttaggtgcccatcaatggtggactagataaagaaaaaatggtacatacacatcacgaaatactatgcagctataaaaaagaatgaaatcatgtcctttgctgcaacataaatgcagctggaggcctaagtgaatgatcctaagtgaattaacacagaaacagaaaatcaaatgctgtatgttctcacttttaagtgggaggtaaacaatgggtacacgcaaacattaaagatggaaaccatagacagtggggactccaaagtgggggagggagggcggaggacaagggtgggaaaactgcctattgggtactatgttcacaattttggtaatgggttcaatagaagcccaaacctcagtattatgcaatatacccatgtaacaaacctgcacatgtgctcccgaatctaaaataaatattttcaaaaagcaattgacctatattattaacattttaatctacctgtatatatgttttaatctgcatgtgttcatgctttgaaatatggtacaggtactatgacaatccctgttctgtaggggaggaagaagagacacatctcttcccccacatcacaaagtcaggaaggaacagacctcacggagtccagtctgtcactggctcatgctttgtgcccttaaaaggcaaactggataagtgccattctagagaatcagacaaaattcaagtggaagagaggggaggggaagaagacgtcagctggggcctgtttggagcatcccagctgaggctgcgcaaggagggaggcacgcagttgtggaatttgttcccctttttgcatactgaccagccctggcaacggagctcaaggcatctttgtgccactgctcaacagtgagtgatgtcatgggcacggccaggtctttatcagttctgccggataaatagccaactgcactaggtctggagagacagcaaggtgctgtgcggcagagcatttggggtctcaaagaagcaggtgagcctgggcccgaggggctgggtggaggagcaccttggtgcttctctgctggggaagggacaggggacagggcatgctcaggaagacaggcaggctgaccccgcctggaaggcacccagagacaagaggggtgggcgtagtgacctcgtgcccttttaggggagatgctgctggccagaggccgttagggcccccactaccaactccatgttactctctctcaccagtggccaccaccatggatacaggccccgaccagtcctacttctccggcaatcactggttcgtcttctcggtgtaccttctcactttcctggtggggctccccctcaacctgctggccctggtggtcttcgtgggcaagctgcggtgccgcccggtggccgtggacgtgctcctgctcaacctgaccgcctcggacctgctcctgctgctgttcctgcctttccgcatggtggaggcagccaatggcatgcactggcccctgcccttcatcctctgcccactctctggattcatcttcttcaccaccatctatctcaccgccctcttcctggcagctgtgagcattgaacgcttcctgagtgtggcccacccactgtggtacaagacccggccgaggctggggcaggcaggtctggtgagtgtggcctgctggctgttggcctctgctcactgcagcgtggtctacgtcatagaattctcaggggacatctcccacagccagggcaccaatgggacctgctacctggagttctggaaggaccagctagccatcctcctgcccgtgcggctggagatggctgtggtcctctttgtggtcccgctgatcatcaccagctactgctacagccgcctggtgtggatcctcggcagagggggcagccaccgccggcagaggagggtggcggggctggtggcggccacgctgctcaacttccttgtct

SEQ ID NO: 7829 - DNA, 6000 bp, Homo sapiens
ctacaaattaactgtgaaagttggaatgggtaacaagaaataaagacataccaggcaggggctggttcaagctccccatggcagatggaaaacatgacacattcacagaagtggaaaatggccctgcccagacagcaaagagagagaagagtgatgtgagtggaagctggcaagggccatgctaggcaggcctttttaaggatgttgatatttctcctaaaagcagtgagaagtctctgaaaggacaagaaggtcgtataattggattgacatttttaaaatgattccactaatacagtatggagaactgactgccagggaagcagatggatgagaggaagtgagtcagggccctgctgaaatcctggtagggatgatggcactgagatgggatgatggagatggagacggatggatggattcatatttggaatccataagtatttggggagtacatcagactgcattctagggataaggaagaagataatattgagattcactttaagactgactctagtcaggctcagtggctcacgcctataatcccagcactttgggaggccaaggcgggcgaatcacttgaggtcaggagttcgagaccagcctgaccaacatggtgaaaccccgtttctactaaaaatacaaaaattagccgagtgtggtggcacatgcctgtaatcccagctactcgggaggctgaggcatgagaattgcttgaatctgggaggcagaggtggcagtgagccgagactatgtgccactgcactccagcctgggcgacagagtgagattcagtctcgaaattaaaaagaaaaaaaaaaaagactgactctaagataatggtgcaggagatgtgatgggaagagatcttacgccccaagacagggaagggtggaagaaggaagatctgaggccaggtctggacacatttgatttggttgatttgggacacctgtgagacacccaatggcagtgtcaactaggcagttgagcgtgtacatgtgaagctcacagaaacctagggtgaagattcaaaccaggggtgtcatgaaggtggtaactggaactacggaaacagttgcagtcgactagaaggagagcacaggcgagaacaggaaagaacctggagccaagcttgaaggaagtcaccatttcggggatgagtaggggaatggtgagctagcaaaggggtacgagaagtgaccaaaggaaagagagggaagctagcagcgtaacgtatcagaatttgtgaaaagaggatgtttccagaagggcgtggaaattgtgttgaatgctaataaaataagaaaagcgtaagtccactgaatttaggaacatggaggtcactgctaacatcgggaagagaaaatcccatggaaaataggcacagaacccagattagggtggactgaggggcgagtgagaattaagaatgtggaagtgattacacagaactttagataagggtccaacttcctgtgatgacaggctgcattataaagacgatgagagaaaactgaacttggaaggaactgtgaaggatattgctcttgtgaaagtttacccccttgaactcggtctgagaggttgggtttccttttcctgtgacgtaggtggacatcatgaactgtgagactgaaagcctccttggtgatgctcccttcataactgcggtgaacattcataactgctgtgaacccagagagggggtttcgttggggcgtcttccacagggggactcacgacagtgacggcgaaaggcaggaggtggggggagaagaacgtgcagagacagagaggcagtcccactcctcaacacttgttttccaatgagtttcctggattctgcaattaaatccagatcctcgtgcatgtttataggaaatcataaaagcgaaatgacacaaataaatttggtggcaacaagagagaatggtctctttcttagttctcctgttgatctgagaagcgacgtgtgctgggggaaggaaataaagaactagaacgccttcagaggagagtagagtggacgagaaagaaaagctaaatatcaaaatgtctagaccctggggttacagaccacaaaaagaataaatgactgactgactgaatgactgaatgaatggcaaacaataggaagtaggtatgtcctagggaaagaatggggattctgtgagcaggaatcaggccacagatggcagaacagagacttctttctgagacttcctccctagttcaagaggaaaacacgttccaacgatccttgctgcattaggtgtgtatttcaaagggaccttcaggagctcctaacctggggctaccaaggtcagagagggggaaacagtgagactttatcagggaaaggaatggagcctgagtgccactccctgacgaaaagccacatgggcacgtgaactcgggcctcctgaattcctgacactttcccaagagggacagcacatccatgccctgagcctctggaggctgcaccaagtggctcactctctgtgaagctgcgttacaggcttgagacgaggcagcacttacgggcatctgctaagtgctttatatacacaacctcactgaatcctcgcagaagtcctaggatgtcagaattcgcatgctcacttgactacagcaaactagacttcagaaaacggatctgcccccaaggttgtaatgaagggacctggatttgagcccatatctgcatgactataactcccacaccatttccatcacaacaagatgcaggccaggaccagcctgtttcagctgagacgggcaaaagaaatgtgttgggggcagagggcaggagaccatagagaaagtaaaaaaattgaagaagaaaaggaaggagtgccgggtgcagtggctcacgcctgtaatcgcagcactttgggaggccaaggcaggcggatcacttgaggtcaggagtgcaagaccagccaacatggtgaaaccctgtctctactaaaaatacagaaattagctgggcgtggtggcaggtgcctgtcatcccagggaggctgacgcaggagaatcgcttggactcgggaggcagaggttgcagtgagctgagatggcgccactgcactccagcctagacaacagagcaagattcagcctcgaaaaaaaaaaccaaaaaaaaagaggaaaaataaaaaggaaggaggaaagctcatttctgagaatgagcagaatgacagaagaaactgcctaagaaagagaaaagaaaataatctgacttgggaagtaaaaaaagaaaaatgcctgggaattttttttttaaatcaggaattaaggacagaaaaatctgaatttggaagtcaagagtgaggattctctagggagagaataaagatgctgggcctttcctttgggtttgagaggaaatagtgcttaaagactgaccttcctttctctggtcacgtggctggtgctagtataaatgcttactaccagccaggttcctcaccattttttcctgcatggcatggacagaagcaggggctaaagctctgttcctctctcctggaagcttgcagacctcccttcagaaccaatcccaagaagccacctatccggaacaacacaaggcaaggcagctagtgtagtgcttgtgctctgggaagagaggccaggatcaggtttgaggggaaggttctgggagactggaggaaggatgtcagaaccaaatggaagactcatacccagagacaggagctagtgtgaggagcaaggaaacagccaggaaatcaaggctggagagtggacagagggacaggacctgggttggggccagcaagggtgacaccccaagtggaaactgagttaccccgtgaagaagacgagttctatttatggtcagaatgccacgctcaagggccagtgaaggcctgtgggcttttctgaatatttctctaaggtcttctagggacaagccttcctcctaaggctagtgctggttcatccttcttcccctccaccctcctctaagcctcccagcttccccttttcttttctttttttttttttttagacggagtttttgctcttaccgcccagggtggagtgcaatggcgcaatcttgactcactgcaacctctgcttcccggttcaagcgattctcctgcctcagcctaccaagtagctgggattacaggtgcccgccatatcacccggctaattttttttttttttagtggagatggggtttcaccacgttggccaggcttgtttcgaactcctgacttcaggtgatctgcccgcctcggcctcccaaagtgctgggattacagaagtgagccactgcgcccagccccagcttccccttttctagagagtcccagagtttggtgttggacaggagaggacaaggtgggggagaatctgtgctctgcaaaacagacgaacggaagtaggaagctgggctggtggctgggcacttgggtcctttggagagctggcactgggtatccgcgcctggggcgccacagcctctttatactgataagcatcttacagctctctcccggcactgatgcctttctctcctgcaggtctctgtctgagaaagggacttgagtaaagttagaaactggcaacagtaacttcctgtatctgtgaggacaggaggagaaaggctagggaaactggagggggaattcccttgggaagccacgagttggtctcctccagagacacatgatggcaaacataatcactactgcttaatatcccgccccaggcaaagtcaataattgctctgggtagttcgagcaggtggtgtgagcaagccgtggtggcatcagaaagcacagtcctgggaaggggacggtgccggggaggatgtccgcatcctgaaggagagctggctgcgcgggctgtgagtgagacctccctgaccccgcccttttttgttcccctccaggatgctgccggactggaagagctccttgatcctcatggcttacatcatcatcttcctcactggcctccctgccaacctcctggccctgcgggcctttgtggggcggatccgccagccccagcctgcacctgtgcacatcctcctgctgagcctgacgctggccgacctcctcctgctgctgctgctgcccttcaagatcatcgaggctgcgtcgaacttccgctggtacctgcccaaggtcgtctgcgccctcacgagttttggcttctacagcagcatctactgcagcacgtggctcctggcgggcatcagcatcgagcgctacctgggagtggctttccccgtgcagtacaagctctcccgccggcctctgtatggagtgattgcagctctggtggcctgggttatgtcctttggtcactgcaccatcgtgatcatcgttcaatacttgaacacgactgagcaggtcagaagtggcaatgaaattacctgctacgagaacttcaccgataaccagttggacgtggtgctgcccgtgcggctggagctgtgcctggtgctcttcttcatccccatggcagtcaccatcttctgctactggcgttttgtgtggatcatgctctcccagccccttgtgggggcccagaggcggcgccgagccgtggggctggctgtggtgacgctgctcaatttcctggtgtgcttcggaccttacaacgtgtcccacctggtggggtatcaccagagaaaaagcccctggtggcggtcaatagccgtggtgttcagttcactcaacgccagtctggaccccctgctcttctatttctcttcttcagtggtgcgcagggcatttgggagagggctgcaggtgctgcggaatcagggctcctccctgttgggacgcagaggcaaagacacagcagaggggacaaatgaggacaggggtgtgggtcaaggagaagggatgccaagttcggacttcactacagagtagcagtttccctggaccttcagaggtcgcctgggttacacaggagctgggaagcctgggagaggcggagcag

SEQ ID NO: 7830 - DNA, 6000 bp, Homo sapiens
tagctgggcatggtggtgcgcacctgtaatcccagctacttgggaggcggaggcaggagaatcacttgaacccaggaggcagatgttgccgtgagccgagatcgtgccattgcactccagcttgggcaacaagagcaaaactccatctcaaaaaaaaaaaaaaattggccaggcgcagtggctcatgcctataatcccagcactgtgggaggctgaggcaggccaatcacctgaagtcaggagttcaagaccagcctgaccaatttggtgaaaacccaactctgctaaaagtacaaaaaaaaaaaaatagccaggcatggtggcaggtgcctgtaatcccagcctctcgggaggctgaggcaggagaatcacttgaacctggctcactgcaatctctgccctagcctgggcgacagagtgaaactctgtctcaaaaaaaacaaaaattttgtttttaattctagatgacgtgttgatagatgcagcaaaccaccatggcatatgcatacctatgtaacaaacctgtacgttcagcacatgtatcccagaacttaaggtaaatttttttttttaattggaaaactgaaaaaaaaaaatattttttttttagagacgggatctggctatgttgcccaggctggtctccaactcctgggcttaagtgatcctcccatgttggcctcccaaagtgctgggattacaggtgtaagccaccacactaggctcttagctccttttcctgtttcacaccaccagctcatttcctctccactgcttccccctccctgccagcctctcccttccccctctacagcctccccacccctcactgccttcctctgtggagtgacctcaggccctcattggggccaaggagagactcccttccaacctaaacttctcccaaggtgctgggcaatctcagacccccttccctctccactccaggacaggagcctttcccaggacccggagggcaccaggaatgtggggcagagagcggggaggcagcctaagtccaggaagcgagaaccctcgcctcccccgagacttgtctccttccagcctctggtgcagacctcatgccaccccttactccctgtccctcctggggcctctgggccttaatttctcctctacaaaatgggcagactcgcctctgtcccacttagagtcccaggggagtgcatgctcacaaatgtccattgtatgattaatgtgcaggaattggagtttgtattaacaggagatgagagctgggagctgggactgggctctgagcctgtcccccacccccagtcacgtacagatgttccccatatttagggcaaaggaacagactggaagtagagacagcagagaatgtgtgtgattcactggcgactgtcatgatgagaccatgtgaggctatgggttagtgtgcaattgtgacacgatggtgtgtgtgaccctgtgtgcacctgtgtgactgtgcgtgactgtgggaggtgggattgcagggtgtgacaagtcactgtgacgtgcacagctatgggacagtgaggttgtgtgcgtgacatgtatatgactgtatgtgacttgtgaatatgggtgagactaagggagagttgtgagtctgtatgaccatgtcactcagtgtgaccgtgggggtgagggtgacggtgtgagagtgtttgcctcatgacagttggggaatgtgtgttgttggaatgtgactgaggactctgtgggtgactgtgaagtgtgtgagtgtgtgacggtgttaatgggtgtggttgcatgacattgtgtgtgactttcagcttgtgtcataaaaagactgtataataagacattaaaaaaaaaaaaggccaggcgcggtggctcatgcctgtaatcccagcactttgggaggccgagacgggtggatcacgagatcaggagatcgagaccatcctggctaacacggtgaaaccccgtctctactaaaaatacaaaaaattagccgggcatggtggcgggcacctgtactcccagctactcgggaggctgaagcaggagaatggcgtgaacctgggaggcgaggcttgcagtgagctgagatcacgccactgcactccagcctgagtgacacagcaagactctgtctcaaaaaaaaaaaagagtcgggcacagtggctcatgcctgtgattccagcactttgggaggctgaggcaggcagatcacctgaagtcaggaatttgagaccagcctggccaacatagtgaaaccccatctcttctaaaaaaaaaaaaaaaaaaaaaagccagccacagtggctcacgcctgtaatcccagcactttgggagactgaggcgggaggatcacgaggtcaggagttcaagaccagcctggccaacatggtgaaaacttgtctctactaaaaatacaaaaattagctgggcatggtggcgcgtgcctgtaatcccagctacccgggaggctgaggcaggataattgcttgaaccaggacccgggaggtggagattgcagtgagccaagatcacgccactgtactccagcctgggctacagagggagactcggccaaaaaaaaaaaaaaaattattagccgggcatggttgcgggcgcctgtaatcccagctacttgggaggctaagacaggagaactgcttgaacctgggaagcagaggttccagtgagctgagatcgtgccactgcactccagcctgggcgacagagtgagactccatcccaagaaagaaagagagaaagggagaaagggaggaagggaggggggaggggagaggggagaggggagaggaaaaggaaaggaaagtcctttgcagcaacacagatgcagctggaggccagtatcctaagtgaattaacaaaggaacagaaatccaaacaccagatgctcttacttataagtgggagctgagcactgggtacacatggacaccaacatgcgaacaacagacactggggactcctagagggggcagggaaggagacaagggttaaaaaactacccgttgggtgccatgctcactacctggatgatgggatcatttatacccccaacctccgcatcgtgcaatacacccccgtgacaaacctgcacatgtgccccctgaatctaaaataaaagttaaggccaggcgcggtggttcatacctgtaatcccagcactttgggaggccaaggcgggaggatcacttgaggccaggagttggagaacaatatggccaacatggtgaaacctcatctctactaaaaatataaaaatcagccaggcgtggtggcatacacctgtagtcccagctactctggtggttgaggcatgagaatcgcctgaacccaagaggcagaggttgccaagttggcgccactgcactccagcctgggtgacagagtgagaccctgtctagaaaaaataataaataaaatgaattaaaataaatgaataaataaataaataaaagttgaggctgggtgtgatggcacatccctgtagtcccagcactttgggaggccgaggcaggaggattgcttgaggccaagagttggagaccagcatggccaacatggtgaaaccccatctctactaaaaatacaaaaattttagctgggtgtggtggcacacacctgtagtcccagctactcgggaggctgaggcaggagaatctcctgaaccctggaggcggaggttgaagtgagccaagatggcgccactgcactccatcctgggtgacagagtgagaccctgtctcaaaaaaaaaaaagttgaaattattttttaataaaatggtggggcatggtggctcatgcccatagtcccagctagtcaagaggctgagttaagaggatcccttgagcccaggaagtggaggctgcagtgagctataattgttccagtgcactccactctcataaataaataaataaataaaatgtaaaaaggattgtatgggccgggtgtggtggctgtcgcctgtaatcccaccactttggaaggccaagacatgtggaacacctgaggtcaggagtttgagaccagcctgggcaacatggtgaaacaccgtctctactaaaaatacaaaaattagtcggttgtggtggtgtgtgcctggaatcccagctacttgggaggctgcggtgggagaattgcttgaacccaggaggcggaggttgcagtgagctgagatcatgcttctgtactccagcctcagcaacagaggaagactctgtctcaaaaaaaaaaaattctatgtctgcgagtaaccacacaactgcatactgcgtatatttatttcatgacaatccttccttgaacccctgctcttaacgattttggggacccagtggtgacccagatgtcctggctctaccctcctgggccacacaggctagcagggcaacagtgtttgtgatgaaacccggtgattgcgtgaatgtgtgggtgattgacagtgttgttggaactgtgagacactgtgagcgttactgtgtgtgtgcaggagtccatagccctgggtacatgactgtgtgtcacagtggatgactgtccacctgtgagtgagagactgtggctgtctgggtgtgaccatgggactgtatgggtgtgactgaatgtgtgactgtgtgagtaacagcttgtgaggttctgtgactgtgcctttccatggctcagcctatgggattgtgtgtgacactgcatgtttgattgagtgactgaggctctgggaatgagtggcggtgggggcgggtacctgtgggtgggacagcatgagagattgtacacacttggtgcaggggtcctcaggacgataaggacaattcagtaactgccctccctcatgaccttgatgactgccccctgctcggctctctgccccagagctccccgcttccgttccctgtcccgccttggccccgccccctcccatcaccccgggctgccagcgcctgtcacctctcccagagccgagacaaggcagttggaggcagcggtggcaggggctgcaggagcaagtgaccaggagcaggactggggacaggtgagggctccccaatcccagcccattctccctgcccccccttgacctctcaagtctctggcactctccctctctgcttctctgccctgcctttgtctctctgtctctgtgcccaccaccatctctgctcatctctgtctcttgatgtctctgtctgcgtgtttccatctctggttagctgctagataacttctctttcccctgctctgtctccctccacgtctctgcctcttctttgtctcctagcccacatctgcgtctctttctctgtttgtttttctctggtctctggctgggggtctcattctgtccctccgtctctgcgcctctcagtctttacatttctgtctcttgtgtctgtgacgccgttgtctgtccttctgaggctcgacctgagatcctctctgcttccgtctttctctacgtggagccgcgggggcgcgggtgagtgggtgtcgggcgttagaccgatttccaggcatctgcacatctaaccccggatctgtcgcttctctagtccctaagtatttggatgctgggaaagggttgttccacttactctgggctttatctacccccagcggggaaagttttgtaaggtcaggttcctatgtgtgctagaaaaccctttgggcttggagagtgggagctcggatgggcgtttcaagttctccaccaggctgtgggaactcagatgggcgtttcaagtaccccactagggggtactgaaaaccttcaagtttttcagttccccatagaaaaggggtctaggctgacggtttctaccccctcctctccaaggcggtccccgggttcccaggagtctgtaggtccagacttcggtgacactgacacttccgcccagcgtagctctagggcaaccgcccgctcagcaaacaccccccccttccacctttgctgccccaacaacagtcaggggaggccggggaatcactta

SEQ ID NO: 7831 - DNA, 6000 bp, Homo sapiens
aggcatgagccattgcttctggccccaattgctttctttttctttctttctttttttttttttttgaggcagagtctcactttgtcgcccaggctggagtgcagtggtatgatctcggttcactgcaacctcttcctcctgagttcaagtgattctcctgcctcagcctcccaagtagctgggactacaggtgcctgccaccattcccagctacttttttgtatttttattaaagacggggtttcacaatgttggtcagcctggtctcgaactctttacctcaagtgatcttccctcctcggcttcccaaagtgctgggattacaggcgggagccaacgcacccggccgcttttactattcttgcaacttttttcatttgacattccatcgaaataaaaagttaaaaaaattctttttcttctgagggggtgttttatcaaggacacctttatcaagggtcccgggcctaaaaatgttaagaacccatgatttacggctgaggaggcaacttccatccaaaatcctaaaagtcaagttcctgtgacctggcttcctgaacctccccgctcctgcgccccctggaggtcagggctagaacaacacggcattcctataatgctccaaatcgccacaaatcgaccttggaaatcctgggtgagtaacgcagactgcgcacatggcttcaattagcggaactaaaacttgctgaacatcgtgtacccgcgtgtccatggccaaacacaaactccacctttgtaaaagtctaggtgaattcccagctgaattcagaagcgtgacaggaatgggacttttcattggtgtctttttcttttttctatttttagagtggggaggagtgtatttctggattgtttaaatatttacaatgagcatgcatttcctttgcaattaaaagaaaaccagatttttttttttttttttttgaggcagaatgttgctctgtccccaggctggagtgcagtggcgcgatctcggctcactgcaacctctgcctcccgtgttcaagcaattctcctgcctcagcctcctgagtagctgggactacaagtgcccgccaccacgcccagctaatttttgtatttttagtagagacggggtttcaccatgttagccaggatagtctcaatctcttgaactggtgatctgcctgcctcggcttcccaaagtgctgggattacaggcatgaggaccgcacccggccgaaaaccagatttttaaaaattgaagtttgctgtagaaaaatactgtgggagaaagttgtgggtggtgttttgtagagtcgcagaaggacatgggaaaaaaaaattgagtgtgtttctgtaatcatcataacaatcacactcattgtgccgtaggctccaagggagggctctgagctgtggttaccagataaaatacaagattctcaggtaaaatgtgaaaaaaaaaatatttttgtgatcttaactcactgcagtcttgatctcctgggctgaagtgatcctcctgcctcagcctcccaggtagctgggaccacaggcacgtgccaccatgcccagctaatttttaatttattttgttgagatgggatctcactatgttgcccaggctgctctcaaactcctggcctcaagcgatctttcctcggtgtccccatgccctgggattacaggtatgaagcaccaggcccaaccctgaaatttaaagttaactgggcagtctgtaatgtgtttttgtttgtgtaggtgtgtgtgctaaatcaggcaaccccctattctgagcagaggagtgctttgatctgacttagattttaataggctccctctggttgctggtggagatgagactacggagggggggcagtgaagatcccagagaggaggctgctgtaatggtccaagcagaaggtgatagtgatttggatcagggtaacagagccgaggtggtgagaggttgacaggtcatgcatctatttcgaaggaaaggccatgtccaggctccttagctcggcattcaaggcttctctccaccactggacacacttactctctagcttctcagaccctgttgcagatagaatcatgatccccaatgatgtccacatcttaatcccctgaacctgtgaacaggtgaccttccatggcaaaagggactttgcagataggatgaagttaaagatctttagatgggggagcgattatcctggattgggtctgggtgggctcagtggaatcacaagagtccttatatgaggaagatagaaatttgagacatacggtagaggaggaggtgatgagaccacagaggcagggacgggcgtggtgcaaccacaagccaaggaatttcaggagccacctgaaggtgggagaggcaaggaacagattctcccctggaacctctggagggagtggtgacatcttgattttggacttctggcctgcagaaccatgccaaaataattgtctggctttttttttctttttttttccttgaggtggagtcttgctttgtcgcccaggctggagtgcagtggtgccatcttggctcactgcaacctccacctcccgggttcaagtaattcttgtgcctcagcctcccgagtagctgggactacaggcatgcaccaccacacccaggtaatttatgtatttttagtagagatggggttttgccatgttggccaggctggtcttgaactcttgacctcaatgatctgcccgcctcagcctcccaaagtgctgggattgcaggcatgagccactgcgcccggtcctggtgttaagcccgcagtttgtgctaattggttacagcagcctcgggaaggtaatctaggctccttccttgccccaggctctaggaagtatcttagcccccagccctgggctgcagacctgtaccagtccatggcctgctaggaaccatgcagcatcgcaggaggtgagtggcaggtgagtaagtgaagcttcatctgtatttatagccacgccccttcgctcatattaccgcctgatctgtcagatcaggggcggaattacattctcataagagcgtgaacccaggccgggcgcagtggctcaagcctgtaatcccagcattttgggaggctgaggcgggtggatcacgaggtcaggagttcgagatcagcctggccaagatggtgaaaccacgtctctactaaaaatacaaaaattagccgggtgcagtggtaggcacctgtagtcccagctactcgggaggctgaggcaggagaatcgcttgaacctgggaggcggaggttgcagtgtgccgagatcgtgccactgcactctagcctgggtgagagagtgagactccatctcaaaaaaaaaaaaaaaaaaaaaaagagcatgaaccctgttgtgaacagcgcatgtgagggatctgggttgcaagctccttatgagaatctaatgcctgatgatctgtcactgtatcccatcacccccagataggaccatctcgttacaggaaaacaagctcagggattccactgattctacattatgttgaattgtataattatttcattatatattacaatgtaacaataatagatggagatggttgtggcttgtgtagttgggggacagggtagctccattttctattgccaactttataaccctagaaggatgatttttttcttttcttttctttttcttttcttttttttttttttgagattgagtcttggtgttgtcagcctgggctggagtgcaatggtgcaatctctgctcactgcaacctccgcctcctgggttccagcaattctcctgcctcagccttctgagtagctgagattacaggcacccaccaccacgcctggctaatttttgtatttttagtagagatggggtttcaccatattggccaggctggtgacgatggttttttttttttgagacagagtcttgctttgttgcccaggctggagtgcagtggcgcaatcttggctcactgcaacctctgcctcccaggtttaagcaattctcctgcctcagcttcccaagtagctgggattacaggcacctgccaccacacctgggtaatttttgtatttttagtagagacagggtttcaccatgttggccagactcgtcttgaactcctgacctcaagtgattcatttgcctcagcctcccaaagtgctgggattataggtgtgagccattgcacctggccctagaaggaagatttaacagtaaaatatacttaaatgctgggctacctccgcagactagctcagcctctttgggtctcaaatcagcctggccgggaggctgagtggaggttacagtctctgctttcttgaatcccaagggaggggtttaagccaactgcattcctgagcttttgcccagaaggctggcgtcttaggaggaaagagatagatggctccaggccgggcgcagtggctcacacttgtaattctagcactttgggaggttgaggtgggtgattgcctgagctcaggagtttgagtccagcctggccaacatggcgaaaccccgtctttactaaaaatacaaaaaattagccgggggtggtgacacacacgtgtaatcccagctactcgggaggctgaggcaggagaagtgcttgaacccaggaggcagaggttacagagagccgagattgcaccactccactgcagcctgggcgacacagcaagactctatcaaaaaaaaaaaaaaaaaaatgagagagaagagatggccccaaatagggaaaccaaggccaggagaggggccgagcctgcacaggagcttcctcggttttccgagcgccggccccccttctctgcctgggaggaggtggttagagtcccctgggtgtgtgccccgcagagggagctctggcctcagtgcccagtgtgcagaccaatgagagccccagagagaaagacggtcatttcctccctgcatcttcccttggggctttaaaaaccacagcccttgggcaggagggaccttcgatcctcggggagcccaggagaccagaacatggtgagtctcgaaggggaatgggagcaggaaactttgtcctgggtccctcccatctttgctccagtgggtccttctctctccccaactctcgccgtcaactctgtctgtctctccctttccttctctctccctgtcttccacctcccaccttccctctctcctgcatcccaggctctcacactccagggctgggatgtggccatgggaataagattgtcaagattgtgggagcaacagcaacctcgtggggctggggcccgagaagattccccaggggaggggacccttgagttgggtctagtaaggtgactaagaattccacaagcagccgagcgcagtgggtcacacctgtgatcccagcacattggggattgtgccaaggcgggaggattgcttgaggccaggagttcaagaccagcctggccaacatagtgagaccctgtctgtatttttttttttatttaaagaattccacaagtgaagaaatctagaacaggccttccaggcagtgggaatggcagagaaaatgttgggaggctggaaagaaccagtttggaggaatggtcaagttactcagatgctcttgcagatagatgttcttttctttttcgacttggggtcttgcactgttgcccaggctggagtgcagtggcaccatcatagctcactgcagtcttgaactcttgggctcaagtgatcctccctctttagcctcctgagtatctgggaccacaggcatgcaccactatgtccggctaatttttaaaatttttattcttgtagagatgggttcttgctatgttgtcagggctggtctcaaattcctggcctcaagccatcctcccaccttggtctcccaaagctctgggattactggcatgaggccattatgcctggtcgtttgagatgttctgcatgacagagatggggaaactgaggcccaggcaggagcagagatggatggggaccctccat

SEQ ID NO: 7832 - DNA, 6000 bp, Homo sapiens
agcgagacaaggccactcctattttgtactgcttataaagattcactgggactggtgaggtggcagtgctcagcagcatccgacaggagccctggcaaacaggacggatttccaggactctaccagctgccagacacggcagggagagaccccagacctcctgggtcctggctgtgggcccggattgggctcccaagtggcgtttgactcacgtggggacactcttggaagagacggtaaggatggaggctacaagggcgggaaggagggagagagagattgcatgatcttggcttctcggaatcattactttcagaatctgggaagcagaactagagtttgagaagtgcagtcttattacagccacactggaacgcacgtcacagtcctgggctcttgaattaacttgggcagcccagcagcaaagctcttgtcaaaggatctaagcattttttttctttctctttttggagacaggttttcattcttgttgcccaggctggagtgcaatggtgccatcttggctcaccgcaacctccacctcccaggttcaagggattctcttgtctcagctgggattacaagcgcatgccaccatgcctggctaattttgtatttttagtagagatggggtttctccatgttggtcaggctggtctcgaactcccgacctcaggtgatctgtccgccttggcctcccaaagtgctgggattacaggcgtgagccactgtgccctgcccaaatggtttttcacacacagatgtatgggaaacagcctctctcaaacctgcaggaattcctgcagctttcggcagatccaccaaactgtagcatgtgtagcaagcaagccctttaactcagcgattccaattcttttctctttctttccttttctctctttctttcttttgacagggtctcactctgtctcccaggctggagtgcagtggtgcgatcttggctcactgcaacctccgcctcccaggttcaagtgattctcctgccccagcctgctgagtagctgggattacaggtgcacgccaccacacctagctaatttttgtatttttagtagagatggggtttcaccatgttggccaggctggtctccaacttttgacctcaggtgatccacctaccttggcctcccaaagtgctgggattacaggcgtgaatcaccgtgcctggccccctcaatgttctatcacaaaatctgtccacattcttgtgtggtgtttgttcattctcatcgtgtagaatattccacagggtgaacaccccatgatgtgtttatccattctgctgtgggtggctatttggacggtttctcatcttgggctgctgtgaacattctggcacatgtattctggtgagcatatgtgttcttttgcggaaaggaggctgattgctgggtcgtgagggaggaatcctagaagatggatgttcaggaataaagaatgttcagactccttttttttttttttttttttgagatggagtcttgctcaggctggagtgcagtggtgcgatctcggctcactgcaacctccgcctcctgggttcacgccattctcctgcctcagcctcctgagtagctgggactacaggcgcccgccaccgcgcccagctaattttttgtattttttagtagagatggggtttcaccatgttagccaggatggtctcgatctcctgacctcgtgatccacctgcctgggcctcccaaagtgccggggattacaggtgtgagccactgcgcccggccagccttctttgattctgctccagggttttccagagcagagaacccagcaagactggatgcacagacaggcgtgcaccaagaggcacatgtgagggtgcttgcaatcacaacaaaagaaacctaagtgaccacttagtctctctgtgcctcagtttactcttttatcctttcacttaccaaatatcgaccatgcctgtgctgtgtgccaggttctgtcccagatgccagggacacagcggcacccgaggctggaaggagctgatgttgtgggatatgaggatgataatattgacctcaagggtttgtgttgagggttatatcttgtaggtcataggtgctcaataaaagccatctattattttaattattatgaaataataagaagggtacctatgatttaaaagctagatataagtacagacgctctttgacttacaatggggtcccatctctatcaacccatcgtaaggctgggcacagtggctcacgcctgtaatggcagcacttttgggaggctgaggtgggaggatttcttgagcccaggagtttgagatcagcctgggcaacagagtaagggctgtccatacagaaaaaaaaaaaaaaattagctgggcatgatggcgtgcacccgtagtcccagctactccagaggctgaggcaggaggatcagttgagcctaggaggtagaggctgtggtgagccgaggttgaaccactgaactcagcttgggtgactgaacaagacgaaaacacaaaacaaaagcccccaacattttcaacataagttgaaaatattgtaaatcaaattggatttaatacacctagcttactgaacatcatagcctactttttttttttgagacagggtctcactctgttgtccaggctggagtgcagtggcgcgatcttggctcactgcagccttgacctcacgggcgtagcctacctcaaatgtgttcagaacatttacattacccaacagcaagacaaaatcatctaagccaaatccaatttttttttttttgagatggagtctcactctgtcacccatgctggagtgcagtggtgtgatctcagctgactgcaacctccacctcccagcttcaagggattctcctgcctcggccttctgagtagctgagattacaggcactcgcccccacgcccagctaatttttttttttttttaaatctttagcagagatgagattttatcatgttggccaggctggtctcaaactcctgacctcaagtgatccgtctgcctaggactcccaaagcgttgggattacaggtgtgagcttctgcacctggccctgtttctcattattctccttaccattgttattgaatggcctttagttaataagcaccacttgggcagacagtggactgtttttgatgctttgaggacgaatggggttgatatctgtacagatagacaggaaaacagatatcgggcacgttaagtggaaaagatgaagaaatggaacaacgtatgttgaaagctcccatttctggttaagacgttacaaaggaaatgccatctacgataccattgctttgggcttacagctgggcaaattatatgcacagaaagtttcctggattgggctgggcatgttgactcacgcctgtaatcccagcactttgggaggccgaggtgggcggatcatgaggtcaggagattgagaccatcctggctaacacggtgaaaccctgtctctactaaaaatacaaaaaattagccggaagtggtagcgggcgcctgtagtcccagctactcgggagactgaggcaggagaatcatgcgaacccgggaggtggagcttgcagtgagccgagatcgcaccactgcactccagcctgggcgacagagtgatactccgtctcaaaaaaaaaaaaaaaaaaaaaaaaaaaaaaagaaagttttcgttttctggattgtaatcaacaagggccaggaagggtggagtctttgcggggtgagaggatgcgtgtggacagtgataacagcagctagcctacgtatgacacccactgaaaaccagcgctatacactcagctctacccttctaacttgttgaattcttacaacaccccctaaggcaggaatattattattcccattttactgaggcacagatagtttaggtgacttgcccaaggccacacagctggtaggaatttgagggtttttgttgttgttgtttgtttgtttgttttttatgatgcagtctcgctgttgtcgcccaggctggagtgcagtggcatgatcttggctcactgcaacctctgcctcccgggttccagcgattctcttgcctcagtctcccgagtagctggaattacaggagcccacaaccatgcctggctgatttttgtatttttagtagagaccaggtttcaccatgttgctcaggctggtcttgaactcctggcctcaagtgatccgcccacctcggcctcccaaagtgctgggattacaggtgtgagccactgtgcccggctagggggggttcagtttttaaatgctgtactctttctttctttctttccttccttccttccttccttccttccttccttccttccttccttccttccttcctttctttctttctttctttctttttctttctttcttgggacagggtctcactctgttgctcaggctggagtgcagtggcgcgatcatggctaactgcagcctcaaactcctgggctcatgtgatcttccaccccagtcttagaaaaggttgggattgcaggcacgaaccactatgcctggctaatttttaaattttttgtagagacagagggtctcactgtgttgcctaggctggtcttgaactcttggcctcaagcgatccttcctcctcaactcagcctcccaatgtactgggattacaggtgtgagccactgcacctggctaaattctgcacaccttttactctagggataaaaataatacgaaagtggaatgccagactccgaatacacacaccaagtggcctggactcttcactgctacctggcatgggggaggggagtgccccaacttcctctctgtccttcctgttgcctcaacaccagctggagtgctgagcagtgccagccaacccataatagtcagcagagagcctcagggccaggtcactctgacattgtgggggtgggggggtggggactcctgcctgggtcctgtgctacccacagctttgtctaccggagcctgtgtgccacgtgctggacaaatcttaactcctcaaggactcccaaaaccagaggtaggttcacctcaatgactcttgtttccccgatgaggaaataggcacagccagctgcaactgacacccacagtcatggaggccggggctgctcaggaccacttgctgtgctgcctgccagctctccagagcccaagatttggagatggtaatattctagggcatggggttctgcagcggggactaacacactttgaaatttacctacttagggctgggcgcggtggctcatgcctgcaatcccagcactttgggaggctgaggtgggcggatcacaaggtcaggagttcgagaccagcctggccaatatgatgaaaccccgtatctactaaaaatacacaaattagttgggcatggtggcgggtgcctgtagtcccagctactcaggaggctgaggcgggagaattgcttgaaccctggaggcggaggttgcagtgagccgagattgcgtcactgcactccagcctggatgacagagcgagactctgtctcaaaaaaaaaaattttacctacttagctgagtgatcttaggtaaattacttaacttctctgtgccttatctgtagaataaatataacaatagtgtcaaattcagacagttattataaggtttcagtgaggtcaggcacggtggctcatgcctgtaatcctagcactttgggaggccgtggcaggcagaccacttgaggtcaggaattccaaaccagcctgaccaacatggtgaaaccccgtctctactaaaaatacaaaaaattagccccgggcatggtggtgcacgcctgtaatcccagctactcgggaggcttgtggcaggagtaatgcttgaacccaggaagcagaggttgcagtgagccaaaatagcgccactgcactccagcctgggtagcagagtgagactccgtctcaaaaaaaaaaataaataaaataaaataaaacaaggtttc

SEQ ID NO: 7833 - DNA, 6000 bp, Homo sapiens
agggtttcgccttgccgcctagactggtcttgaagccctggcctcaagtaattctcctgcttgggtctcccacagcgctggggttacaaggtttgggctttcaaagcatcactctggctgtagggtggtgagtggctggtaggagataaatataaagctggagtccaggcacggtggctcacgcctgtactccccacactttgggaggccgaggtgcgtgaatcacccgaggtcaggagttcaagaccagcctggccaacatggtgaaaccccgtcgctactaaaaatacaaaaaatagccaggcgtgtccctggggtgcgtctcaactatactacttaggaggctgaggcaggagaattgcttgaatccgagaggcagaggttgcagtgaaccaagattgtaccactgcactccagctcgggcaacagagcgagatcctgtctcaaaaaaaaaaaaaaaaaaaagctggggccctgtgtgcttgggtgatagggctatggagacaggacatagtggacagaggcaagaggctttttggaggcaaaattgacagggctttttgatgaattgggtgtgcgtgttgagggagtaggagagagaggtattcaaggattctacacccctatctcagatgagcatagtgaggctcggggtgcaggggaagccctgagcccaagatcacacagtcataatccagtgtctcaactagagcttcgacttatgcctgtctgctgtgtaagctcaagctttcctcaaccccagacctctcttctctgtctgcacctcacccttggaggacattctcaggctcaaagacgtaaatagcatctaaatgttttttgtttttttttttgtagaggcaaggtcatgttgtgttgcccaggctcacgcaatcttcctgcctctgcctcccaaagtgctgggactacagaggtgagccactgtgcccggctggcatctaaattctaacgacttcgacatgcccgtatccagccagaaacccctctgtaatttttttttttttgagtcttactccgtgacctaggctggagggcagtggcgccatcttgcctcattgcaacctccatctcctgggttcaacgaattctcctgcctcagcctcccgagtagctgggattacagccacgtgccaccacacccagctaatttttgtatttttagtagagacggggttttgccatgttggccaggctggtctcaaactcctgacctcaggtgatccacccgcctcggccttccaataagtgctgggattacaggcgtgagccaccatgccgggtcccctcctgtaatcttgctgctggtatccagctgccttagtgaagtttccccgggatgccttacaggcatttcaaaggcgaagtgaccaaccccgagctcctggtcttaccccaaacctgctctcctgccgtctcccctatcccagtgcacagcaactccagcttccatcggttcaaaagtcctgcagtcaccccgacactgctctccctctcacctcacacatccagcccagcagcaaatctagccagctccaccttgaccctggaatctgcttcccaccccctcctctgacatcaccctggtccccatccccatcactgcccacctgggttactgcagcagcttcctcccggcctcctgcttccatcccaccccctcagtctagtctcaaccttaaagtcacagtgattgttaagacctaagtcagatattgttccttctctgctcaacagtctcttgtaactcccatctcactcacaggaaaggccaggagagtctgcactatgactcacagggtcctgctccatctgcccgcttccctctctgccttcacctcttacctctcttcccattgcccacgtggctccagccacaccggcctccctgctgttccttgagcattccaggcaccgtcctgcctcaggactttgcacaagctgctggttctgcctgaagggctcttcctccagatacgtatgtgcctcactactttgttatctcctccaaatctttgctcaaatgttatattctttttttttttttttgacatggagtctcaccctgttgcctaggctcgagtgcaatggtgtgatctcggctcactgcaacctctgcctcccaggttcaagtgattctcctgccccagccctctgagtagctgggattacaggtgggagcctccacgcccagctaattctttgtatctttagtagagacggggtttcaccatgttggccaggctggtctcgaactcctgacctcgtgatccgcacctctcagcctcccaaagtgctgggattacaggcatgagccactgagcatggacaaatgttacattcttatcggggtcttccctgaccaccctgtttaatgtaccagtggcccctttctgtctcatccttcacattcccagttgtccttatcttgattttttttttttttttttttttttggtgacagagactcactctgtcacccaggctggagtgcagtggcctgatctcggctcaccacaacctccagcttcccagattcaagcgattctcctgcctcagcctcccaaatgcctgcgatcacaggtgtgtgccaccgcacctggctaatttttttatttttattagtgacggggttttgccttgttggccaggctggtctcgaactcctgacttcaagtgatctgctcacctcggcctcccagtgtgctgggattacggatgtgaaccactgcgcttggccttaccttgatctttttctaaagaaaacatttcatgatcttcatttcttcctgtcaatatgtgtcaccatgtgatattaactcctttcagcctagaggacttacttccttaagcaattcctgcggtctgtaggccatatattatttcagatctggcttatctgaaaatgcccttttttcactttcatttttgaaagatattttcacagaatataaaattctggattgacagacttttctgctgccaattttttcaaatagtggagtaatttttaatattttgtccagattttaattttttttttgtctgtggcaccatttgtctgacaaagttactctgacattatccaaagttaaaagaacctccatctcattatttttactttatttttattgagacagggtctcgctttatcacccaggctgaagtgaaatggcgtgaccatggctcattgcagcctcgaattccagggctcaagtgaccctcgtgtctcagtctcccaatttgctgggactacaggcacgtgccaccatacctgactaattttttttttttttttttttgagacagagtcttgctctgttgcctgggctggaatgaagtggcacgatcttggctcactgcagcccctgcctcccaggttcaagggactctcctgcctcagccttcagagtagctgggattacaggcacgcaccaccaagcctggctaatttttgtatttttagtagagacaggcttttgccatgttggccaggctggtctcgaactcctgaacttaagtgatccaccagcctcagcctcccaaagtgctgggattacaggaatgagccactacgcccatctcacggctaatttttaaattttattttatttttatttttttgagacggagtttcgctctcgttacccaggctggagtgcagtggcgcgatcttgattcactgcaacctccgcctcccaagtttaagtgattcttcagcctcatgagtagctgggattacaggtggctgccaccacacccagctaatgttttttgtatttttagtagagacggggtttcgccatgctgggcaggctgatctcgaactcctgacctcaggtgatccgcctacctcagcctcccaaagtgctgggattacaggcgtgagccactgtgcatggccacaaaaacttgtaattatttattttttgtagagacggtctcactatgttgcccaccttggtttggaactcctggcttcaagcaatccttctgcctcagcctcccaaagtgttgtgattacaagcatgagccaccacacctggcccctccatttcatttattatttttccataacacttgtagtcttctaaagcagtatatcatgaagtaaatttattatatgtattacacctgacatctctcactgggatgtaagttccatgagggcttgttttgttacacgagttatgtccagtacttagaacaatattatagtgtccagtgagccgagatcgtgccattgcactgcagcctgggtgacataaggagactctgtctcaaaaaaaaaaaaaaaaaaagaacaatattattgtgtcataaaaagcattcaggctgggctcaatggctcacacttgtaatcccagcactttgggaggctgaggtgggaggatcacttgaagccaggagttcaagaccagcctgggcaacacagcaaaaccccatctctacaaaaaagaatttaaggcctggcagagtggctcacacctataatcccagcactttgggaggctggtggacgggtcacgaggtcagtagttcaagaccagcctggccaacatggtaaaaccctgtctctactaaaaacagaaaaattagccaggtgtggtggcatgtgcctgtagttccagctacttgggaggctgaggcaggaaaattgcttgaaccttggaggtggaggttgcagtgagccgagatcataccattgcactacagcctgggtgacagagagagcaagactctgtgtcaaaaaaaaaaaaaaaaaaaaaaggtaaaaaaattagccaggcatggtggtaagtgcctgtagtcccagctactccaggaggctgaggggggaggatctcttgagcctaggaggtggaggctgcagtgatctgtgattgtacctttgcactccagcctgggtgacagagcatgacgctgtctctaaaagaataataataataagcattccataaaaattatggaatggagaaatcatgaatggggtctcggaggggaccagaggctgcagtgacaggcaacctggggtcctgacacgtgatcgctcttgttccaggaagatgaactcttccggatgcctgtctgaggaggtggggtccctccgcccactgactgtggttatcctgtctgcgtccattgtcgtcggagtgctgggcaatgggctggtgctgtggatgactgtcttccgtatggcacgcacggtctccaccgtctgcttcttccacctggcccttgccgatttcatgctctcactgtctctgcccattgccatgtactatattgtctccaggcagtggctcctcggagagtgggcctgcaaactctacatcacctttgtgttcctcagctactttgccagtaactgcctccttgtcttcatctctgtggaccgttgcatctctgtcctctaccccgtctgggccctgaaccaccgcactgtgcagcgggcgagctggctggcctttggggtgtggctcctggccgccgccttgtgctctgcgcacctgaaattccggacaaccagaaaatggaatggctgtacgcactgctacttggcgttcaactctgacaatgagactgcccagatttggattgaaggggtcgtggagggacacattatagggaccattggccacttcctgctgggcttcctggggcccttagcaatcataggcacctgcgcccacctcatccgggccaagctcttgcgggagggctgggtccatgccaaccggcccaagaggctgctgctggtgctggtgagcgctttctttatcttctggtccccgtttaacgtggtgctgttggtccatctgtggcgacgggtgatgctcaaggaaatctaccacccccggatgctgctcatcctccaggctagctttgccttgggctgtgtcaacagcagcctcaaccccttcctctacgtcttcgttggcagagatttccaagaaaagtttttccagtctttgacttctg

SEQ ID NO: 7834 - DNA, 6000 bp, Homo sapiens
tgtagccacccagccaatggtattttgttatggcagctctaacaaactaaacactctgcttcttttcattgactctcgtctcaatgacagcccccaaatccacgcagttaccttggtgcaacagttctgaagaaaatggccacaatattcttggacactccttccactgacaggaaggcaggcatattgtatcgcctctcccctggaacctgggtagggttgggactactttgaccaaagaacgtggtagaaatgacttccacgtagctttcaaggctaggtcaaaaaaggctaggaagcatcttctggttctcctgggacacgtgttctggaggaaggcagccattgtcctgggactttgattcctctgagaccaccatgctggaaaggctgcctgtaggcacttggtgcaataccagcctagttcagcatttgagtcattccaacccaggcatctgacatgtgaatgaaggagctctagatgactccaattcacagtcttctagtcaccccccagacctttgagttttgggtggcagagacaagcatctctgtgccttatcctaattcccaacccacataatccatgaacgtaatgaaatggttgttttacatgctatgatttgggtggttatacagcaattatgaattatgaatgtgggcttcataaagacccttcatgcttcctcattctccagagccatttggtctccaagctcagtctaccaagcctggaaatctctccctaaactacacctcctctctagcacactactccagcacaggcaattattcgacaagttcaccttgatctctggcaacttcttaccctttaagatctctgcctccaactgggagcattctcagagccatccctttgcagggggactctagagcaatgttttctggaagcacacacctgacaagtcactctcctgcttaaatagcttttaagcagaagaaattgtaagaaagaaatttttttttagaccaatatccttgatgaacattgctgcaaaaatcctcaataaaatactgacaaaccaaatccagcagcacatcaaaaagcttatccaccacgaccaagtgggcttcatccctgggatgcaaggctggttcaatatacgcaaatcaataaatgtaatccagcatataaacagaaccaaagacaaaaaccacatgattatctcaatagatgcagaaaaggcctttgacaaaattcaacaacccttcatgctaaaaactctcaataaattgggtattgatgggacgtatctcaaaataataagagctatctatgacaaacccacagccaatatcatactgaatgggcaaaaactagaagcattccctttgaaaactggcacaagacagggatgtcctctctcaccactcctattcaacatagtgttagaagttctggccagggcaattaggcaggagaaggaaataaagggtattcaattaggaaaagaggaagtcaaattgtccctgtctgcagatgacatgatggtatatctagaaaaccccattgtctcagcccaaaatctccttaagctgataagcaacttcagcaaagtctcaggatacaaaatcaatgtacaaaaatcacaagcattcttatacaccaataacagacaaacagagagccaaatcatgagtgaactctcattcacaattgcttcaaagagaataaaatacttaggaatccaacttacaagggacgtgaaggacctcttcaaggagaactacaaaccactgctcaatgaaataaaagaggacacaaacaaatggaagaacattccatgctcatgggtaggaagaatcaatatcgtgaaaatggccatactgcccaaggtaatttacagattcactgccatccccatcaagctaccaatgactttcttcacagaattggaaaaaactactttaaagttcatatggaaccaaaaaagagcccgcattgccaagtcaatcctaagccaaaagaacaaagctggaggcatcacgctacctgacttcaaactatactacaaggctacagtaaccaaaacagcatggtactggtaccaaaacagagatatagatcaatggaacagaacagagccctcagaaataacgccgcatatctacaactatctgatctttgacaaacctgagaaaaacaagcaatggggaaaggattccctatttaataaatggtgctgggaaaactggctagccatatgtagaaagctgaaactggatcccttccttacaccttatacaaaaattaattcaagatggattaaagacttaaatgttagacctaaaaccataaaaaccctagaagaaaacctaggcattaccattcaggacataggcatgggcaaggacttcatgtctaaaacaccaaaagcaatggcaacaaaagccaaaattgacaaatgggatctaattaaactaaagagcttctgcacagcaaaagaaactaccatcagagtgaacaggcaacctacaaaatgggaaaaagttttcacaacctactcatctgacaaacggctaatatccagaatctacaatgaactcaaacaaatttacaagaaaaaaacaaaaaactctatcaaaaagtgggcaaaggatatgaacagacacttctcaaaagaagacatttatgcagccaaaagacacatgaaaaaatgctcatcatcactggccatcagagaaatgcaaatcaaaaccacaatgagataccatctcacaccagttagaatggcaatcattaaaaagtcaggaaaaaacaggtgctggaaaggggagaaataggaacacttttacactgttggtgggactgtaaactagttcaaccattgtggaagtcagtgtggtgattcctcagggatctagaactagaaataccatttgacccagccatcccattactgggtatatacccaaaggactataaatcatgctgctgtaaagacacatgcacacgtatgtttattgcagcactattcacaatagcaaagacttggaaccaacccaaatgtccaacaatgatagactggattaagaaaatgtggcacatatacaccatggaatactatgcagccataaaaaatgatgagttcatgtcctttgtagggacatggatgaaattggaaatcatcattctcagtaaactatcacaaggacaaaaaaccaaacaccgcatgttctcactcatagatgggaattgaacaatgaggaaacatggacacaggaaggggaacatcacactctggggactgttgtggggtggggggaggggggagggatagcattgggagatatacctaatgctaaatgacgagttaatgggtgcagcacaccagcatggcacatgtatacatatgtaactaacctgcacattgtgcacatgtaccctaaaacttaaagtataataataaaaatatatatatatataagaaagaaattttaagaagaaattctaagttctttttacagcattcaagaccaaccaagaaattgcctctgccgccctctacatacttaatgcttattgctgtctgccttatcatctatgctctggtaaacaaaagtaacctgcttttttgtgacccctttcgtgggtatttttactcccctctgacaagaatgcattattttttctcctttatctgagtctttaagactcagcctacatgttccctcctccggatattgactctagatccgtgaatctgagttagtggttccttttagaggacctcacaaggagccaggcatctgtctatcactacgtgcccccaccctattgtaactaagcactgcattctcacctctctattcaggtggtccgcagagcccatgtctgattgatctctatgtctccagcagccagcaaggaagcacctctttagagacctgcacctatacaatacctaccaccttttatttctcgatatgtgaactccattgagaacaaacgagtaaatgtaggtaatgtgccttcttcttttcttttcttttctttttttttttagatggagtctcgctctgttgcccaggctggagtttagtggcacaatctcggctcactgtaacctccgcctcccaggttcaagcgattctgccgcctcagcctaccaagtagttgggattacaggtgcccaccaccacgcccagctaattttttttgtatttttagtagaggtggggtttcatgatgttggctaggatggttttcaactcctgacctcaagtgatccacccacctcggcctcccaaagtgctaggattacaggtgtgagccacagcgcccagccagtaatgtgccttcttaagttctgtgagccattctaacaaattatcagaacagaggaaggggttataaacatccccccacccccgatttatagccagtcagtcagaagtacaggtggccacctgggacttggattggtgtctgaagtgaggacagttttgggagagtgagccctttaacttgtgggatctgacactaactccaggtagacagcgtcggagctgaattgaattgtgagatacccagtggtgtccccagagaactggagaattgcttgatatggaaaagacccacacatttgatgccagaagtactgcataagtcgagaattgagtttgacttaatcatcatatttgggcttgattgcgtggctgaaactcttcccacttcagtaattgtttctttcattttcatgaaactctgaagaaggaagggctggacattcagattccttgacccttgacatttggaagcatgaactccagtctctcacagaaggctagaggtgaaggaacattcagacacattggtttctaagaagagtccgctgacaacatacccaaggtgtcttctgaaaattataagaaatcctgagtttctgttaggggattggctccagctccattgtccctcccccatcattcagtagtctccgcgaaagcccttagagccggtgttgctccacaggaagccaagaagcacacaggaaaaggagcttagctgctggtaagttggggactgacaatttaaaatttatcaatggaactcctgctctctgacaaacacctcctaaattctagagcagtgctgtaatggagcatccacttgccacaggtggcttttgagtgcctatgtttctatcttgatctgaaatgtgcttaagtgtaaaatatacttagtgtagtttaatcattagtatgatcaaaataatacaatttatctcgttaataactttcattttggtaacgtgttccaatgattttttttatttgcggggttaaatgaaacatattattataattaatttctcccaatgattttacttttttaacatggctactagaaagttgtaagtcacgtgtgtggctggcatttagggcttgcattaccctgtctctactaaaaatgcaaacaacaaactagccaggcgtagtggtgggagcctgtaatcccagctactcaggaggctgaggcaggagaatcgcttgaacctaggaggccgaggttgcagtgagccgatatcgtgccattgcactccagcctgggcaagaagagtgaaactctaactcaaagataaataaacatgtgaaggagccaagtgtgaggagcttaagaggaagagcatggtaggcagaaggaacagagaaggcagaagccccgagatgacaatgagctgcatgttcaaggaatcagagcccgttatgggtggagcccagtgtgtcccacgagagtgcagagatgaggtctgaggaatgcacagggcaggtccaggggtacttgagggaacttaagataaggataagttagaagtttggaagccattagaaggtgttgaaaatagcatcaccattttattggaccttttttttttttttttttgagacagaatcttgctctgtcgcccaggctgaagtgcagtggcgcagtctcggctcactgcaaactctgcctctcagggtcaagcgattctc

SEQ ID NO: 7835 - DNA, 6000 bp, Homo sapiens
aattttccaaatctttaggttctacttcctttttgattataattgccttttttttttttttttttttgagatggagtcttactctatcacccaggctggggtgcgcagtggcgcgatctcggcccactgcaaactctacctcccaggttcaagcaattctcttgcctcagcctctgagtagctgggattacaggtgttcaccaccacacccggctcatttttgtatttttagtagagacagagtttcactatgttggccaggctggtctcgatctcctgacctcatgatccacctgcctcggtctcccaaagtgctgggattacaggagtgagccaccgtgcctggcctataattgccattttttatgtaactcttttcctgcattttactataagcaatcaagagaagccatgccacaccctcaatgctttgcttagatgtaacttccaccaaacatcttattccatcactcagaagttctaccttccacaaagcacaaggacacagacacaattcagccaagttctttgccactttataatgaggctgtcctttcctacagtttccaataatatttctcattttcatctgagatctcatcagaatgacctacttctacatttctaccaatactctgatcattattgcaatcttcttctgagcctgtagcagaatcaccctcaacgttacattcatggaaatgtagagttttttctagcactcacaaactcttccagcctctcacattacccagttccaaagccatttccacatttttaggtatttctaattataatacctctacttcttggtacaaattagtcttttagcccatttgacctgctataacaaaatctattagagtaagttatgatccacataaatttattactcacagtactggaggatagaaaaaccaacattaaggctgggcacagtggctcatgccaccataatctcagcagtttgggatcgcttgaggccaggagtttgagaacagcctgggcaacatggcaaaatcccatctttaacagaaaaaaaaaaaaaaattagccaggcatggtggcacattcctgtaatcccagctgcttgagaggctgaggcacgagaatcccttgaactcaggaggtggaggttgcagtgagacgagattgcactgctgcactccagcctgggtgacaaagcaagactttctctcaaaaaaaaaaaggaaagaataaaaaaagaaaaaccaaggttaggatgccaacagattccatgtctgatgagggcccattactcatagacagcgccttccatatgtcctcacatggtggaagacagacaagctccctcaaggctttcttacaaaggcactaatcctatttatgagggtgcaaccatcacgctctaatctcctccctatggtcccgccttttaataccataacctagggggttaggatttcccatacaaatctggggaggggagaaacaaacattcagactgtagcagatgcagcaatagtaactttaggaatgtggaatttataaagagcactcattcttccccattccccacagccatccagtctccaaggctggtctactcagcctggacaatctgtctctaagctacgcctcttcttgatcacactattcctgccctgggtagctcttcaagaaccttaccttgatttctggcaacattctccattctaatatctctgtctccaattagaaacattctcaaaggcatccctttgcaggactacagaacaatatttttcagaagcacacacctgacaagtcactgtcctgcttaaatggttattcatgttattatgaagaaattccaagtccttcttgtagcattcaggaccctccaacagatggcttctgccacttgctacacactcagtgtttattgctgtctgcctcaccatctatgctccaataaccgcaggtaacctgctattttttgaccctttcctgcgtgctttcactctcctctgcctggaatgtatttttttttgcttctttatctgagtctttaagattcatcccggatgttatctgcattgcacttggaagtgaccctggaccctgtcagtctcagttagttgttccttttgggaaatctcataatgaaccaggcatctgtctatcactatatacccccactctactgtgactgcttagggaaatggcagaggacaccattgtgcacaaagggtgcataagactatgcttagtcacagtagagtgacgctgtcacctctttacctgggtagtcggcatctccagggtaaggcacatgtctgtttaagctctatgtctgcaggagccagcaagggagcacctcttcagaggcctcatgcaatacccaccaccctttattatactgataagtaaattccattttaatcaggtggcaggtagcaatgtgccactgtcctaggaaagcaatcatgattggcctaagccaatatgagcaacttgtcttttttttttttttttttttttttgaggtaaggtattgctcattgcccaggctcgagggcagtggcatcatcatggctcactgcagcctcaacttccctgacaaagcagtcctcccacttcacctcctgagtagctggaactacaggtccacaccaccacacccagctaatatttttttggttttagagatggggtctcactatgttgcccaggctggtcttgaactcctgagctcaagcaatcttcctgtcttggcctccccaaattctggcattacaggcgtgagccactgtccctgacctttatttttatgtatcggtatttttgttatttcttggccattgattggtctagagatggcatgctctggcaatgaaagacaaggagaggtcctgaagagactctggacaaggtttccctctgtaataaaatggaagaggcatgtgaatgagtcacattttctgcctgtctcatgattctggctcgggagggcctgttgatgcaatgtccagaacagtggcagccattctgtggtcactttcaagaaagccctagaagaaaaccaatatgatgatggagtggaagggtgacattaaactcaatttttgttcaaactccagatctatccccttccaaaactttttttaataataaatttctccatggcttatgtgcttcattggtttactctaccttatcactgaaaacatccagtgaatcagagagaaaatagaaaatagttgactcttgttttgtggctctccactgtttttcatggttctattccttgggcttgagaacaacattctgatggtgtttaaaaactcagaaagagcccatctccttagatcagtagtccatagagcatctccctaggggcagaaggttagggggttaatctcggcaatggtgtggagtgtacagtgtctctcatttaccttccttacctctctacatgctcctagttactgcttctctttgtaactctgaggtatgaaatacctcaaagcatatttgattttgtcacagatttctggcacagggctcttaaaacccttggaattccctgagtgataggagtattatttgttattcataaacagccccttttgatcatagctgagtttatgctaaggagatcatggccttaggatgggactggtcaccagaaagaccaagggattagagggttggagctgtcagccccacctactgatctccaggaaggggaggcagggactggagattgagttccataaaaactcttgaacaatgagatttgatgagcttccacattggtgaacactcaggagtgctgggagagtggctgcctgaagagagcatggaagctccatgcaccacccaaccccttccctgccatatacctgccatatgcctctttccaatggactattcctgaggtatattccttatataaagcaacagatgcaaacaaagtgctttcctgagttctgtgtgccattctagcaatttattggtgtcattggaacacccaatttatagcctgtcagtcagaagtacaagtagccacctgggacttgcaacagatgtctgatctgatctgagaacagtttgtgggagtgagccctttagcttttcggatctgagctgaatccaggtagacagcatcataaccgaatttttaattgcaggtggcccaggtggtgtccccagagaattggagaatttcttggtgtagagaaaaagtatatttggtcagaaggattgtgaaagtagagaatcgagtttttgtttcaccgtgcatctttgtttttttattgtttttcctctcattcttctcaccttggtaattgtttctttcattttcctgaatctctgaaaagaaagggcctggactctcagatttcttggcctttgatatttggaaggatgaactccagtctcccacagaaggctagaggtgaaggaacattcagacacataagtttccaagataaatcgtctgagaacatctccaaggtgtcttctgggaatggtaagaaaccctgagtttgtgtcactggattgattccagctccattgtccccgtgtccttcaactaagtctctgctgaagcctgttctataaaaacagcaagtaagtggtttggactgacctattgtactaggttcgacaaagcaaaccaaatggagtcagtcatactaaaactccacatcaccaaaccaaaactaatgtatctgaacttttgagaaatcaggagagagagaaaatggacaaattcctaaaacaggccagtttcagtgggcatgaacatgaagttctgtctgctttcatctttacaaaaaaaaaaaaaaagcaatctgtggtaacttgacttcaatcaatcagttgttccttattgctgtctctctattcctgctgcacaaaaaaaatgcaacatccagatgaccaatcaggtttttgttctctgtttctgctttctttagccctcctatccctgtaaaaccaacttccttggctctaactatcaaaacactcattttgttttatagcatgacaggctgtctgattccatctttataaccaaagccaattaagatcttaaaaccaaacatataacttcatctttttacaagtacttagagcctgagttgctccacaggaatccaggaactgggcacaggaaaaggatctaagctggtggtaagttggggtctgaaaattttaaagttattgttgaaatgcctgctatatgacagagcccttctaactctggagtagcgtagtccagtgaagaatccacttcgttagtatgaaaacaatgttaactatttcattaacagtgtttaatttggttacatgttccagtaacattctttttttttttttttttttttttttttttgatggagtcttgcgctgtcacccaggctggagtgcagtggcacaatctcagcccactgcaacctctgcctcccaggttcaagcgattctcctgcctcagcctcctgagtagctgggattacaggcacctgccaccacgcctggctaattttttgtatttttagtagagacggggtttcaatatgttggccaggctggtcttcaactcctgacctcgtgatctgcccacctcggcctcccaaagtgctgggattacaggcgtgagccaatgtgactggccaattctttatcatatatgtaattaaataaaatttattactaaaataatttccccaaaggtgttttacttttttaaaaacagtggctacaaaaaaattttgagtcccatatgtagctaaagttaacacattatatttctactggacatgtagcattgtagagatgtagcattgaaggatcttgatagtcctgtggagcttacgtactagtgtggagggtatttaagagagaagataaatgaacaaacaaataaaggagaaaagtatctggtgagataggctgtacctgagcattctgctttgcagagtgggtgaggtgggatctctctgaaataatatttgacctgaaata

SEQ ID NO: 7836 - DNA, 6000 bp, Homo sapiens
aagtggttttccttttacgagtgggtgccagcccccagcccgggcggagggcggtgactcatcctgccctgtttgatgttgaggaggggcccccaccgcccctttgaatgtcgggcctcggggggagccaggatttgacccgtccccactcccagtcccgcctgaggttttacatccccagctccaacgcggcgaccagaaccacagaacctcaacggcgacgatcttggggctcaccagcccagcgcagtgggcatggggggtggtgccaaggtgccacgtgctggagccacaatgccagctattttcggggtctggaggctatttctgtcgtccaggagggccgcttcccaaatagaagtctagaaagcaggccaggtccgagtcatcacaggccgcagccggcgggctcactctgtgggcatgagcgtcccccggctgcccagctgggcaagaccccaaagctgtcccacaggctcctggccgtttgaagggcccaggtcccaggtatccttggggtccaaaggaggacagaggatctgggatgcagaggtactggccaggcgaggcggctcatgcctgtaaccccagcactttcagaggtctaggcgggagggtcgcctgagcctaggagttcgagaccagcctgagcaacatagtgagacctcatctgtaccagaaaattattctaaaaattatggccaggccaggcacggtggctcatgcctgtaatcccagcactttggcaggctgaggtgggcgggccacctgaggtcaggagattgagaccagcctggccaacatggtgaaaccccgtctctactaaaaatacaaaaattaccctggcgtggtggcgtgcgcctggagtcccagccacttgggaggctgaggtgggagaattgcttggacccagggggcggaggttgcagtgagccgagatcacgccactgcactccagcctggctgacagagtgagactctgtctcaaaaaaataaataaataataaaaatgaaaattatggccaggtgtagtggctcactcccgtagtcccagctactcaggtactcccagctgaggcgggagaatcacttgagcccaggaggtggaggctgcattgagctatgatagcaccactgcattccagcctgggggacagagcgagaccctgtctcaaaaacagataacaaaggcacctccgtgaagcgacactgcgatccttctcggatcatcccctcacctctgccacatctaatcctccccctgtgatcgccctctcgccttccaggaaagaaagcaaggagagaaaggtcgctgagtcccacagagacacagttaccggttacgggatgagatccagggccagatggacgtgtccccgtgtagcctgacccaggacaccggacaccccagccccagccctgctggggtgagctaagcggggagtggcagcggcacccccaaaggcatggccaggagagacgggcgtgtagcctggggcgggctggcagcagcccggggcagggggtccctcctgtgaccggaagcatcagcccctcagagggttggagtcatcagggggttcaggctgcaagagaaacatggagacgggcttatctcgtcctcaccgggcccagccccctggccgggtgtcaccgtgaaacctccctcaagctcatcaaatgtgcaggcagcgttttcctatcaggaccttccttccttggggtgagaatgaggtcttggactccgaaaacggggtccatctgtccctgaccctttgtgttcaaaatctggcaacgcttgctgaaggaagctcagccttttcttttttaaaaaaatattttttaggccaggtgccgtggctcacgcctgtaatcccagcactttgggaggctaaggcaggtggatcacttgaagttaggagtttgagaccagcctggccaacatgctgaaacccgtctctactaaaaatacaaaaattagctgggcgtggtggcaggcacctgtagtcccagctactcaggaggctgaggcaggagaattgcttgaacccggggagcaagagattgcagtgatcacaccactgcatttttctttttttaattttgggaaaagacacacataaatttatttatttgtttatttatcttaattgagacagggtcttgctccatcccccaggctggagtgcaatggtgtaatcttgactcactgcagccttaacctcccaggctcaagcaatcctccagcctcagccccccagttagctgggactacagatgcccacatcactatgcctggctcatttttgtattttttgtagagatagggcctcactgtgttgcctaggctggtctcaaactcctgggctcaagtgatcctcccgcctccgcctcccaacatgttgggattacaggtgtgagccaccgcacctggccaagacacatataaagtttaccactagtgatatttaatatagtcacaatgctgtgcatccaatcacgtttattccaggacattccatcaccccaaaaggaaaccctgtcccccatcagccatcactccccagcaccggcacccacgcatccccttcctgtctctgtggataggcctgtcctggacatttcatagaaatgggatcacacggccgggcgcagtggctcacacctgtaatcccagcactgtgggaggctgaggcaggcatatcgcgaggtcaggagttcgagaccagcctgatcaacatggtgaaaccctgtctctactaaaaatacaaaaattagctgggtgtggtggtgcatgaaggtaatcccagctactcgggaggctgaggcaggagaatcacttgaacccgcgaggtggaggttgcagtgagccgagatcgtgccactgcactagagcctgggcgacaaatagagtctctgtctcaaaaaaaaaaaagaaagaaatgggatcacacactgtgtggccttctgtgtctggcatctctcactgagcatgaggcccttgagatgcatccacgttgtggcctatgtcagagcctcactccttttcatggctgagtaatattccagcgtgtggacgggccgcactgtttgcccacgcccccatcaatgggctcctgagctgtttccgcctgtggctcttgggaatggtgctgctgtgaacccgggtgtgccagcctcttcttatgtctcctctgtctcctccttgtgctcaaacacaggtctccaaagcggcgtctgacctcatgagctactgtgagcaacatgcccggaacgaccccctgctggtcggagtccctgcctcggagaacccctttaaggacaagaaaccttgtattattttataactgtgttctcatatgttctctctctctctctctctttctctctctctctctctgtctctgtctctgtctcaggcagggcatcattcagtaattagctcaaacaaaacatctcaagtccccaaaacctttaattccaaaagaaatcccccctctccccgccaaaaaaggcgttcccaccgcccggatggggtagaatggaccttgtaggtggagatgaattttcaggtccgaccccatggccctctcagtttgggccaaaagggatggaggctttacggccacttcccgttcggaataactgaaatcccccagcgatggggtaacaattttttaaaactctcgattgccgtttcaattgtggaccggcgccgagggggaaagggaggtgacttcgcccggtggcaatagttccgggagaattggccattggtaaaaagacttcatagggtcactggaatgctttgtgttgtttttaagtagaggtaaaattgagatggggggcgggaggtgacatcatgaagttttttggaaatatctctttatttaaaaaattgttactccatacggctaaactcggattgtgatggttgaacccgtcgctaaactgcacgatcctgcaatgaatgcacgatggagtgtgggggtctggagggggcttcgtctatgaaaagttgccaagtgtgactcccctgcatgatgttagccatgggtcctttctgcagggtcccctctgtgccagaaatgggttttcgggacttgccccagggaagccgtcaccggcccggcccatcatgtttttggattttttttttttttctttttttgagatggagtttcattcttgttacccaggctggagtgcagctgcatgatttcagctcaccgcaacctctgcctccccggttcaagcgattctcctgcctcagcctcccgagtagctgagactacaggcgtgtgccactacgcccggctaattgttgtatttttagtagagacggggtttcaccgtattggccaggccgctctcaaactcctgacctcgggatccgcccacctcggcctcccaaagtgctgggattacaggcatgagccaccgcgcccagtgtgttttaagcatgaggcatccgcgtggctgggagaggctttgaccatccttggctcttccaggttgtcctaccctctggcatccaccatagacgtttttcaaacagaaaatgcaggctggggagccgcggcagggcgggtggggctaccctgtgctgctgtgtgtacaaaattgttccatgatcttggagtgactctgaaggactctgggaggtgagacgttgtcccggagatcaaaacgtccgctcaaaacgttaccctgtcgctcgaacccgatctttttgcttttccacccccgtgcaacccaggacggctgtctgaggccgggagatgccttagacgcaggatgggccactcctcccagcggcaagtggaaatcgaagatgtcatggggtcggggggaggcttctgaaagatgactgcgtcctcctctgcggcacggacgggagcaggtgcagccacatcttccagggcctgccggcatcacctgcggccacacctgagatggaccccacgcagccctgatcgcaggaggcctggccgccccgaccccctccacggggctggcctagaagcaagtagtagaataaaactagcctagtcctgtccctccggccccagtggagacaggcgtctaagaacccgtgccgagagggttcctggacggccgcccaggtcctccgtgcaggcccgtgaggcggggatccctgcttggctcacttcctgagctggtgactgccagggttcccacctcgccaaggctagagggctccgggtgtgtgtgcaggtgtcgggggagtgacctccactcctcaacctcgggcagctcccacaggccacagccgggctccccacccccggcacccagctctctacggcaggtccgggagggctggggcttcggggagccctacccgccaaacctgctgttggcccgggagagccccagaggctcccggagactgcagcctcctgtggttgggctgggagccggcagggtttggggtgtgggcgtccccaccacgcatagcaggaatggcaggaagggacaaaagcctgttccagagaccctgggaggaccccaggcagggagagcccgcctgcctccaccctttccaacaagccatcttggtaactgggaacaaacacaccccaccccgtttttccttaaaagaggccttaatccccgagcccccgctgccagggcagagggaggagggggcacagctgtgccaagcccggccccactggtgtgtcctcacaatgtgaccccagaaatgccagcagggaacggaggctgctgcagagacgcagccccaggcagccggggctcctaggctggtgcagatggtggggttaaacgggctgagcgttccaggtaaactgaggctcggggaggggaaggacaggctggcctctccttcactgtccacagggccttgggttccctgagctgtccagaccccaccatctcccggaccccagggaggtggccattgccagaagcctgtgggtttctttctagcttgggggattaaaaaaaaaattc

SEQ ID NO: 7837 - DNA, 6000 bp, Homo sapiens
tttttttttgagacagagtctcgctctgttgccaggctggagtacagtggcatgatctcggctcactgcaacctctgactccctggttcaaacgattctcctgcctcagcttccgagtagctgggattacaggcacgtgccaccaagcccagctaatttttgtatttttagtagagatggcatttcaccatgttggccaggatggtctcgatctcctgacctcatgatccacccgccttggcctcccaaagtgctgagattatgggtgtgagccacagcacctggtcacatatctatatttattttcttatccatttattaaaataaacttgagctcatactgataacctcaatgcagcagtacctggcttatttgtcattttttttccccaacagtatgaaacctggttattcatatctacaacacgtgtacttatttgttcaatgttagcatgaaagcattttcagaattgttgccttgtacttctttttctttttgttttttgagacggagtctcgctctgtcacccaggctggagtgcagtggcgcgatctcggctcactgcaacctctgcctccccggttcaagcaattctcctgcctcagtcttcggagtagctgggattacaggcgtgcaccaccatgcccggctaatttttgtatttttagtagagattgggatttcaccatgttagtcaggcttgtctcgaactcctgatctcaggtgatccacccccctcggcctcctaaagtgctgggattagaggtgtgagccactgcgcccagcctgttgccttgtacttctaagagaaacaaatttactggctagagtgcagcatttctgtccagttcggatagctgtttgagtgtgaaacctcactgagctgcacaaacaagccttgtgcatgtgagttggagttggccctcgggcctcccgtttgagacccccaaaccctgcctctctgttctctggctgtgggaaagttgtcagttcacacctccctgcagccacatttaagtttcagggctgtgaaaaagggaatgtgggccgggtgcagtggctcatgcctgtaatcccagccctttgggaggtcgaggcagcaggatcacttgagcccagtagtttgagaccagtctgggcaacatggcgaaactctgtctctacaaaaatacaaaaaaagtagctgggcatggtggcgcatgctacttgggaggctgtagtggcaggatcccttgaactcggggtggaggttgcactgagccaagatcactgcgcactgcactccagcctgggtggcagagccagaccctatctcaagaaaaaaaaaaaaaaaaagaccgggcagggtggctcacgcctataatcctagcactttgtgaggccaaggcaggtggaacacaaggtcaggagttcgagacaagcctgacccatatggtgaaaccatgtctctactaaaaatacaaaaattatccgggtgtggtggcgcgtgcctgtaatcccaactactcaggaggctgaggcaggagaattgcttgaacccaggaggtggaggttgcagtgagcccagatagtgccattgcactccagcccaggtgacagagtaagactccgtctcaaaaaaaaaaaaaaaaaaaaaaagggcagggggagtgaggagggtgggaatgggagtgggtgaaggggatctgagggtaccatgggaggcagtttgccctctcgaaggtgcagacccagctctgcaagagcgggcgctgggtggagctgcctctgtgggcgagggtgctggcagcagaactggcccagcgggtgtgctggcctaggcatgcttcaggcgggagggctgctgcaagacacagcaggaacatagaggccaggggtgccctgaacccgggaagagacagtttggcctgtggggtgtgggaggaggtatggggtgggggcgggtggtggcaatgtctggggctgattccttatgagcccattgccctaattcttctttggggatacagtggtgaccaataatagctgcactgacatttgtggagctctcattgtataccttggctctgttccaactgttcatttcatcttcaacaacagccttggagtgggtgcggttatctcaattttatttttattttttttttgagatggagtctcactgcattgctcaggctggagtgtagtggcgcgatcttgactcactacaacttccgcctgccaggttcaggtgattctcctgcctcagcctccggagtagctgggactacaggtgcgcgccaccacgcccggctaagttttatatttttagtggagatggggtttcaccatgttggccagtctggtcttgaactcctgacttcaggtgatctgcccacctcggcctctcaaagtgctgggattacaggcatgagccactgcacctggctattatctcaattttacagataagtccactgaggctcacagtgggtatcacttgcctgcctcaagaccttgagtcctgtctcactcctgtaatcccagcactttgggaggctgaggcagaagaattgcttgagtccaggagttcaaggccagcttaggtaacctggcgagaccctgtctctacaaaaaattttaaaaagtagccaggtgcagtggctggcacctacggtcccagctactctggaggttgggcagaggattgcttgaagcctggaaagtcgaggctgcagggagctgtgatcacggcactgtgccccagcctggatgacagagtgaggcgctgtctcacaaaagaaagaaaaatcaaaaaactgtgagcccttaacctttaggaatctgggcagagggacagacctgccttcctggagctgaggctctaggtcagagatacacattaggaaagatgaataaataaatgaaatgaacaaggtggccgggcacggtggctcacgcctgtaatcccagcactttgggagggggaggcgggcgattcatctgaagtcaggagttggagaccagcctggccaacatggtgaaaccccgcctctactaaaaatacaaaaattagctgggcggggtggtgcattcctgtaatcccagctactctggaggctgaggcaggagaattgcttgaagccaggaggcggaggttgcagaggcgaagtttgcagtgagcccaaatcgcaccactgcactccagcctgggcaataaagggagattacaaaaaaaaaaaaaaagcaaaagcaaggtgatttcagataatgccaactgccatttgagatgagggacagatcagggaaggtctctctgaggaggtgaccagctgaccagctgggaaggggtggggagaagggtgctccaggccacctggcccccaagttcaaaagtcttgaagtgtgtgtggaactcggaggagcccgggaggcagaagcagagtggagcagagagaggcacagaagtaacagaaagagacaaatcaggacggcatatggccttgtccttgcggggtcctcactgaggacttgatcacttactctgagaaacacagggagccacgggagggtttggagcagaaaagaaatgtgatctgagttttaagaactgtggccaggagtgtggagtggcagctagggatgggactcccaacatctgtcgagatcctggagcctgagtccccagggtcccaattcgtgggaaagaagttcagggaggcagctggagaggcaggttgctgagcccgggacccgcagccggaagagccccattttcgagagaagtgagattggcgcctgggaggtgtgaagcagccacctccccaccctggggcgcggcttcccctttacagaaggaggtcatttattgagcacctactgggtgccagccacagccatgctgggagatcttcaggggtcatcccagtgggcaccattggagttggcttggtccacaggactggggaacctggcactgaagggttaacaccgtcccaccctgcgggtcccattggctgtgtctttgagcagagcaggcaggaaaggttctgcccaccgagggaacagcgggggcaggagggctgggatccccaaggggctacatgggggcctgacccggcctgagtgccccctgagtttcctcccacgagggtatcccggatccacacttattctcagcctctggctcatctctcctggggcgccctcaccccacccgcggccagcagggcctgaagcatcaggggcaaagggcacggtcctggagaaggtcgcagcagcgggacccagcctcccttcctgaatctgagggtggaagagctgggaccgtctggaagttcctgggaagtcggggtgggggcgtttcggggccagcgggactggtcgttggaggagcagtggcctgggagaggcgtgggagagcatcacagacagcaacaaagagacacgcagaggcaaagagacacgcagagacaaagagacacgcaggcgagagactctgagatcctcctgagagagatacagaggaagtgagggagacactcattcattatctgggcatggttgcaagcgactggagtcccagcagctacgttcagccggctgagatgggaggatggcttgagccgcggaggtcgagactgcagtgacttatgatgttgccactgcactccactctgggccacagagcaagatcttgtctcaaaaaaaaaaaaaaaaaagaaattcttacattgctggggtttactgtctgctaaggacacagcccagaaacaccattaatgagtaaatcactttgtcgtcagcgataagggtgggagagaatcggtcgggggaacacggaatccagggggtgggacaggagagaccctccttatctgaggagcggcaagttcccatcacaatcctgcccgggcccgccccacccccactcgccctgagccgggggcgggagcgggaaattgggaggggcctgtgcccgggagcagcgggaacctatctgctggtgggagaggactcaggctaaggtggcccccactgaagactcctgctaagcaacccactgaagacccctccgaatcatcgacggggcgtccttggggtgcagcccaggaagctcagttcacaggtgggtgggcaatgggagggcgcagtgcccggacacccaggacagaggagacccctccgctggggagaagaggctcaggctgcgaccgccctgctgcagaaccctccctttcccgcctctccgagtcctcccaccgcgatggagcgtccctgggaggacagcccaggcccggagggggcagctgagggctcgcctgtgccagtcgccgccggggcgcgctccggtgccgcggcgagtggcacaggctggcagccatgggctgagtgcccgggacccaaggggagggggcaactgctggcgaccgccggccctttgcgtcgctggcccgccccctcgcctgccagctccagccccgcccccggagcggcgtccgctcactcggttcaaggcagcgcgactgcgggtggcgcacgaccagggcgcagagtgagtggactgcactggacctttgggggcgctgggctgggcctgacccggagggggtcgccctggcggccactttcccggtctaaaaaggcgcaccactccttgcagggagttctccgaacttttcctggaggcctctggggagggggaagctgggggctccccagctgggtgcaggacctgggatacggggtgaaggtggctggaatcccctggccaccccctcctggccgggccactgcaagtttccatacttcagtcctgctgccgggcaagctgggcggatggggttggcctccccctcagagcatgtgtaaccctgtctccctgtatttgggctccccacctccagcatgggtgagccagcgacttcctgtctatgtttgcctgccttgattctctgtgtgtgactgaagctctctgggatgtccgcatccctgccttgtgcaaaagagatccattcccc

SEQ ID NO: 7838 - DNA, 6000 bp, Homo sapiens
atttatttttttaggttttttttttattatcattattatttttgagacagagtctcgttctgtccccaggctagagtgcaatggcgcgatctcggctcactgcaacctccacccccccagcttcaagcaattctcctgccaactagctgggattacagacgcccactgccacgaccagctaatttttgtatttttagtagaggtggggtttcaccatgttgcccaggctggtctcgaactcctgacctcaggtgatccacccacctctgccttccaaagtgctgggattacaggtgtgagccaccatgcctggcctcctctgatctatttaaaatcacaaccagtctggccaacatggtgaaaccccgtctctactaaaaatacaaaaaaaaaaaaaaaaattagccaggtgtggtggtgtgcgcctgtaatcccagctactcaggaggctgtggcaggagaatcgtgtgaaccagggaggtggaggttgcagtgagccaagattgcaccattgcactccagcccgagtgacagtgcaagattccatctcaaaaaaaaaaaaaaaaaaaaaatcacaacctgctcccaagtcagcactgcctaaccccctttctggccatagttttctccgcagcacctaacagcatccaacagcttgcatatttatattttcatctatgttctgtctctgtctactgaaatataagctctcagaggtagggatttgtgtctgttgtgttccataccttccctgaggcctaaattgtgcctggcacatagcggatgctcaataatgctctgttgattttatgaatgaatgaaaaactgtcagaggaggtggagaagaggatgggcctgagtaagaagagagtgaaacctgatcggctggctgttgggggacaggggacatcaaggcttccgtggcctgcaagtcgctgaacaggggaacacagtcattggaagctcggtctccggcctcccaaggctgcctgtcttgtgaccagccctgtgggagactggatcacagaggaggccagtgtcccagccagctgactgtcctccacctcccaggtgcacaaggagtacagcaagtgcctgcgtcactcctactgctgcatccgctccccacccgggggcactcacggatccctcaagacctcagccatgcgaagcaacacccgctactacacagggacccaggtatcgggccagacaggactccctggggctgagtgttggaacctggagcctgagaggtggggagtggcttggcctaggtttctgatcgtgatgatcaggtgagcagtctcagaaagacgccagagggtgggtggcccaaggatcccctcacatttgggttgtgttcccagagccgaattcggaggatgtggaatgacactgtgaggaaacagacggagtcctccttcatggcgggtgacatcaacagcacccccaccctgaaccgaggtgagaaggcatccttctgcctctggcttcagtctctggaggctcccggctgccttgtgacctctgatcctttggccaggtaccatggggaaccacctgctgaccaaccccgtgctgcagccccgtgggggcaccagtccctacaacaccctcatcgccgagtcagtgggcttcaatccctcctcgccccctgtcttcaactccccaggtgagagcacgggggaaacatcccaggttgggaaatggagggtttgtgtcccaagggacctctgcatgggatgttctgtgccccagaactggagcctggacttgcatttcgagctcatccttgccttttctcttctctcttctggctgccacctgcagggagctaccgggaacccagtaagtgtgactcttccctggggatgtttctgaggctgggagagggacagacagtggccttctcagacggcctcacttaaggaggagaactcgggatgcctccccatgcccacatttccccaccccccgacacacagcctctggcagccgaatggaggataatggatggtgttcattgagtttgggctgttaagtgctgagggtctgagcacaggaaagcgatcctgttgcccaggcctcctcacactgctgagattctgaacctccagctggggatgagatcctgggggaactggtccttgtcccccacctttcatcaatacgctgctgggctggtgtgtctagtgccagtgagggagaaagggaatgtgagatcagagatccagggggcagggggaagcctacggaaaaccagcaggaatcaagcccacttctccacatggaccgcaccccctcactgtcccctagtgcatccagggcccctcttcaacctgaccagcccctttctgccctgcagagcaccccttgggaggccgggaagcctgtggcatggacaccctgcccctgaacggcaacttcaataacagttactccttgcgaagtggggatttccctcccggggatgggggccctgagccgccccgaggccggaacctagccgatgcggcggcctttgagaagatgatcatctcagagctggtgcacaacaacctgcgggggagcagcagcgcggccaagggccctccaccgcctgagccccctgtgccacctgtgccagggggcgggggcgaggaagaggcgggcgggcccgggggtgctgaccgggccgagattgaacttctctataaggccctggaggagcctctgctgctgccccgggcccagtcggtgctgtaccagagcgatctggacgagtcggagagctgcacggccgaggacggcgccaccagccggcccctctcctcccctcctggccgggactccctctatgccagcggggccaacctgcgggactcaccctcctacccggacagcagccctgaggggcccagtgaggccctgcccccaccccctcccgcaccccccggcccccccgaaatctactacacctcgcgcccgccagccctggtggcccggaatcccctgcagggctactaccaggtgcggcgtcctagccacgagggctacctggcagccccaggccttgaggggccagggcccgatggggacgggcagatgcagctggtcaccagtctctgagggcacctcatggaccaggggctggtggcccaggccagggagggaaccctgggcagggctctggtgggagagggagacagatggaggcagtggctggtgggccactctctccaggtgcccctcagccatgggccctacagtcccctcaggggactctaacctgggggcctgaggtgccagggttcacagacagggtttcccaccagccacacgcaccagctctatttgggggaagtgtagtgaggaggagcccagaggaccccaggggagtgaggagggagaacttggaagggtgcagcccacttccagactctcccctctcccacccttctaccctgtgaagggaaatgagggctttagtttcctgggcagggaggggcagcttctgaggttgccaaaggcccccactggatggaacctgttagctgctcctctccgcagccagaaatgctgccggctgcacccagagggagcagtgaggcaggacagatggacaggttcctcctgcgctgtaattccctgctccctggagactgggaaaaggccgcagggcagggggactgggcggtggtggctggtggtttaaaggttgaactttctctgaagctcctttccccttgctcttggtccctgccccgcaagcaaacctgccccctctgcctcccagtgcacccaatgaccccctcccttggggcgactcctgatgaagcacaactccccgcagggcccccagcccacaggggtggccatatttgggcagttcccagtcctgtgggctcggctatctggggagcagattttgggtctggatctccctggggagtgggtcctgggcttggatctttccctagggggccctcttactccttcctctctcctcctccttccccattgctgtaaatatttcaacgaaatggaaaagaaaaaaaaaagacaaaaaaaaaaaaaaagaaaagaaaaaaaatctcatcacttgaagccaccgggagcctgcggcccgggccagcccgggctttctccggagcagagcagcgctgctggcctggcagccaggacttctccgtgtacgtgcatccccagtccccgccggggcgggcgggccgccagagcagctttttacaatccagagacagaaaacaaaatctagatgcaacagcgaaacaaagaacccatttccttcctggcaccctcctttcctgctccgcctgcccggcatcatcagcccttctggggcgtgtacctctcactgcctgccccaggaccagaggcctgtctcccccttccctccccaccggcccgggggagacctcttcacacccaaagatgctttgtcaagatggctgcgctgtccctttgagttcctgcttcttgtatattgctctggggactctcgccggggaagatggggctgatttcccacctagagaggttgatggcagaaggaaaatggggaggcactggggttgtggagggcatgggtatggctgaggagggtgctgggaacggcaaggcggtctgggggatggggaggggcaaaggtgagagatcaccttccctatcctccaccttcccgcagggaagacgaagccaggtgccagggctggggtcgggacacccatgttctgggcggcttgaccccaaatcccagaccccggaagctccaggctcgggatgtgtcctgagcacctgtcccggccccctcctctccagcctgtcaggccagcctccccagcccccttccctcaactctaggggcagcatagccccaggccaccctagcccagcccctgcattgccgtttccccagaggtggcccctccacctctgctctgacctctccccatctctctgcccctccttttctcacaagtgccatgagttttcaaacatcttcgggtctcagcctgctgctgccatgaactttgttgggttaagggggaggggctctaggaaggaactggggggaaggggacaggtaggtggctggagggaccctttttgctgctagaaagcccctcccttctcccggggagctggggctggcttgtccccatcaattaggggagaaggggtcagaccaaagatggtggtttgtcccgtgtaagggaacaggtgtggggaagaggtggggttgggttccaactctggctttttctggtagaaaggcctaacccattacaccagaagaccatgggtgaagtctagatggggaggagaagtgaggccagggacagtcttgccagacgactctgaggagggcaagggacagttccatggcccttcccggactgcactaggctgggagctctgttgtgtggaggggtggtcagaggtctgtgaagagcgggcaggaggcatgagcaggcgaggagctggcctgtcccgggaagcagcccagcctgtggctgcccccgacaccaggaggagggccaggagagttccagggggctgaggcacacagagaggccaacttcctccctgcccagccttccttgtatctctccagactcggacaatcaaagggagagagggtgtatcgggtcctgttccagccggcatcgccgggtggcttccaggcctcagagctgtgtggcagggccccctgctggggctggacatcactgcagtccagtgcaaagccgcccccagagcccaggtgtccccccaacctaaccagacctggtgccttgacgcccccaccccagctgggacggtacagagaagggtcttggtttcctctcctactcccttccttaggctcctgaactcgtttgctcctaaatcttgttaattctttttctctggattttggtttcttttggctttcccttgccttcccctttctctgtctccaacactctttccccatgtctttctggctgtctctat

SEQ ID NO: 7839 - DNA, 6000 bp, Homo sapiens
cttacttattttctgagacagagtctcactctgtggcccaggctggagtacagtggcgagagctcactgcaaccttgaactcctgggctcaagagatcctcccacctcagccccgtgagtagctgggattccaggcacatgccatcactcctggctaatttttgcattttttggtagagatggagttttaccatgttgcccaggctggtctcgatcccctgggctcaagggatcctcccgcctcggcctccaaaagtgctgagatcacaggcatgagccactctgcctggccgattttatcttccttgatacaaactcttttcagaattctctttgtttttgctttggtccctgataaaatcacatgtgaatataaccgcaaaacaccacatgcctgcattacatggcgttacgttaaacaaccatcattttggctgggcgcagtgactcatgcccgtctctactaaaaatacaaaaaaattagcctggcgtggtggtgtgcacctgtaatcccagccacttgggaggctgaggcaggagaatggcttgaacgcggggggcggaggttgcagtgagccgagattgtgccactgcactcctgcctgggcgacagagcaagagactctgtctcaagaaaacaaaacaaaacagccatcattttaggaaacattcatatgtggaaactactatgtgtattgttcacaatttgcgggaataaagaactttgctttgcaaaaaatatgtaaattaaaaaataaaagggaaggaaggcatacccatgagcctccctcatcaccaagaactgagacatgaccttgttcccatgctcccatctttatcttgctgattaccaccactctgaatattctttgcaccttattcctttgctcagttacttatttttttattttatttatttttgagacagggtcttgctctgtcacccaggctggagtgcagtggtatgatcacagctcactgccacctcgaattcctgggctcaagccatcctcccacttcagcctcctgagtagctgggaccacaggtgcgagtcaccacacctggcgaattttttatttttattgtagagatggaggtctcattatgttgcccaggatggtctcgaactcctgggctcaagcaatcctcccgtctcagcatccccaagtagctgggattacgagcatgaaccactgcgcccggcccagccttgtttatttttatttatttatttatatttatgtatttttattttattttattttatttagacggagtctcactcttgtctcccaggctggagtgcagtggcgcaatctcagctcactgcagcctctgcctcccgggttcaagtgattctcttgcttcagcctcccaagtagctgggattacaggcacccaccaccatacccggctaatttttgtacttttagtacagacggggtttcaccatgttggccaggctggtcttgaactcctgacctcaggtgatctgcccacctcggcctctctgggattacaggcatgagccaccgcgcccggcagccttgattattttttaaagtcttcttgcatatgtttgtatcctgaaaccaaatcttttattatctttgtatctcagcttttttgcaaggtggctttttcctatggggctttggagactttttcaagattctagtatggaatctgtcatgctgcaatttaagatttttttctcctgacttcactcagtttttaaatttaaaaaaggagtgtggctaggcatggtggcatgcacctgtaaccccagcattttgggaggctgaggtgggcggatcacttgagggtcaggagatcgagaccagcctggccaacatggtgaaaccccgtctctactaaaaaattagctgggcgtggtggtgtgtgcctgtaatcccagcttctagggaggctgaggcaggagaattgcttgaagctgggaggcggaggttgcagtgagccgagatctcgccactgcactctagcctgggtaacagggcaagattccgtccccctcacacacacacaaaaaaagtgaaaagttagccaggcatggcaacatatgcctgtagtcccagctacttggtaggctgaggcaggaggatcacataagcccaggacgtgcaggttgcctgaagccataattgtgccaccgccactgtgctccagcgtgggcaacagagaccctgtctctaaaataataacaataaattatactaatataattaataataccattattattgttggttggataatcttgggttgcttcttttttttttttttttttttttgaaacggagtctggctctatcgcccaggctggagtgcaataacgcgatctcagctcactgcaacctacatctcctgggctcaagcaattctcctgcttcagcctcccaagcagctgggattacaggtaatcttgggttacttcttagctgagcaacctggggccaggggccccaaacccccaggttccagttccccttttgacaaatgaggaccatgttcgcaccccccatcattgcagaggttgtccagaagctgcaaaataggtcagcaggactgagacttctggacaaagagaaggcggagaaacataggcagacaccccggcagggaccagatcagcgaggctgaaggaggcttcctttagctgggcggcagcggagtggagtggcaggagtactactaatttgcatggtttaccatatagggccccactcagcacaggctctgtgctggtgctctgcagagaaaaagacaaaagtcactcagggggctgacagcctaatgcggctcgagggcagatggttgctagggaagaagggagatggtgagaagtattggagagactcaagaaagccgccaggaatggtgactcacgcctgtaatcccaacgctttgggaggctgaggcgcgtggatcatttgaggacaggagttcgagaccagcctggccaacatggtgaaaccctgtctccactaaaaatacaaaaattatctagatgcgatggcaggtgcctataatcccagctactcgggaggctgaggcaggagaattgcttgaacccgggaggcagagattgcagtgagacgagatagcaccactgcactccggcttgggtgacagagcaagacttcgtctcagaaaaaagtaataataaataataataataataataaaataaaaatttaaaaagaatgtttcaggccgggcattgtggttcacgcctgtaatcccagcacttttgggatgccaaggcaggcagatcacttgaggccagaagttcgagaccagcctgaccaacatagcgaaactccatctctgctagaaatacaaaaattagccaggcgtggtggcttgcacctgtaattccagatacttgggaggctgaggcaggagaatctcttgaacccaggaggcagaggttgctgtgagctgagatcacatcaccacactccagcctgggtgacagagcgagactctgtctcaaaataaataaatgaatgaacaaataaataaaataaaataaaaatacaaaaattagccaggtgtggtggtgggcacctgtagtccgagctactctggaggctgaggcaggagaatcgcttgaacccgggaggcggaggttgcagtgagtcgagatggcgccactgtactccaacctgggcaacaccagagtctgtctctaaaatacagtaaaataaaattaaattaagaagagtcgatgatcaccatgaaggggtgtagggacaatccctggcatcaggaagtgccactacctccctgagattctgcagacgccagctgtctgacctgcccgtctgatctgcagagaagggacgttgagccctggggttctagctggagtttctggctttctgagaaaaaaaaggcaaaatccctccagacctggtctggccctctctccttccagcttctgctggtgttcactcccctcccccacagcccaggccacccccacaggagcccgggacaggaaggggtaaattctaggactgtggatgtttgattattcccaggacaatagttctctgacttcagtcattagtgacttttttctccatcgctgcaatctccccctttgaacaactgaactatattttccttagcattcatcacttctgcatcttgaatttactcatgtaacaaggagacttgatttcggcatcctcactgaaaaaccctcctcattgccccagatagtagggaaacctaaaaataaatataaatatgaggaacacaaaaccaagtccttgaattctggctggatacagacacctgctaagcctcagggtcacggaggcgctaaagacatgttagtgcccagtggagactttcccctgggctcatcgcagggactccagggctgggctgccggcctgtggatctgagtctcagctgggtgagtcacttgtgcctcagtttcctcctctgtcaaatgggaatgacaacatcattgcagatgttttaaggagtaaatgagttaatatagattaaaaaaaaaaagcacttaggaccagacctggtacaaattaagtgctccataaataatagcattttcttggcaggatagcgagatctcgtctctacaaaaaaaaaaaacacttaaggagaaaactagccagacgtgatggtgcacagctgtagtcccagctcctcaggaggctgaggcaggaggatcccttgagccctgaagtttgaggctgcagtgagctgtgatggtgaccctgcactccagcctgggtgacagagtaagatctcttaaaaatatatatagcgttttaaaaaatgattacgtacctcaagagacaagctaatcatatgatttatccagaaaggaaagaaccctcctatcacatgattctctgttgattaacgaagtgcccaggggcctctgaaatataagtttcccacaggaggaaactggcttagaaagaccagaaagatccggggggtctgctctgtgcggtgaagcttctcttcttggcacctgcctggcatcggaagagggccccttctccctccctgggcttttatgtggacactgtaatgcctcagttttctttctttctttttgtttttgacacagggtctcactctatcacccaagctggagtgcagtggcaccatcttagctcaccgcagcctcaaactccccagctcgggtgattcttcctgcctcagcctcctgagtagtagcagctgggaccacagacgtctgccaccaagcccaggtaattttttttctttttgaagaaacagagctttgccatgttgcccaggctggtctcaaactcctgagctcaagcgatcctcctgcctcggcctcccagagtgctgggatcacaggtgtggagaaataggaacgcttttacactgttggtgggaatgtaaattagttcaaccattgtggaagatagtgtggtgatttctcaaggatccagaactagaaataccatttgactcagcgatcccattgctgggtatatacccaaaggattataaatcatgctactataaagacatatgcacatgtatgtttattgcggtactattcacaatagcaaagacctggaatcaacccaaatgtccatcaatgatagactggattaagaaagtgtggcacatatacaccagggaatactatgcagctataaaaaaggatgagttcatgtcctttgcagggacacagatgaagctgaaaaccatcattctcagcaaactaacacagaaacagaaaaccaaacaccacatgttctcactcataggtgggaactgagcaatgagaacacctggacacagggcgggaaacatcacacactggggcctgtcggggggtgggggcctgggggagggattgcattaggagaaatacctaatgtaaatgacgagttgataggtgcagcaagccaacatggcacatgtatgcctatgtatcaaacctgctcgtt

SEQ ID NO: 7840 - DNA, 6000 bp, Homo sapiens
ccagctcccaaccgccacccccgcaccttgacccagactcccagcccccagtcctagcctcagaccccggcccagacccccagcaccacagtaccctggagcagcatcccacggccacacctaccgaggtaagaacccactgggcccacagctatggagagggccttatctctgttcaattctcttaccttctctttcaccttccttcctttttaaaatttccttcattctcttcctcccttcctcatttaacttatgttcattctggaaggaatagtgaggaatgagcagtgggcagtgatgatgtaacaaaaggggacagccctgcagaggtactaacatgggtgatcattcattcctccaacagaatatttattgaacatgtattttgggccaagcattgtcgtaggcattgcagatacatccaggagctaaatatccaaagaccctgccctctcagtgcctgtgttttagtggggaaagaacaaccatatacatgacacaaagtcagttatctggaatgtgatgaggtgatgatgataagggtaatggatcatgaaaaggtagagtaatggctgggcgcggtggcacacgcctgtaatcccagcactttgggatgctggggcaggcaaatcacctgaggtcaggagttcgagactaatccaaccaataaggagaaacctgtctctactaaaaatacaaaaattagccaggtgtggtggtgtgtacctgtaatcccagctactcaggaggctgaggcaggagaatcgcttgagcccaggaagcagaggttttagtgagccgagagcatgccactgcactccagcctggacaatagagcaagactttgtttcaaaaaaaaaaaaaaaaagtggagtaagacacatgacaccagggagcagcacggtgggaggtggagtttgtatcactaagtaggatggtgggggcacgtcttagagagcagacggacttgagcaaagactggaaggacatgaaggagtgagctggcaacatggagatcaggtgaagggtgttccaggcaaagggaacagccagtgcaaaggccctgaggtaggatcgtgcctggtgtgttaggacgcagccccatcctgtaatgaatgacaggaaggtggtatgaagtgataccaaagaggagtgggcccaggtggctctgccagctatcctgaccttgcatctgctattcacaggcacagaccaccactgaatgtgcacctgctgtgcaggggacactatagaggcttcctgttgtcctctccacagtcctgagaggtagacagtgttaatgaaaatcatttacagattaaacaatgaaggctctgagcagttaatggccctaaaaggggactgtaagcagttggaatcttttatttttttttggagacagaatctcactgtgttgcccaactggagtgcagtggtgcgatctcggctcaccacaacctccgcctcccgggttcaagcaattctaatgcctcagagacaaggtttcgccatgttagccaggctggtctccaaccccctacctcaagtaacccacccacctcagcctcccaaagtgctgggattataggcgtgagccaccacacccggccgcagttggaatcctttatttttttagacggagtttcattcttgttgcccaggttggagtgcgatggcgtgatctctgttcaccgtaacctccacctcctggattcaagcgattctcctgcctcagcctccagagtagttgggattacaggcatgcaccaccacacccagctaattttttttgtatttttagtagagtaggggtttctccatgttggtcaggctggtctcaaactcctgacctcaggcgatccgccctcctcagcctcccaaagtgctgggattacaggcatgagccactgcacccggcctagaatcttttttttttttttgagatggagtctcgctctgtcacccaggctagagtgcagtggtgccatcttggctcactgcaagctctgcctcccaggttcacgtcattctcctgcctcagcctcccaagtagctgggactacaggcacccgccaccacacccggctaatttttttgtatttttagtagagacggggtttcaccgtgttagccaggatggtctcgatctcctgaccttgtgatccacccgcctcggcctcccaaagtgctgggattacaggctggagccactgcacccggccgcctggcgtagaatctttaacaaaggtcaccagtctggatccagagctcagctgtgaaccaggaagatagcagcacccgctgctccggattgctagaacagtccatgcccaaggcctgtgctgctggtatcttgctgcatctgccattcctgagagcaaggatctctcctgcagcagcccagagctgggaagcggctgctggtgaactgtgggtctctgagagctggaatgcctcataaagtgctcgggacagtgtctgatgtgtagacactgccaaccatttagctaaggatggaacagtaaagttggtaaggttgcagagagcagcccaggatagtagttcagaggcaccacctggtcctaatgtggagagggctgagccactccctgggctggccatttgctaaacaaggattttcccaccctcatggagcccacggtccagactcaatgaatgacactgctctatgctggaagggcaagcagtacacttattattatttttgagacggagtctcattctgtcacccagactggagtgcaggggcatgatctgagctcactgcaatctccacctcccaggtccaagcgattctcctgcctcagcctccctagtagctgggattacaggcatgcaccaccacgcccggctaaattttgtatttctagtagagacggagtttcaccatgttggccaggctggtcccgaactcctgacctcagataatccaccaacctcagcctcccaaagtgctgggattacaggcatgcaccaccatgcctggccaagcagtacacttataagggcatcgtctatccccaaacaccaaaactgcaaaggatgacaggtgcacagtcagtggtggtccatgccctgtgcataggaggagttcaatggtagtccacacccagtgcagagtaggtgcaaagtcaggggtggctggcagagccacctgggcccactcctctttggtctcacttcctaccacctttccctcattcattacagggtggggctgcgtcctaacataccaggcatgctcctacctcagggcctttgcactggctattccttttgcatgtccaggaacaagcccttggctctccaggaatctcaaagaactgggattttagtgttggggtctcattcttgggtttctccctgcagattccaactccacagagtgaccagagagaggacgtggctgaagacaccaaagatgggggaggggaaggtgagtatgttagagagaggctcaggagttctgggggtgccctggccccagggtggcttgctaaaagatgactcctggggggatatacagagaacttggaggtgctctgcactgaccacccaccccgtacacagtgtccagccaaggcccagaggactcactcctggggacacagtctcgtggccacttcagccgccagccagtgaagtatccccggggcggtgtgaggcctgtaacccaccagctgtccagtctggccctggtggcttccaagctgtgcgaggagacccccatcacatcagtgcccagagggagtttgcgggggcgggggcccagccctgcagctgcctcccctgagggcagccccctgcgccgcaccccgctgcccaagcattttgagattacccaggagacagcccggctactctcgaaattggacagcgaggctgtgcccagggccacctgctgcccggacgtccagcctgaggaagccgaggaccatctctgaccaccctggcaccttaaataaggaagaggcccagattgtgaagacggacccatatatccctacctcccaccacctagtggccaaacaccccgccaggagttcaatgctgggagaggtccagagggttcctataaggaaaaactatttaatacatgacctaggggaggcctaaaacccttttggggataatgtcccagagtccccccactagacacaggtcactgccaagcatcagggccactcgggctcagaggtcactcagggtcaatactcagggtcagtgcaggttatgagatccttggggtccaccctagtctctgacacctgggacaggggtgcttttgctactttggttgtggtcactcccccacacctgcctgcctccttcacggactcgaagtgaccttcctggaggaggtgggcagctcagactccacatgctggtggtgcctgaggtctgatggcctctaataaactgtgtcctatatgcccttgggtgcatctctgctaggggagaggccagcatgggtagcactccttgcccccattttacagattaggggaatcaaggcctcttttttttttttttttttttttttttttgagacggagttttgctctgtctccaggttggagtgcagtggcacgatctccgctcactgcaacctccacctcccgggttcaagcgattctcctgcctcagcctcccgagtagctgggactacaggcgcctgccaccatgcccggctaatttttttgtatttttagtagagacggggtttcagcatgttggccaggatggtctcgatctcctgatctcgtgatcgtcccgcatcggcctcccaaaatgcagggattacaggcgtgagccactgcgcccggcctcaaggcctccttcttgcatcatcaaacaccctgcagcacctacgtaaaggcagttggagctgggtcgcagcacccggctgagtcacgccagcccggccctcccggagctctgcgtccccgatccggtcctgcataatcaaatacagtataacaaagtaccgataaccgggacaatggggctgtgtgctccggaccgtgggagcccggggccgccgcagggaggccgagggaggaagccacagggcagggcagggcagggccgggctttgcagggggcagcgctgtcccagggtgaggggtacgggggcgggattgcaaaaccctagcgtgcgcccgatgatcagctggggccgcagaggtgggcctcgcacaggaggccgcggctcgctgatactgcgagctggcaaagccgaagctgggcgggggtccgggcggtgggagccaagtcggatcagggagtggcttgtaactcggcggccgattggacacgaagaagagagcggggtggggctgggagggttgggggtccggagcgggggcgcggacccaagaccacctggagctccgcccgggcagcgcggggtcacggcgggaattttcgggtcgccgagtgactcagccccgcaggctcgaaactgcgggcgcatgaggtgtgcaggtaccggggtgggggtcccgcgccggaaataggggcgactgaggggccgcgaggcggggaggaaacaggggggctgcggttccgggcgacaccgcccccgacgcggccgtggaggcggggctcccccaggtggcggggcggggcagggctcccccaggtggtgggggcggggcgccggggagaccccgcctcccgcgccctctcagcaacccgcacagggcgcacccggacgctctaccgctcccgccgcagtcgccgggccatgggcctcgagcccgccccgaacccccgcgagcccgccttgtctgcggcgtgactggaggcccaggtgaggcctgcacggacgggaggcgggcgggtgcgggcctgggcccgggggaagggcgcggcacgtgcctgcggggccaggacgccgccctctgatcccttaaccccctaccccttccccagtctggagacgcctggaggcccggccatccatcccttccc

SEQ ID NO: 7841 - DNA, 6000 bp, Homo sapiens
gggagagtcggggactgaatggagagggactcccgaggaagtgaaggagggaacggagctactcagactatctgaaggaagagcagtggctcacatctgtaatcccagcactttgagaggccaaggtgggtggatcactggagaacaggagttcgagaccaacctggccaacatggtaaaaccccatctctactaaaaatacaaaaattagctgggcatggtggtgcacacctgtaatcccaactactcaggaagccaaggcaggagactcacttgaacccaggtggcggaggtttcagtgagccgagatcgtgccactgcactccagcctgggcgacagagtaagattctgtctccaaaaaaaaaaaagagcattccagactgagagtatggtaagtgtgcaaaggtttgaggctggaaagaaggtcactcactggccttgagactgctgaggcaggaaggagaggtgagtgagattggctaggctgccccagcaggtcagacagaaccttgtgactccggatgaggagtctggattttaccgcaagtccattcagaagccattggagggtttcaagcagggaagtaacaagaactaggctgcatgtggtggctcatgcctgtaatcccagcactttgggaggccaaggcaggaagatcttttgagcccaggagttggagaccggcctgggcaacatggggaaaccccatctccacaaaaaatagaacgattagccaggtgtggtggcacacacctgtagtcccagccacttacgaggctgaggtgggaggatggcttgagcccatgaggtcaagactgcagtgagtcaagattgcactactgcatgacagagtgagaccctgtctcaaaaaaaagaaagaaagaaagaaaagaaaagaagaaaagaaagagctgattttcatgatagaaagatcttgcccgggcgcggtggctcacgcctgtaatcccagcactttgggaggccaaggtgggtggatcacctgaggtcaggagttcgagaccagcctcaccaacatggagaaaccctgtctctactaaaaatacaaaattagctgagcgtggtgacgcatgcctgtaatcccagctactccagaggaagaggcaggagaatcacttgaacccgggaggtagaggttgtggtgagccaagattgggacattgcactccagcctaggtgacaagagtgaaactctccatctcaaaaaaaaaaaaaaaaagaagaaaagaaaagaaagatctttctggctgccatatgggaagtgatttgaaggaagccagagtagcccagaaaagcaatggtgatgctactgcaatgatcccagcgagtgatgacgctgatgctgacgcagagtggacagtggcaggcgtttgagagagacgcacacagattcaggaagcactggggaggtggagcccagaggactttcccatggaaagatgctctggcatctgggaggctcccatggacctccttccgtcccctctctggggattggtttcctcatttgtcaatagactccaccttaaactccatttttaacatgttttaaaagtgcatcctggggattcttcagaggtggcctctccacccccaccttgtttcaccagagcagctagcagctcacccttttcactgttttagattggtttctggttaagatcttgttgggggaaaaaaaaaaaaagccaggtttcacgtccaaaagaactaaaccaaaagacccctggatggaatggctcctgaagctgcctgtgactctggacttggctctgcttctctgcggggttgatgatagtcaggggcttggtccatgaatatcctttgccctgtgtatgcagatcttcccagaacaaagtgggtgacaggctcaaggttctcactcaggaaaattgcgggggaaagggcagagacagtgaagagagtggtccctgagggaggagactgctggcgctaaccccagggcttccccatgctccctgatcttgatcttgaccttgactgttcccagcagctcctggctctcccctttcccttactcctctgcagctttggttcccagtccccactggcagcccagggcccttttctgtccagttattttttatttatttatttatttatttatttatttatttatttatttagagatggagttcgctcttgttgcccaggctgtagtgcaatggcaccatctcagctcactgcaacctctgcctcccgggttcaagcaattctcccacctcagcctcccaagtagctgggattacaggcatgtgccgccacacctagcttattttgtatttttagtagagacagggcttctccatgttggtcaggctggtctcgaactcccgacctcaggtgatcctcccgccttggcctcccaaagtgctgggattacaggcgtgagccaccgtgcctggacttcttttttttgagatggagttcctctcttgtctcccaggctggagtgcagtgatgctatctcagctcactgcaacctctgcctcctgggctcaagcaatcctctcgcctcagcatcccgagtagctgggattacaggtatgtgccaccacgcccagctaatttttgtatttttagtagagacagggtttcaccatgttggccaggctgatcttgaactcctgacctcaggcgatcctcccgccttggcctcccaaagtgctgggattacaggcatgagccactgtgcctggcctgtccagttattctggggtggaaactgaagcacaggctggagatgaggactgagagcagagatggctgcactctagacatcaggaccttggacaggtcttggaacagctctgtgcctcagtttgtcaaagagaaagaacaactactttcctcataggagtcttgaaaatttcaaagaagtaatatccataaattggccgggcatggtggctcactcctataatcctagcattttgggaggccaaggtgggaggatctctttttttttttttttttttttgagacggagtctggctctgtcacccccgctggagtgcaatggcgtgatctcagctcactgcaaccttcgcctcccaggttcaagcgattatcctgcctcagcctcctgagtagctgggactacaggtgtgcgccaccatgcccagctaatttttgtatttttagtagagacagggtttcaccattttggccaggatggttttgatctcttgacctcatgatccgcccgcctcagcctcccaaagtgctgcgattacagggaaggatctcttgagctcaggagttcaagagaccagcctgggcaacacaggaagacctgcatctattttatatatatatatatatatatatatatatattttttttttttttttttaagccaggcatggtggtgcatgcctgtgttcccagctacttgggaggctgaggcaggaggatcactggaagcccaggaggttgaggctgctgtgagctgtgatcgtgctactgcattctagtctggacaaaagagcaagaccctgtctcaaaaaataaataaataaaaagaaataatatgcataaaaatgcctggaatgggatctgctatgtagtagggctcaattaacgtttgctgttattatccttgttgacaagaatgggattcttgggtaaggagtgggaggctggccccagccctggccctattgctgccatgctgtgcatccttagggaggtgactcagcctctctgggccccttctccctgtctgtgacatgatagagttagactagtctggcatttcctgaagcatgatatgatacctgtgccagttttacaggaattctgcaggaaaatgctaaaatctgagttgggtcatttttttccctttttctctttctttctttccttttttttttcttttttttcttttcttcttttttttttgagacagagttttactcttttgcccaggctggagtgcagtggtgcgatctcagctcactgcaacctccgccttttggtttcaagcaattctcctgcctcagcctcctgtgtagctgggattacaggcacgtgccaccacatccagctaatttttgtatttttagtagagatggggtttcaccatgttggccaggctgttcttgaactcctgacctcgtgatctgcctgcctcggcctcccaaagttctgggattacaggtgcgagccaccacaccctacctttttttttttttttttttttgagacagggtctcactctgttgcccaagctggagtgccgtggtgtgattatagctcactacagcctgaatcccctgggatcaagtgatcctcctacctcagcctccccagtagctgtgactacaggtatgtaccaccacacctggctaatatttttatttttattttttgtagagactgggtctcactgcattgcccaggctggtcttgaactcctaggctcaagcgaacctcccacctcggcctcccaaagtgttgagattacaggcatgagccactgcacccggcctgagttgggtctttattctaatatctgtcaggggaaaatatgcctgacacctcaaatctgtgttttcagagagtggttgcttaggatggggctgaagtaggcattgttggggtgtccagtctctgcagttcacagcaattatggtgaggagtgtggggagaagaaggttggagtgtccatgactccctcactgctgtcctctctcccaacaggcactgcagtcagcggtgaactgacttcatcccaatccctcagcccccaccaggaccagtctggagtccctcccctgcccccattgaaatttcccttccgtccccaaacttacctctgatctagaccttactcacctccttcctgtttcctaagactccttcctgccgtccacagaccgagccttttatctttgtccaccctgtgccagacacctccttttccagaaccttctccttactggtgaccttacttatctctgttgctttctggggtcctaggaaatgccagcactcccacccacattgcctgaactttccaacactccctaactgcgctgtgtcctatctcaacactttctcatgtatttcttgtgtcttctagaacattcccccgccattattacttcaatatggctacacatacttcctaattgccctgcaaaccatctccttctcaccattgcccagcgatgctttcgtctcctccataaacactcccggagaccaatttttgtgtcacccccatactccctcgttgacacactgactccatacataacctccttgaaaaacctctttattaatctcaccatcctccagacttccctcctgtcataattccatccctcctccaacttttccctctcaagctctgcccttcccagcccagcccagcctacccaacctcatctcttccctgtagaccacatcccaccatgttcccctgagcctccaaggaaggggctcagggggccccatggcctcccgctccctgtggccccacagcccccgtgggccaggggaagcgccccagaagccgaagtgcccaccatgggcaaccacacgtgggagggctgccacgtggactcgcgcgtggaccacctctttccgccatccctctacatctttgtcatcggcgtggggctgcccaccaactgcctggctctgtgggcggcctaccgccaggtgcaacagcgcaacgagctgggcgtctacctgatgaacctcagcatcgccgacctgctgtacatctgcacgctgccgctgtgggtggactacttcctgcaccacgacaactggatccacggccccgggtcctgcaagctctttgggttcatcttctacaccaatatctacatcagcatcgccttcctgtgctgcatctcggtggaccgctacctggctgtggcccacccactccgcttcgcccgcctgcgccgcgtcaagaccgccgtggccgtgagctccgtggtct

SEQ ID NO: 7842 - DNA, 6000 bp, Homo sapiens
cctgggcaacagagtgagactctgtcacacacacacacacaaaccacacattcaatgaataagtgaataatgagtgactatgcagaaggctttattatggatttgatgaaaggaggagttttcttctagcaacagcaatgtgagctgccctatcagattggccctcactgcataatgaaataccagcatttttccccattccctcagaacataccctgtgtattcttgttcccagtgactcttgaggatggtcacatttaatccatttgatggggattcccagaagacctttgtttttttgtttttttgttttttttagccaaagcagaagtttgagaggcccatctgtgtttcctggagcactgatgtgaagggtggaagatggacatcctttggctgtgtgatcctggaagcttctgagacatataccatctgcagctgtaatcagatggcaaatcttgccgttatcatggcgtctggggagctcacggtcagtactgatgatttgttccctgaggcagagtatctgcctccaaatccaatgggaaaatattgattaaacatctgttgtgtgtctcccatggggttgggtgttgtgggatggagtcacggggacagaaggggtaggtgatatgcctttgcccctgcagaatttacagtctggttgggaggccatgaaactcaaatatacaatgagaaataatgaccctaagtagggccaggcactggagcaatcacagatcttacttaatgagcacatacagtgtgctgggctctttaagttaagtggttttagacccatttcacagaatgggtaaagtggcccgtctagtcctgaagctagaaattggagcaggtggaattcaaatctggggaagtctctttccactaacacatgcaaatgggtcaagaagaaatgctgtaagaattcagaggtgttggccgggtgtggtggctcatgcctgtcatccgagcactttgggaggctgaggcgggcggatcatgaggtcaagagatcgagaccatcctggccaacatggtgaaacccccgtctctactaagaatataaaaattagctgggcatggtggtgcatgcctgttgtcccagctacttgggaggctgaggcaggagaatcgcttgaacctgggaggcagaggttgcactgagctgagatggcaccactgcattccagcctggcaacagagtgagactctgtctcacacacacacacacacacacacacacacacacacacacacacacaaacaaaaagaattctgaggtgtttccaagagagccgatgatagatcatgaggaaacaatatgaaataagccttggtaaatgagtagatttggaagagaggaaggacatcctcattagtgttgtagaaagtatcctttcacctggctcggtggctcacgcctgtaatgccagcacttcgggaggccgaggtgggcagatcacaaggtcaggagatcgagaccatcctggctaacacggtgaaaccccatctctactaaaaatacaaaaaattagccgggcgtggtggcgggcacctgcagtccaagctactcgggaggctgaggcgggagaatggcgtgaacccgggaggcagggcttgcagtgagctgagatcatgccactgtactccagcctgggtgacagaaccagactccgtctcaaaaagaaagaaagtatcctttcctatcatggtagatccaaggtttaattccctaccagagaggccataagtaagtgccatttcgaggaccctgtggcttaggatttaagagaactggatccagaacaaaactgacttagtttcaagtcttgtctctaccactttctagctgtgttttcttggaaaagtcacttaacttctctgcactgagcccagctctctcatctcaaaaatgagaacaacaataacaaaaaaatactgataactagtatttatatagtatgcttctggcacagttgtacttgaaatgttttcatttaatcctaaaacaactctataaggcaattgccattaatattctcttttcaacagatgaggaaactgagggcacagagcagttaagtgtcttgtccaaaatcacacaactagaaattggccagtttttttctttctttttctttttcttttttctagactgagtttcactcttgttgcccaggctggagtgcagaggtgtgatctcagctcactgcaacctctgcctcccaggttcaaccaattctcctgcctcagcctcccatgtagctgggattacaggtgcccgccaccatgcctggctaatattttttgtttgtttgtttagtagagataggatttcgccatgttggccaggctggtttcaagcttctgagctcaggtgatccacccgccccagcctcccataagtgctgggattacaggcatgagccactgcgcccagccaatggtcagttttcttaaccactttgtgacaatatcatagagaggtgctcataagatggtgcctggcttatctttaacccacagaaaccactcagagacatttaaaattaattttaaaattaattatgaataaatggcatagaagaaggacttagcttgtcacgttccactcctgaagttgaagcattcctgaatgtctgcattatcagttgggattcagtacaggaagcaaaaaccaccccaggtatttcaagcagaaaggcatttaacacagggaattgggtgctcacaaaaatctctgggaggggatggaggagttgaagtcagggggctgtcacttcaattttggcttcaaggtcatcccccaatgcagctgtaactcagaggtcagaaattgctgctgtcattttgccaccccactccaccatgaaattggggactggacagttgaaatgtggaattaggctcactcctgtctgccgaaagctgatatttgcctcccttctgcattccaaaaccttcacagatgtatctcactggagaacttaaattacatccaggaccttagttccaaaggattctgggagatgtagtttgtggacatcaagccccagtaatacatggagtaacgcataggacaggactgggaataggtgctggtggatgccagtggattgcaaaggataatgaaggacagtatctagttcactctgagtgttagagggagaaaattcccccaagctaattttgcccgagccagggttttagataactcttcttcccgcctggggggattttgatcccattctcaggccaactctgaaattccttcctgacagatggacttttccttgtacatcattagccatgtaggcattatcatctccttggtgtgcctcgtcttggccatcgccacctttctgctgtgtcgctccatccgaaatcacaacacctacctccacctgcacctctgcgtgtgtctcctcttggcgaagactctcttcctcgccggtatacacaagactgacaacaaggtctacatcgctcgggctgtgtccccaccaagccccatcttctccccacctgcctcagctcattcctagccaactccctctatccctgttcctacctcagggcctttgcatatgctgtgccctctgcctgtaacactcacttcccagcttcttacctgcttgactccttgtgacagctctcagtttaaacttatgtccctgatcgtgttatgaattatagtggttcctcctattacttgtttttgtttgtttgtttgtttgtttttgatactgagtttcgctcttgttgcccaggctggagtgcaatggcacgatcttggctcactgcaacccctgcctcttggttcaagcaattctcctgcctcagcctcctgagaagctgggaatacaggcatgagacactatgcccggctaatttttttgtatttttagtagagacggggtttcaccattttggccaggctagtcctgaactcctgacctcaggtgatccacccgccttggtctcccaaagtgctgggattataggcttcagccatcacgcacggcccctcctgttactttctaaaccagaggttctctccctgggtgctttttgtccccaggggagacttggcaatgtctggggacatttttccttgtcacaactggagcagcgtgctactgctctctggtgggtaaaggttagggatactgctaagtatcttgtcgtgcccaaggcagccctccacggcagagaatgactctgcaataatgttacagatgtcgataatgctacagtttagaatctctacttccctttatttttcttttctttttttaaatttttaatttttttagtttttttgagacagggtcttgctatgtcacccaggctagagtgcagtggccgaatcacagctccttatagcctaccaggctcaagcgatcctcccacgtttgcctcccaagtacctgggaccacaggcctgtgccaccatgtctggctaatttttgtatttttgtatagagaggggggtttcatcatgttgcccagtctggtctcaaactcctgggcttgagcgatctgcctgcctcagccttccaaagtgctgggattacaagcatgagccaccacacccagccagtaaaactttatttacaaggcaggcagccagcctatggggtctagtttgctgaacccgcctgttttcaaccattccctaaagtagggtgatcgacaatcagttttcctaaaactcttcctgttttagaactgaaagtcatgcgtcttgggaaatcttaggtccagacaaaccaggaccatgggtctccttaccaagaagtgctcctccctgtggtcaagaaccactgcacctctctataaatgtttgtgagatgaatgagtgagctaggtttggggaatttccagccgaggagtctctctcttcctttcttcctttcgatttctctctggggtggaggattctgatgcgcatgcttctcccctccagatgggctgcgccatcatcgcgggcttcctgcactaccttttccttgcctgcttcttctggatgctggtggaggctgtgatactgttcttgatggtcagaaacctgaaggtggtgaattacttcagctctcgcaacatcaagatgctgcacatctgtgcctttggttatgggctgccgatgctggtggtggtgatctctgccagtgtgcagccacagggctatggaatgcataatcggtgagtgacatcctctctcttcctgaagaccctgctgccagggcttatggtgataatgacatgagcaacaagaagagtaacaacagtagcagtagttgtggctaccatttatcgagctcttctattatgtactattggtttcaggaccaccatgtacagcagcatgggttgtgcactgcacaaatccaggatcactactatttgaggtttatgttccaggaagagaacatctggtttacctaacttgattattttccttttcttgcgtgtatgacatggggggtggtgggggtgaaagtgggaaaggaatacttctgcatggtggtgtgcacctgtaatcccagctactcgggaggccgaagcagaagaatcacctgaacccgggaggcggaggctgcagtgagatgagatggcatcattgcactccagcctgggggacaagagcgagacttcatctcagaaaaaagtggggggaatattggggtgctgttattgaacatgacggaatggttgttgtgttgtaaaagcagctaatgtacactagagacataataaaaggagccaatcctttcttcctccctcccactctccctccctccctcctcccttcttcctccctcccctcttccctccctccttccttcctccctccctccctcccttccttccttgccttccttcccttccctccctccctctcttcctcccttcctccctcccttctttccttctttccttcctttcttcgaataaacaattttatgaaatatcttgtctatgctaggctgtgct

SEQ ID NO: 7843 - DNA, 6000 bp, Homo sapiens
agagtttcactctgttgcccaggctggagtgcagtagtatgatcttggctcactgcaacctctgcctcctgggttcaagcgatcctcctgcctcagcctccctagtagctgggattacaggcgcccgccaccacgcccagctaaattttgtatttttagtagagatgaggtttcactatgttggccaggctggtctgaaactcctgacctcaagcaatccacccacttcagcctccaaaaatgctaggattacaggtgtgagccaccatgcccagcctaaaattttttaaatgagcaaaatatttaaacagacattccacgaaagaagatatacaaatggctcataagtacttgaaaaaatgcttaacaccaataatcatcaagaaagtataaattaagaccacaacaaaggccgggtacggtggtccacgcctgtaatcccagcactttgggcagctgaggcgggcagatcacctgaggtcaggagttcaagaccagtctggccaacatggcaaaaccccatctgtattaaaaatacaaaaattagccaggtgtggtggcacgtgcctgtaatcccagctactcagggggctgaggcacgagaatggcttgaacccaggaggtgaagtttgcagtgagtggagatggcgccactgcactccagcctgggcgacagatcgagactctgtctcacacacacacacaaaaataccatggcatacttattagaatgcccacaattaaaaactaacaattgtcaagtgttggtgaggatgtggagcaactgaaatgctcgtaggctgctggtgggaatgcaacatggcacagctactttggaaaactggtagtttcttaaaaagttaataaaacgttttaccataccacctggccaatacactgccaggtatttgcccaacagcactgaaaacatttccacacaagaatgttcttaacagctgtattcatactagacaaaaactttttaaaaaaaacccaaaccaaccaaatatccatcaacagatgaatggataaataaaataggaaatatccttaaaacagaatactattcagcaatagaaaagatgcttaacctgtaagaggggaatcgaaatctaggaggtcagggccttttttttttttttttttttttttgagacagagtcttgctctgtcgcccaggctggaatgcagtggcgcaatcttggctcactgcaacctccgcctcctgggttcaagtgattctcctgcttcagcctcctgactagctgggattacaggcgtgcgccactatcccggctaatttttgtatatttagtagagacgggatttcgccatgttggccaggctggtctcgaactccttacctcaggtaatccacctgcctcggcctcccaaagtgctgggattacaggtgtgaaccactgtgcccagccagacagggatttcttaaggaagtaaatggttatctgaaagaaagctacaaattaactgtgaaagttggaatgggtaacaagaaataaagacataccaggcaggggctggttcaagctccccatggcagatggaaaacatgacacattcacagaagtggaaaatggccctgcccagacagcaaagagagagaagagtgatgtgagtggaagctggcaagggccatgctaggcaggcctttttaaggatgttgatatttctcctaaaagcagtgagaagtctctgaaaggacaagaaggtcgtataattggattgacatttttaaaatgattccactaatacagtatggagaactgactgccagggaagcagatggatgagaggaagtgagtcagggccctgctgaaatcctggtagggatgatggcactgagatgggatgatggagatggagacggatggatggattcatatttggaatccataagtatttggggagtacatcagactgcattctagggataaggaagaagataatattgagattcactttaagactgactctagtcaggctcagtggctcacgcctataatcccagcactttgggaggccaaggcgggcgaatcacttgaggtcaggagttcgagaccagcctgaccaacatggtgaaaccccgtttctactaaaaatacaaaaattagccgagtgtggtggcacatgcctgtaatcccagctactcgggaggctgaggcatgagaattgcttgaatctgggaggcagaggtggcagtgagccgagactatgtgccactgcactccagcctgggcgacagagtgagattcagtctcgaaattaaaaagaaaaaaaaaaaagactgactctaagataatggtgcaggagatgtgatgggaagagatcttacgccccaagacagggaagggtggaagaaggaagatctgaggccaggtctggacacatttgatttggttgatttgggacacctgtgagacacccaatggcagtgtcaactaggcagttgagcgtgtacatgtgaagctcacagaaacctagggtgaagattcaaaccaggggtgtcatgaaggtggtaactggaactacggaaacagttgcagtcgactagaaggagagcacaggcgagaacaggaaagaacctggagccaagcttgaaggaagtcaccatttcggggatgagtaggggaatggtgagctagcaaaggggtacgagaagtgaccaaaggaaagagagggaagctagcagcgtaacgtatcagaatttgtgaaaagaggatgtttccagaagggcgtggaaattgtgttgaatgctaataaaataagaaaagcgtaagtccactgaatttaggaacatggaggtcactgctaacatcgggaagagaaaatcccatggaaaataggcacagaacccagattagggtggactgaggggcgagtgagaattaagaatgtggaagtgattacacagaactttagataagggtccaacttcctgtgatgacaggctgcattataaagacgatgagagaaaactgaacttggaaggaactgtgaaggatattgctcttgtgaaagtttacccccttgaactcggtctgagaggttgggtttccttttcctgtgacgtaggtggacatcatgaactgtgagactgaaagcctccttggtgatgctcccttcataactgcggtgaacattcataactgctgtgaacccagagagggggtttcgttggggcgtcttccacagggggactcacgacagtgacggcgaaaggcaggaggtggggggagaagaacgtgcagagacagagaggcagtcccactcctcaacacttgttttccaatgagtttcctggattctgcaattaaatccagatcctcgtgcatgtttataggaaatcataaaagcgaaatgacacaaataaatttggtggcaacaagagagaatggtctctttcttagttctcctgttgatctgagaagcgacgtgtgctgggggaaggaaataaagaactagaacgccttcagaggagagtagagtggacgagaaagaaaagctaaatatcaaaatgtctagaccctggggttacagaccacaaaaagaataaatgactgactgactgaatgactgaatgaatggcaaacaataggaagtaggtatgtcctagggaaagaatggggattctgtgagcaggaatcaggccacagatggcagaacagagacttctttctgagacttcctccctagttcaagaggaaaacacgttccaacgatccttgctgcattaggtgtgtatttcaaagggaccttcaggagctcctaacctggggctaccaaggtcagagagggggaaacagtgagactttatcagggaaaggaatggagcctgagtgccactccctgacgaaaagccacatgggcacgtgaactcgggcctcctgaattcctgacactttcccaagagggacagcacatccatgccctgagcctctggaggctgcaccaagtggctcactctctgtgaagctgcgttacaggcttgagacgaggcagcacttacgggcatctgctaagtgctttatatacacaacctcactgaatcctcgcagaagtcctaggatgtcagaattcgcatgctcacttgactacagcaaactagacttcagaaaacggatctgcccccaaggttgtaatgaagggacctggatttgagcccatatctgcatgactataactcccacaccatttccatcacaacaagatgcaggccaggaccagcctgtttcagctgagacgggcaaaagaaatgtgttgggggcagagggcaggagaccatagagaaagtaaaaaaattgaagaagaaaaggaaggagtgccgggtgcagtggctcacgcctgtaatcgcagcactttgggaggccaaggcaggcggatcacttgaggtcaggagtgcaagaccagccaacatggtgaaaccctgtctctactaaaaatacagaaattagctgggcgtggtggcaggtgcctgtcatcccagggaggctgacgcaggagaatcgcttggactcgggaggcagaggttgcagtgagctgagatggcgccactgcactccagcctagacaacagagcaagattcagcctcgaaaaaaaaaaccaaaaaaaaagaggaaaaataaaaaggaaggaggaaagctcatttctgagaatgagcagaatgacagaagaaactgcctaagaaagagaaaagaaaataatctgacttgggaagtaaaaaaagaaaaatgcctgggaattttttttttaaatcaggaattaaggacagaaaaatctgaatttggaagtcaagagtgaggattctctagggagagaataaagatgctgggcctttcctttgggtttgagaggaaatagtgcttaaagactgaccttcctttctctggtcacgtggctggtgctagtataaatgcttactaccagccaggttcctcaccattttttcctgcatggcatggacagaagcaggggctaaagctctgttcctctctcctggaagcttgcagacctcccttcagaaccaatcccaagaagccacctatccggaacaacacaaggcaaggcagctagtgtagtgcttgtgctctgggaagagaggccaggatcaggtttgaggggaaggttctgggagactggaggaaggatgtcagaaccaaatggaagactcatacccagagacaggagctagtgtgaggagcaaggaaacagccaggaaatcaaggctggagagtggacagagggacaggacctgggttggggccagcaagggtgacaccccaagtggaaactgagttaccccgtgaagaagacgagttctatttatggtcagaatgccacgctcaagggccagtgaaggcctgtgggcttttctgaatatttctctaaggtcttctagggacaagccttcctcctaaggctagtgctggttcatccttcttcccctccaccctcctctaagcctcccagcttccccttttcttttctttttttttttttttagacggagtttttgctcttaccgcccagggtggagtgcaatggcgcaatcttgactcactgcaacctctgcttcccggttcaagcgattctcctgcctcagcctaccaagtagctgggattacaggtgcccgccatatcacccggctaattttttttttttttagtggagatggggtttcaccacgttggccaggcttgtttcgaactcctgacttcaggtgatctgcccgcctcggcctcccaaagtgctgggattacagaagtgagccactgcgcccagccccagcttccccttttctagagagtcccagagtttggtgttggacaggagaggacaaggtgggggagaatctgtgctctgcaaaacagacgaacggaagtaggaagctgggctggtggctgggcacttgggtcctttggagagctggcactgggtatccgcgcctggggcgccacagcctctttatactgataagcat

SEQ ID NO: 7844 - DNA, 6000 bp, Homo sapiens
aaaaaaaaaaaaaaaaaaaagaaagttttcgttttctggattgtaatcaacaagggccaggaagggtggagtctttgcggggtgagaggatgcgtgtggacagtgataacagcagctagcctacgtatgacacccactgaaaaccagcgctatacactcagctctacccttctaacttgttgaattcttacaacaccccctaaggcaggaatattattattcccattttactgaggcacagatagtttaggtgacttgcccaaggccacacagctggtaggaatttgagggtttttgttgttgttgtttgtttgtttgttttttatgatgcagtctcgctgttgtcgcccaggctggagtgcagtggcatgatcttggctcactgcaacctctgcctcccgggttccagcgattctcttgcctcagtctcccgagtagctggaattacaggagcccacaaccatgcctggctgatttttgtatttttagtagagaccaggtttcaccatgttgctcaggctggtcttgaactcctggcctcaagtgatccgcccacctcggcctcccaaagtgctgggattacaggtgtgagccactgtgcccggctagggggggttcagtttttaaatgctgtactctttctttctttctttccttccttccttccttccttccttccttccttccttccttccttccttccttcctttctttctttctttctttctttttctttctttcttgggacagggtctcactctgttgctcaggctggagtgcagtggcgcgatcatggctaactgcagcctcaaactcctgggctcatgtgatcttccaccccagtcttagaaaaggttgggattgcaggcacgaaccactatgcctggctaatttttaaattttttgtagagacagagggtctcactgtgttgcctaggctggtcttgaactcttggcctcaagcgatccttcctcctcaactcagcctcccaatgtactgggattacaggtgtgagccactgcacctggctaaattctgcacaccttttactctagggataaaaataatacgaaagtggaatgccagactccgaatacacacaccaagtggcctggactcttcactgctacctggcatgggggaggggagtgccccaacttcctctctgtccttcctgttgcctcaacaccagctggagtgctgagcagtgccagccaacccataatagtcagcagagagcctcagggccaggtcactctgacattgtgggggtgggggggtggggactcctgcctgggtcctgtgctacccacagctttgtctaccggagcctgtgtgccacgtgctggacaaatcttaactcctcaaggactcccaaaaccagaggtaggttcacctcaatgactcttgtttccccgatgaggaaataggcacagccagctgcaactgacacccacagtcatggaggccggggctgctcaggaccacttgctgtgctgcctgccagctctccagagcccaagatttggagatggtaatattctagggcatggggttctgcagcggggactaacacactttgaaatttacctacttagggctgggcgcggtggctcatgcctgcaatcccagcactttgggaggctgaggtgggcggatcacaaggtcaggagttcgagaccagcctggccaatatgatgaaaccccgtatctactaaaaatacacaaattagttgggcatggtggcgggtgcctgtagtcccagctactcaggaggctgaggcgggagaattgcttgaaccctggaggcggaggttgcagtgagccgagattgcgtcactgcactccagcctggatgacagagcgagactctgtctcaaaaaaaaaaattttacctacttagctgagtgatcttaggtaaattacttaacttctctgtgccttatctgtagaataaatataacaatagtgtcaaattcagacagttattataaggtttcagtgaggtcaggcacggtggctcatgcctgtaatcctagcactttgggaggccgtggcaggcagaccacttgaggtcaggaattccaaaccagcctgaccaacatggtgaaaccccgtctctactaaaaatacaaaaaattagccccgggcatggtggtgcacgcctgtaatcccagctactcgggaggcttgtggcaggagtaatgcttgaacccaggaagcagaggttgcagtgagccaaaatagcgccactgcactccagcctgggtagcagagtgagactccgtctcaaaaaaaaaaataaataaaataaaataaaacaaggtttcagtgatacagtgtttaaagctgcgtggtggccactgcctgtagtcccagctactcagggggcagaggtgggaggatcacttgagcacagagtttgaggctgcagtgagccgtgattgcaccactgcactccagcgttggcaagatggcgagaccctgtctctaaaaaaaatatatatatataaatttgccaggtgtggtggtgcacacctgtagtcccacgtactcaggaggctgaggtgggaggaccacttgagcccaggagttcgaggctgcagtgagccaagatagtgccattgcattccagcctgagtgacagagcaatatctgtccctaaaaaaaaaaaaaaagttgacacaaaacacaaaatgttcaagaaacagtggcttccaataataataattttattattattattattgtcaggcacagtggcaatcatgcctgtaatcccagcagtttgagaggctgagacaaggcaggttgcttaagccccagaattcaagaccagcatgggcaacatggtgaaaccagatgacctccaaaataataataataataataataataataataattaatcaggcatgatggtgtgcacctgtagtcctagctacttgggagggtgaggtggagggttgcttgagcccaggagatggaggctgcagtgagctgggaaagtgccgctgcagtccagtctgggctacagagccagaccctgtctcaaaaaatagtaataatatagtaataatattattgtggcccgacatggtggctcacgcctgtaatcccagcactttgggaggctgaggcaggtggatcacctgaggtcaggagttcgacaccagcctggctaacatggtgaaaccccatctctactaaaaatacaaaaattagccaggtgtggtggcatgtacctgtaatctcagctacttgggaggctgaggcaggagaattgcttgaacccaggaggcggaggttgcagtgagccgagatcatgccaccacactccagcctgggcaacagagcaaaactctgtctcaaaaaaaataaattattgctatgatagattatgtcgcttccttgctcagcaccctcctatagcacctgtctcatttggaataaatgatgatgtccttgcgttgcccacgtggccctacatgccgtggcccctgataactgtttttcatttgttttgttttgttttgtttttttctttttttgagatggagtcttgctctgttgcccaggctggagtgcactggcatgatctcagctcacagcaacctccgcctccctggttcaagtgatccctcctgcctcagcctcctgagtagctgggattacaggcgtccaccatcactccaggttatttttgtgtttttaggagagatggggtttcaccatgttggccaggctggtctcaaactcctgacctcaggtgatccacccaccttggcctcccaaattcccgtgattactggcatgagccactgtgcccggcccctgatgactctgctattgcctctcaccctctccctctggcagattccactccagccacactgggctccttgctgttcttggacatgaccgtcatgttcccacctcagggcctttgcactggctgttctcgatgcctgaaacactcttcccccagatctcgatgcatctctcccactgttccttcagatttttatgcaaatgtcaccttctcaagaagccttccctgaccatgcctgtacaactccaacatagccagcttccctgtgtgatatttttcccatagtatttattatcttctaaaatactgtggattttggattttgctcatttctttctttcttttcctatttttttttattttttgagacagagtctctctctgtcatcctggctggagtgcaggggtatgatcaagctcactcaatctcctgggcccaaatgattctcccacttcagccttttcggcagctaggatcacaggcacgcatgaccatgcctggctatgttttaaaaaattttcgtagagatggggtctccctatgttgcccaggctggtctagaactcctgacctcaagtgatcttcccaccttggcctctcaaatcgttgggattacaggcctgaaccaccgtgcccagccccaatattccaatgtactagggttctggcattgtaatattctagaattccaagatgccacttctaacaacactaagttctagaattccaattttttttttttttttttgagatggagtctcactctgtctcccaggctggagtgcagtggtgtgagctcagctcactgccacctccaccttctgggttcaagaaattctcagcctcccaagtagctgggattacaggtgcccgccaccacacccagctaatttttgtatttttagtagagacggtgtttcaccatgttggcctgtcttgaattcctgacctcaagtgatccacctgtcttggcctcccaaagtgttaagattacaggtgtgagccaccacacccggcctagaattccaatattctaaagcactggagtccttatgacgcaatattccagtttgcaaggtgctggtgggccgggctgatggacaccctagatctccagggccatggagtttcctcctctgagttttcatcgtctttctctcctgcccagacaccaggagcctgaatggggaacgattctgtcagctacgagtatggggattacagcgacctctcggaccgccctgtggactgcctggatggcgcctgcctggccatcgacccgctgcgcgtggccccgctcccactgtatgccgccatcttcctggtgggggtgccgggcaatgccatggtggcctgggtggctgggaaggtggcccgccggagggtgggtgccacctggttgctccacctggccgtggcggatttgctgtgctgtttgtctctgcccatcctggcagtgcccattgcccgtggaggccactggccgtatggtgcagtgggctgtcgggcgctgccctccatcatcctgctgaccatgtatgccagcgtcctgctcctggcagctctcagtgccgacctctgcttcctggctctcgggcctgcctggtggtctacggttcagcgggcgtgcggggtgcaggtggcctgtggggcagcctggacactggccttgctgctcaccgtgccctccgccatctaccgccggctgcaccaggagcacttcccagcccggctgcagtgtgtggtggactacggcggctcctccagcaccgagaatgcggtgactgccatccggtttctttttggcttcctggggcccctggtggccgtggccagctgccacagtgccctcctgtgctgggcagcccgacgctgccggccgctgggcacagccattgtggtggggttttttgtctgctgggcaccctaccacctgctggggctggtgctcactgtggcggccccgaactccgcactcctggccagggccctgcgggctgaacccctcatcgtgggccttgccctcgctcacagctgcctcaatcccatgctcttcctgtattttgggagggctcaactccgccggtcactgccagctgcctgtcactgggccctgagggagtcccagggccaggacgaaagtgtggacagcaagaaatccaccag

SEQ ID NO: 7845 - DNA, 6000 bp, Homo sapiens
tacaacctttaaagaggtaattagctgaaactgaggtcattagggtgggccccaactcaatatgactgatatccttatgaaaagaggagatccagacacagacaggcatagagggaaaactgtgtgaaaacatgaggaggaggcggtatctgcaagccaaggagagaggactcaggaggaatcaaccctgctgacaccttgatcttaaacttccagctgataaaactgtgagaaaatatatttctattgttgtagccacccagccaatggtattttgttatggcagctctaacaaactaaacactctgcttcttttcattgactctcgtctcaatgacagcccccaaatccacgcagttaccttggtgcaacagttctgaagaaaatggccacaatattcttggacactccttccactgacaggaaggcaggcatattgtatcgcctctcccctggaacctgggtagggttgggactactttgaccaaagaacgtggtagaaatgacttccacgtagctttcaaggctaggtcaaaaaaggctaggaagcatcttctggttctcctgggacacgtgttctggaggaaggcagccattgtcctgggactttgattcctctgagaccaccatgctggaaaggctgcctgtaggcacttggtgcaataccagcctagttcagcatttgagtcattccaacccaggcatctgacatgtgaatgaaggagctctagatgactccaattcacagtcttctagtcaccccccagacctttgagttttgggtggcagagacaagcatctctgtgccttatcctaattcccaacccacataatccatgaacgtaatgaaatggttgttttacatgctatgatttgggtggttatacagcaattatgaattatgaatgtgggcttcataaagacccttcatgcttcctcattctccagagccatttggtctccaagctcagtctaccaagcctggaaatctctccctaaactacacctcctctctagcacactactccagcacaggcaattattcgacaagttcaccttgatctctggcaacttcttaccctttaagatctctgcctccaactgggagcattctcagagccatccctttgcagggggactctagagcaatgttttctggaagcacacacctgacaagtcactctcctgcttaaatagcttttaagcagaagaaattgtaagaaagaaatttttttttagaccaatatccttgatgaacattgctgcaaaaatcctcaataaaatactgacaaaccaaatccagcagcacatcaaaaagcttatccaccacgaccaagtgggcttcatccctgggatgcaaggctggttcaatatacgcaaatcaataaatgtaatccagcatataaacagaaccaaagacaaaaaccacatgattatctcaatagatgcagaaaaggcctttgacaaaattcaacaacccttcatgctaaaaactctcaataaattgggtattgatgggacgtatctcaaaataataagagctatctatgacaaacccacagccaatatcatactgaatgggcaaaaactagaagcattccctttgaaaactggcacaagacagggatgtcctctctcaccactcctattcaacatagtgttagaagttctggccagggcaattaggcaggagaaggaaataaagggtattcaattaggaaaagaggaagtcaaattgtccctgtctgcagatgacatgatggtatatctagaaaaccccattgtctcagcccaaaatctccttaagctgataagcaacttcagcaaagtctcaggatacaaaatcaatgtacaaaaatcacaagcattcttatacaccaataacagacaaacagagagccaaatcatgagtgaactctcattcacaattgcttcaaagagaataaaatacttaggaatccaacttacaagggacgtgaaggacctcttcaaggagaactacaaaccactgctcaatgaaataaaagaggacacaaacaaatggaagaacattccatgctcatgggtaggaagaatcaatatcgtgaaaatggccatactgcccaaggtaatttacagattcactgccatccccatcaagctaccaatgactttcttcacagaattggaaaaaactactttaaagttcatatggaaccaaaaaagagcccgcattgccaagtcaatcctaagccaaaagaacaaagctggaggcatcacgctacctgacttcaaactatactacaaggctacagtaaccaaaacagcatggtactggtaccaaaacagagatatagatcaatggaacagaacagagccctcagaaataacgccgcatatctacaactatctgatctttgacaaacctgagaaaaacaagcaatggggaaaggattccctatttaataaatggtgctgggaaaactggctagccatatgtagaaagctgaaactggatcccttccttacaccttatacaaaaattaattcaagatggattaaagacttaaatgttagacctaaaaccataaaaaccctagaagaaaacctaggcattaccattcaggacataggcatgggcaaggacttcatgtctaaaacaccaaaagcaatggcaacaaaagccaaaattgacaaatgggatctaattaaactaaagagcttctgcacagcaaaagaaactaccatcagagtgaacaggcaacctacaaaatgggaaaaagttttcacaacctactcatctgacaaacggctaatatccagaatctacaatgaactcaaacaaatttacaagaaaaaaacaaaaaactctatcaaaaagtgggcaaaggatatgaacagacacttctcaaaagaagacatttatgcagccaaaagacacatgaaaaaatgctcatcatcactggccatcagagaaatgcaaatcaaaaccacaatgagataccatctcacaccagttagaatggcaatcattaaaaagtcaggaaaaaacaggtgctggaaaggggagaaataggaacacttttacactgttggtgggactgtaaactagttcaaccattgtggaagtcagtgtggtgattcctcagggatctagaactagaaataccatttgacccagccatcccattactgggtatatacccaaaggactataaatcatgctgctgtaaagacacatgcacacgtatgtttattgcagcactattcacaatagcaaagacttggaaccaacccaaatgtccaacaatgatagactggattaagaaaatgtggcacatatacaccatggaatactatgcagccataaaaaatgatgagttcatgtcctttgtagggacatggatgaaattggaaatcatcattctcagtaaactatcacaaggacaaaaaaccaaacaccgcatgttctcactcatagatgggaattgaacaatgaggaaacatggacacaggaaggggaacatcacactctggggactgttgtggggtggggggaggggggagggatagcattgggagatatacctaatgctaaatgacgagttaatgggtgcagcacaccagcatggcacatgtatacatatgtaactaacctgcacattgtgcacatgtaccctaaaacttaaagtataataataaaaatatatatatatataagaaagaaattttaagaagaaattctaagttctttttacagcattcaagaccaaccaagaaattgcctctgccgccctctacatacttaatgcttattgctgtctgccttatcatctatgctctggtaaacaaaagtaacctgcttttttgtgacccctttcgtgggtatttttactcccctctgacaagaatgcattattttttctcctttatctgagtctttaagactcagcctacatgttccctcctccggatattgactctagatccgtgaatctgagttagtggttccttttagaggacctcacaaggagccaggcatctgtctatcactacgtgcccccaccctattgtaactaagcactgcattctcacctctctattcaggtggtccgcagagcccatgtctgattgatctctatgtctccagcagccagcaaggaagcacctctttagagacctgcacctatacaatacctaccaccttttatttctcgatatgtgaactccattgagaacaaacgagtaaatgtaggtaatgtgccttcttcttttcttttcttttctttttttttttagatggagtctcgctctgttgcccaggctggagtttagtggcacaatctcggctcactgtaacctccgcctcccaggttcaagcgattctgccgcctcagcctaccaagtagttgggattacaggtgcccaccaccacgcccagctaattttttttgtatttttagtagaggtggggtttcatgatgttggctaggatggttttcaactcctgacctcaagtgatccacccacctcggcctcccaaagtgctaggattacaggtgtgagccacagcgcccagccagtaatgtgccttcttaagttctgtgagccattctaacaaattatcagaacagaggaaggggttataaacatccccccacccccgatttatagccagtcagtcagaagtacaggtggccacctgggacttggattggtgtctgaagtgaggacagttttgggagagtgagccctttaacttgtgggatctgacactaactccaggtagacagcgtcggagctgaattgaattgtgagatacccagtggtgtccccagagaactggagaattgcttgatatggaaaagacccacacatttgatgccagaagtactgcataagtcgagaattgagtttgacttaatcatcatatttgggcttgattgcgtggctgaaactcttcccacttcagtaattgtttctttcattttcatgaaactctgaagaaggaagggctggacattcagattccttgacccttgacatttggaagcatgaactccagtctctcacagaaggctagaggtgaaggaacattcagacacattggtttctaagaagagtccgctgacaacatacccaaggtgtcttctgaaaattataagaaatcctgagtttctgttaggggattggctccagctccattgtccctcccccatcattcagtagtctccgcgaaagcccttagagccggtgttgctccacaggaagccaagaagcacacaggaaaaggagcttagctgctggtaagttggggactgacaatttaaaatttatcaatggaactcctgctctctgacaaacacctcctaaattctagagcagtgctgtaatggagcatccacttgccacaggtggcttttgagtgcctatgtttctatcttgatctgaaatgtgcttaagtgtaaaatatacttagtgtagtttaatcattagtatgatcaaaataatacaatttatctcgttaataactttcattttggtaacgtgttccaatgattttttttatttgcggggttaaatgaaacatattattataattaatttctcccaatgattttacttttttaacatggctactagaaagttgtaagtcacgtgtgtggctggcatttagggcttgcattaccctgtctctactaaaaatgcaaacaacaaactagccaggcgtagtggtgggagcctgtaatcccagctactcaggaggctgaggcaggagaatcgcttgaacctaggaggccgaggttgcagtgagccgatatcgtgccattgcactccagcctgggcaagaagagtgaaactctaactcaaagataaataaacatgtgaaggagccaagtgtgaggagcttaagaggaagagcatggtaggcagaaggaacagagaaggcagaagccccgagatgacaatgagctgcatgttcaaggaatcagagcccgttatgggtggagcccagtgtgt

SEQ ID NO: 7846 - DNA, 6000 bp, Homo sapiens
cacagtgtgtcaggtgagagtgcagagatgaggtctggggatacacaagacaaatctcagggtgcttgagaagtgtgagttagaaatgtggaagccatagaagagtgctgagaagaataacatcattgtcttatttttccttttgaaatataatttgtctgtgtctggattttagcagagggaatagcaggaccaggaacaaactatctgcaaagtttgtacaaatatccaagcctgacagggccatggacatgggtagtggagatggagatggctctggctgtgcattcagcatgttctgtagatataatcaataggacttggattgtattgggtggtaaggaaaatgaaaggtgagttctacatttagagctttaataactgaatatttaaactccaaatagatacagaatattggaagaatggcaggtttgggaggaagggacaagcaacagtttagtttgggcaatgttgggtttggagtgtctatgggactgcaggggagatatcaagaagtcaattggttatatgagactagagctcctggggaggccagtgctaataattcagatgagaggatagcatggtactttaagctgtgatactgaatgatatcacctatagaatgtgggacaccctaaatttagagacatttagagcagaaaactggactgaaaagaggtggccaattgagctgtaaagacaaccaagagtggattgtgtgtacatcttatcatcttatgatatggaaaaaaaatgtgtttgaagtaggagaaagagatccagtggttcctatgtcactggaacatcaggataaaaactgagaaaggtccactggatttggcagtctggaggtcatgtgtatccttaggagagtgcattagctggagtgctaaggactaaagtcaatatagaatggattcagcagaataggtgaggtgagaaaaaaaaagcaagcaattagagacaaccatttctaaagtttggctaggaattctctttacagaaaacacttctcttaaagaaatagggttgaagcttggaaagaaatatgggccaagattggtttctttttaaagggaagggataggataatggttacttggtaacaagaaggatctagtagaaatcaaatcttgagggtttctttttagcagaaagcagaaggacaaataccatttcttgggaagacgagagacagtgggatggaaagcaaatgtaaagagggaagtcactgggaaaaagaagtctttattcacaatagcaagggcacgtaaattgagggttaggaaagaaaaggctaaaaaatgcacatctaattgttacagttttctcattaaaattcagccaaggccatcagctgagagtggaatagtagaggaagttggttagtttgaggagaaagcagaagggctgaatgttattttaatgcatcagaaatcacacgtgctggagaagcacagatgctaacaaggaagtgccgagtttccattatagattacattccaatctgtaatcatacatccagttgtacctctcaataattgtgacattgaacaagtcacttcccctctctgagccatggtttcctatggattatacaagaacaatatttgtcccagagcaaggatgttgtaattagaaataataaaatacacattggttgatacacattgggattgcaccaaatagcagccctcataatcagtacaggtatcatctctggtccacggttctcttctccactttgtaactagggtggatccaaaattttacaacattgtcttgttggcctgtccccacctgtcactgcacattgttggaatgtgtcaacatttccaaatgacttagagattattgatacatcatactgtctgaatgtcttctaggatatttggagagtggtagagaaaatctgagtctgttgaggaactagggaatgggagagggttaaccatacaattctgttgaaatcagtctgattgagctccaactctggttctacccctttctgactgggggctttaaataattaatgtaaccaatataagtcaacttcctcatgtgtacaatggttatactaattaaaactaaggttagtcaatattcaccgtgtctcaaggtgtgctcagtgctcacacagattaacacgtctcatctgcagaggctgtgagagcagttgttagggttaaaggagaagctcttggcatgtgagtaatgttcataagtagtagccactattgctatgagcattgttcttgtcctgaccttgagcttcaaaaggcacgacccaggattgagccccatgacacagcacacagcctggtgaggaccagaagttcccatttgtcacagacactcagtctagcctagaagatttccatgtccagtctcacttaatcctcacctgaaagttagacttcaccacaaaactgtccttgttctgcagaggagaaaactgaggctcaaagagatatcactgaccaagaacccatattggcaaggtgccaacgataagagtagcgatctaactgaccccaaagcccagtgttctttactctgtaacagtgatgctcaactggggggagttttgcctcccacgggacctttgacaatgtctatagacactttcagttgtcactcctgaagggggagttgctactagcatcggtggatagaggccaggggtgttgctaaatatcctactgtgcacagaacagtcccccacaacaaagaattacacagccccaattgtctgtagtgccaacgttgagaaaccttgagctacattaaacaatgtcccatgaaagacctcagtgaaagtgactggtaatgacaggaagaaaagaaggaagagagaaagggaaaggaggaaaaaaccatgatactagggtatgaccacatgctggaaatatctggggaactcctttcaaatgcagcattttagagttgcaacggtagtggctctaaagttgctcatcctgaatttcaaatcttgctgcctccactgaccggctggacatgatgctgaaaaaaaaaaacctacaaaaaccccaaggccatgaattccctctggtacaaaaaggggtaatgatggctgcccacaatgttattatgagtattatttgtgaacaagtgctgtataattgctgttacttttagagaggctggatatcccaaggtaggaagagtctctaattttcctggccataaaaatcactgtagcttttacacagagagattctagagttgggttcatgaatatgcattttaacaaataccttggatgtttctgatacagcccacagaccacagtataagcaaatttggtcaagtggcaaagacacaagggacacagagacctttgggttgagttggatgcaacagcttcccatgtgacctggtgcagaggcagggactgtaattttgtgattctgtttcttaaaagcaaggaaatagatcccagaaagatgccaggatatcctcccatagtgttattgcccagaatttagtcatgtttccaccaataaagcaatcccttgcaaagcaaaaggaattctagttagaacaaattagaaaatcaagatatgcccgcaaagatggaggagggataccttcccccaaaagagtgagtaactgaacaaaattgcgatttgatttgcagagaagaaatgaggaacagttatttgtggggggagggggcatcaccagcaatatctgtcagaattgttgcatagagaaagggcttagaagtcagactaagctagattaaagatctttgtctactgtttcctacttaagtgaccagcagatttcacaattgctctcaacattgagtcattcctgtggaaactacaaacaatgaatattacagagctactatgcagaccaaactacaacccatatgtagcaattaacacagtgaatagtctctgataagaaccctacaaatactagctaaatattcatgctcattctgtttatcccacagaccttgaagatatacaacggatgctaagtagggacaatgaaaagcagacgggagaaagtaaatatagggccctctttgttgacttcatctagcacagaatctataggatgtaatatatttctgctctttttttttgtggggggaaatggaatctactctgacatccagactgaagtgcagtggcacgatcttggctcactgcaacctctgcctcccaggttcaagcaattctcctgcctcagcctcctaagtagctggagttacaggctcttgccaccacacctggctaatttttgcatttttagtagagatggagtttcaccatgttggccaggccagtctccaactcctgatctcaagtgatccactctcctcaacctcctaaagtgctggggttacaggcatgagtcaccacgcccggcctatagcatgtaatatatgtctatatattacaagtaatggttcaaaatcctcttcagctaactcaatccaaaccctaaaacttcaaattaaatatcaactaaaaaataggtcaagggtcctcacagtgggagggacaggagctgggagactgggagagcatggggccgaaagaagttgcagagcttgccagcatgtttgcattgagtgatggaggccacagatgtgaaccttctgactctgagtcttgtgccttcctcacgaagctgaagctgcctatgctcaattttccattgtccatacactctcagttcagtatttccgctggtggacagagccctttaatcctcttggtaatcagcttgataggtggcatgcatattaataatgatgggaatatagagaactatcgtttcccaaaggaactccgagagagtgccaattttatgttataaccattcacaaggctcactggggagggtctgctggtaggaggaggagctacagtggaagttaatgaatagttgtattgtaagatggtgtcacagctgagaaatggccattgctgaaatgtttcaggtgtgggaagatggaaaccaacttctccattcctctgaatgaaactgaggaggtgctccctgagcctgctggccacaccgttctgtggatcttctcattgctagtccacggagtcacctttgtcttcggggtcctgggcaatgggcttgtgatctgggtggctggattccggatgacacgcacagtcaacaccatctgttacctgaacctggccctagctgacttctctttcagtgccatcctaccattccgaatggtctcagtcgccatgagagaaaaatggccttttggctcattcctatgtaagttagttcatgttatgatagacatcaacctgtttgtcagtgtctacctgatcaccatcattgctctggaccgctgtatttgtgtcctgcatccagcctgggcccagaaccatcgcaccatgagtctggccaagagggtgatgacgggactctggattttcaccatagtccttaccttaccaaatttcatcttctggactacaataagtactacgaatggggacacatactgtattttcaactttgcattctggggtgacactgctgtagagaggttgaacgtgttcattaccatggccaaggtctttctgatcctccacttcattattggcttcagcgtgcctatgtccatcatcacagtctgctatgggatcatcgctgccaaaattcacagaaaccacatgattaaatccagccgtcccttacgtgtcttcgctgctgtggtggcttctttcttcatctgttggttcccttatgaactaattggcattctaatggcagtctggctcaaagagatgttgttaaatggcaaatacaaaatcattcttgtcctgattaacccaacaagctccttggccttttttaacagctgcctcaacccaattctctacgtctttatgggtcgtaacttccaagaaagactgattcgctctttgcccactagtttggagagggccctgactgaggtccctgactcagcccaga

SEQ ID NO: 7847 - DNA, 6000 bp, Homo sapiens
gccaccatgcctggcccgtttgaagttttttacaaggatcacacttgaggctgcgccttgtcgagatttattttaaggcaagctctgaaatctgcagtgtaggccagcaggctggagacccagggaagagttggtgctgcagctggaaccccaaggccacctggaggcagagttccctcctcctggaaggaccccaggctttttctcttaagcccttcaactgattagatgaggcccatctgcattacagacggtcacctgctgtgcttgaagtctacggatttaaatgtgaatcacatcaaaaaaaaaaaaaaaattttgcatgtgaggcacagtggctcacagctgtaatcccagcacattgggaggccgaggcaggaggatcacttgaggtcaggcgttcaattccagcctgggcaacaacatagcaagaccccatctctacaaaataaaaaacaggctgagcgcggtgactcacacttataattccagcactttgggaagctgaggtgggcagatcacctgaggtcaggggttcgagaccagcctggccaacatggtgaaaccccgtctctcctaaaaatacaaaaaaaagattacccgggtatggtggtgcatgcctgtaatcccagctatttgggaggctgaggcaggagaatcacttgaacctgggaggtggaggttgcagtgagccgagatcgcaccattgcactccagcctggggaacagagcgagactctatctcaaaaaaaaaaaaaaaaaaaaaagaaacaagaaaaaaacaaccttcacagcaacatctaaaaaaacatttaactggccaggcacggtgactcacgcctggaatcgcagcactttgggaggctgaggtgggcggatcacaaggtcaggagttcgagaccagcctggccaatatggtgaaaccccatctctactaaaattacaaaaaaattagccaggcgtggtggcaggctcctatagtcccagctacttgggagactgagtcaggagaatagcttgaacccgagaggcagaggttgcagtgagctgagattgcgccactgccctccaaccccaagcgacagggtgagactccatctcagaaaaaaaacaaaaacaaaaaaacatttaaccaaaccctggggcaccatggcccgccctagtgcacccataaaatcagccatcaccccacgtatccactcagaactcagctctccagcacctgtcaccagcttgtcattattggccacgggaatttattaggaaggggtgaccggcccttgctttgctcccagcggggaggcggacagagtcgtccctgctggccaggtggcacaggtggttctgatcggccggtgagtctccctccagcgcagctctgagccctcccagaccccatcacgctgctgctggccgggatccaaccagtaggggaggggtctgcctcccacgaggtgtctgaatgttccagcaatctgactgctgaggacagacctgagcattcaaagcattccttcgggctgaaaagagagaaagccctggttgaagtggttttccttttacgagtgggtgccagcccccagcccgggcggagggcggtgactcatcctgccctgtttgatgttgaggaggggcccccaccgcccctttgaatgtcgggcctcggggggagccaggatttgacccgtccccactcccagtcccgcctgaggttttacatccccagctccaacgcggcgaccagaaccacagaacctcaacggcgacgatcttggggctcaccagcccagcgcagtgggcatggggggtggtgccaaggtgccacgtgctggagccacaatgccagctattttcggggtctggaggctatttctgtcgtccaggagggccgcttcccaaatagaagtctagaaagcaggccaggtccgagtcatcacaggccgcagccggcgggctcactctgtgggcatgagcgtcccccggctgcccagctgggcaagaccccaaagctgtcccacaggctcctggccgtttgaagggcccaggtcccaggtatccttggggtccaaaggaggacagaggatctgggatgcagaggtactggccaggcgaggcggctcatgcctgtaaccccagcactttcagaggtctaggcgggagggtcgcctgagcctaggagttcgagaccagcctgagcaacatagtgagacctcatctgtaccagaaaattattctaaaaattatggccaggccaggcacggtggctcatgcctgtaatcccagcactttggcaggctgaggtgggcgggccacctgaggtcaggagattgagaccagcctggccaacatggtgaaaccccgtctctactaaaaatacaaaaattaccctggcgtggtggcgtgcgcctggagtcccagccacttgggaggctgaggtgggagaattgcttggacccagggggcggaggttgcagtgagccgagatcacgccactgcactccagcctggctgacagagtgagactctgtctcaaaaaaataaataaataataaaaatgaaaattatggccaggtgtagtggctcactcccgtagtcccagctactcaggtactcccagctgaggcgggagaatcacttgagcccaggaggtggaggctgcattgagctatgatagcaccactgcattccagcctgggggacagagcgagaccctgtctcaaaaacagataacaaaggcacctccgtgaagcgacactgcgatccttctcggatcatcccctcacctctgccacatctaatcctccccctgtgatcgccctctcgccttccaggaaagaaagcaaggagagaaaggtcgctgagtcccacagagacacagttaccggttacgggatgagatccagggccagatggacgtgtccccgtgtagcctgacccaggacaccggacaccccagccccagccctgctggggtgagctaagcggggagtggcagcggcacccccaaaggcatggccaggagagacgggcgtgtagcctggggcgggctggcagcagcccggggcagggggtccctcctgtgaccggaagcatcagcccctcagagggttggagtcatcagggggttcaggctgcaagagaaacatggagacgggcttatctcgtcctcaccgggcccagccccctggccgggtgtcaccgtgaaacctccctcaagctcatcaaatgtgcaggcagcgttttcctatcaggaccttccttccttggggtgagaatgaggtcttggactccgaaaacggggtccatctgtccctgaccctttgtgttcaaaatctggcaacgcttgctgaaggaagctcagccttttcttttttaaaaaaatattttttaggccaggtgccgtggctcacgcctgtaatcccagcactttgggaggctaaggcaggtggatcacttgaagttaggagtttgagaccagcctggccaacatgctgaaacccgtctctactaaaaatacaaaaattagctgggcgtggtggcaggcacctgtagtcccagctactcaggaggctgaggcaggagaattgcttgaacccggggagcaagagattgcagtgatcacaccactgcatttttctttttttaattttgggaaaagacacacataaatttatttatttgtttatttatcttaattgagacagggtcttgctccatcccccaggctggagtgcaatggtgtaatcttgactcactgcagccttaacctcccaggctcaagcaatcctccagcctcagccccccagttagctgggactacagatgcccacatcactatgcctggctcatttttgtattttttgtagagatagggcctcactgtgttgcctaggctggtctcaaactcctgggctcaagtgatcctcccgcctccgcctcccaacatgttgggattacaggtgtgagccaccgcacctggccaagacacatataaagtttaccactagtgatatttaatatagtcacaatgctgtgcatccaatcacgtttattccaggacattccatcaccccaaaaggaaaccctgtcccccatcagccatcactccccagcaccggcacccacgcatccccttcctgtctctgtggataggcctgtcctggacatttcatagaaatgggatcacacggccgggcgcagtggctcacacctgtaatcccagcactgtgggaggctgaggcaggcatatcgcgaggtcaggagttcgagaccagcctgatcaacatggtgaaaccctgtctctactaaaaatacaaaaattagctgggtgtggtggtgcatgaaggtaatcccagctactcgggaggctgaggcaggagaatcacttgaacccgcgaggtggaggttgcagtgagccgagatcgtgccactgcactagagcctgggcgacaaatagagtctctgtctcaaaaaaaaaaaagaaagaaatgggatcacacactgtgtggccttctgtgtctggcatctctcactgagcatgaggcccttgagatgcatccacgttgtggcctatgtcagagcctcactccttttcatggctgagtaatattccagcgtgtggacgggccgcactgtttgcccacgcccccatcaatgggctcctgagctgtttccgcctgtggctcttgggaatggtgctgctgtgaacccgggtgtgccagcctcttcttatgtctcctctgtctcctccttgtgctcaaacacaggtctccaaagcggcgtctgacctcatgagctactgtgagcaacatgcccggaacgaccccctgctggtcggagtccctgcctcggagaacccctttaaggacaagaaaccttgtattattttataactgtgttctcatatgttctctctctctctctctctttctctctctctctctctgtctctgtctctgtctcaggcagggcatcattcagtaattagctcaaacaaaacatctcaagtccccaaaacctttaattccaaaagaaatcccccctctccccgccaaaaaaggcgttcccaccgcccggatggggtagaatggaccttgtaggtggagatgaattttcaggtccgaccccatggccctctcagtttgggccaaaagggatggaggctttacggccacttcccgttcggaataactgaaatcccccagcgatggggtaacaattttttaaaactctcgattgccgtttcaattgtggaccggcgccgagggggaaagggaggtgacttcgcccggtggcaatagttccgggagaattggccattggtaaaaagacttcatagggtcactggaatgctttgtgttgtttttaagtagaggtaaaattgagatggggggcgggaggtgacatcatgaagttttttggaaatatctctttatttaaaaaattgttactccatacggctaaactcggattgtgatggttgaacccgtcgctaaactgcacgatcctgcaatgaatgcacgatggagtgtgggggtctggagggggcttcgtctatgaaaagttgccaagtgtgactcccctgcatgatgttagccatgggtcctttctgcagggtcccctctgtgccagaaatgggttttcgggacttgccccagggaagccgtcaccggcccggcccatcatgtttttggattttttttttttttctttttttgagatggagtttcattcttgttacccaggctggagtgcagctgcatgatttcagctcaccgcaacctctgcctccccggttcaagcgattctcctgcctcagcctcccgagtagctgagactacaggcgtgtgccactacgcccggctaattgttgtatttttagtagagacggggtttcaccgtattggccaggccgctctcaaactcctgacctcgggatccgcccacctcggcctcccaaagtgctgggattacaggcatgagccaccgcgcccagtgtgt

SEQ ID NO: 7848 - DNA, 6000 bp, Homo sapiens
tggaactgaatggagctcagaaatcgcccaaggttggccggccaccatggctcacacctgtaatcccagccctctgggagacttaggaaggaggatcatttgagcccgggagtttgagaccagtctgggcaacatagcaagctatgaaaaaaaaaaaaacaaaaattagctgggtgtggtggctcgtgcagtgagctgcagtgaggtatgatttcatcactgcactccaacctgggtgacagagagagaccctgtctctaaaaataaataaagagggcagcgcggtggctcacgcctgtaatcctaacattttgggaggccgaggtgggcggatcacttgaggtcaggagttcgagaccagcctagccaacatggtgaaaccctgtccctactaaaaatacaaaaattagccggaaatcacttgaacccgggagagggaggttgcagtgagcagagatcgtgccactgcactccatcctgggcaacagagcgagactcctcaaaataaataaataaatacaaatataaataaataaatacaaatataaataaataaataaaagaagttgcctaagatgggggtacagggagcctctggaaaggccagggacacacaaaacttcacccacacctcaaggcttggataggtccatcctccactccctggcacctgctgactttccagggctcattccatcacacattctgagtccatcttctccatgatgaagggagcgcccagagaaggctccctgccttgttccctgtgcactggaggcgcattctcaatgcatcacactgcacctgacaggtaagagcatataaggtgcgtgctgtgtgtttgaggcgtaaatggaaggaatgaatacgtgcaccgagcagtgaaatgaacagcagggttgtgcatcctataccgaatgggctctaggaaaacaggggctgggggcgcctggtggacagtggctgtctggcgttgccctgacctgtccaggagcctgaggcagggcacccgggaacgagggcgctgggcctgaggcaaagggaagctgagcactggggtgaagcagagccttcaggactgtgaggctgggggcccaaccgaggcagtgggcgcaatacatggaaggcacagagaggggacagacaaggcacaggcgagcccagctgtgtctgacgctgggatgctggaggtgctaggcgtacaaaatgtggagtcccagatacgcaggagagcacagggtgccctaggcatagggcaccctgggcgtgcgggttctctagcacagggtgcgcagaagatggggcgtccaggtgcagggttcatagaacatggggtactcgaggcgcgtggcaccgtgggcgtggaggtcccgtgggacggaatacacagagcgtggggtgtctcaggagcggggctcatggggagcccaaggcgcaaagtgggaggctggaagcgaggagcgccctgggagcagggtgtccgaagcgcgggtaccgacctgggcagcgcggggcacgcggcgcgcgggcgagtctgcgtgcgcgcgcggacgccttggttcccggagcccggttgctggcgcggcctccactgcggctgcgcagccgaaggcctgaggggcgccagggctctttacgcgccccccagcccctccgcactctttgcctcctgagcacgccgctcacaagtccaggagacatggatcagatggaggctggagagccgatcccagctgggaccagtggggtttagagggtctagaaaggggcgaggggcgggggtgaggggggttccggctggggttttccaaactgagctgagggtgccttaaagaatgtcgttgctttccctcatgtaagtaaaggccactccttctcgtagcctctggagagtgcaagttagaaccacctcctaggctagctctgtagggggaagtgggtgggctgctcagggctggagggtggggtggggacaaaggcctggagcaggagaacaaggaggtgaccagcttttcctgagcgtcaagttctgttcccttttcggtactgctgggtttatagaaagctggctgcctggagtgccctccatctcaaagccttcatgggtcttacttggtgctgtcaatatctcaaactgggaaattgaggcgtagagagatgggatgccctcctccatacccagtggatctgcagtcaaccacagatggatgggatccgttttgcactcaccaaatcctactttatatttggtcccccagatcccggtgtccaacctggccacccagattcaaggctggacagctttgcagccatgaaatcctgggcatgaaggaggaacgaaagtgacccatccctccattttgaagttctctggggccagatttgcctaggttctggctttcaagaatcccttccccgtcgtgaagagacagctgtccgtagaaggcggtggagggtgacaggctgccacagcagtggtgcgtggtcacccgggcagcctggaagtctggtgtccctgcacttcctccagtttagccacagggacgtgcttctaggaagggattcttagaggccaagttaattcccgtgcagatattcaattcaggctttcttagatactcatttttcccatccagatatgcctcaagttttgtggatttaccactcctactcaggaacccttttccctttcctcattcattctgcaaagcgcatggttagcaatgcactctcttccctggacatatagggaatgggggtttcccccatccccatcctcagcccgtccccctcctctaaaactcagatcagggtttgtctgccctgctgctaagatgcagcccaactttgaactctgagctgtctgctttaacatttgggcctcacttgaatggattcccttccctgaggattccaagccctccccagccatcagtcttcccatctttcataaaatggagccagcagccccgcttcagggactccccccctcccccctgttccctccactccaggattcttcccacttccatttccctccagcccccaccctgcacaaagttgcctgttctgccgaagtgcctatttttggcttggggcccagttttatagccccagctataggtcttggcagtcataactttcgctctccagagagccaagccgggtccaacagccttccccaccccagagagggggtgcgggggctccctctgcagcctcaacccgaaacctgcccctcgcctcacttggtctgatgcctgggaacccaagcctgcttcttgccctacttcttagagtccaccagctgcaatggagttgttaggtgttgaaaatccatgccgggtttttactcttttagagaacataaaattcaatttttcccctcgcaccccctccccaaaagcaagactttgaggcgtttacaggtacaaacctccccctaacgcttccctccgcccctgctgcccggtcagctccaagcccctgtcccggtggcccaggatcttctgctgagggtctcatcccgtcccgcgctccagtcctggctttgcgtgcctccctcgccttttattgtaggtctggtctcccagggtagcggcctcatcgcattcccttcgcagcgcccctggatccagaaaccgcttttacctgtccgctccggtgcagccagcgcgccaaatcccttcgtacccgagtccagtcctccttttgcccgtcccccttgcacgtcgctgccaggaagatgagggcagcccaagtcgcctcagccactaagcatcccccttccagaaccccccaccatgcgaacccaggtcccgggagttccgggccgggtcttgcttgtttccactgcgttaggcctgacgcattactccgtctcccgagaaagaatccggcccgaaatttgcgtgccccgggtgcatttggccatgtcgcatctaccccccaaccccccgctccaacaccgttcctcccatctttatctaatccaactcgggttttgcacaacccttccagatctccccatttgcgccctccttccccgggctcggcgcctttccttatacttcactggaaaatccgctccgggtcttccttacgcctgtctcccttcccccactccccgctccaacgcggggctccagcacgtcgctttccctctccctgcttttccagggaggaggcgagaggaggcgaaaggaaggaaagtccagcccgggttttcgggccggctcctggggcgctcaagcgggttgcggcggccagtcccgggcggcgactccgggccgggttttgcgcgcgcccaccgcccccctcccggagcgggtgcgccggggagcggggcgagcaggcggcttgtcattgctggtgcccggcgccggctcggtccgcgcgtcctgcggtgcccacgggcccggcccggcgccccccctccggccgcaccgggggcgcgacgccgcggcacccgcctccagccgcgccgcccccctccgccagctccgcgccgcccgcccccaacccgagctccccgcggccactgcggggagcccgagccgtcggcgcgggagctgtcggcgctgcggtgcccccgccccgccgtctgccgaggaggccccggctgatggggccgcgcgggccccggagcggcgccgccgggcggcgggggcctgcaggggcgccccggctgccccgttaacccctcgtccaccgccggcgtcggagggggctgggaagtcgcctgggcgcacacgtgccgcctccgtcggggccgcggagctgcgggggagatgcgggccgctgccggcgccgcctcggggcgctccgcctcgccccagcccccggcgctctgacgccgcccccgccccaccgcctccctccccgggaggggcgcagacccgatcgcccccagtcccgagcctccgccgccgcgagggggccgcctttggatccgtgtaatccgcctcttttttttcttttcttttctttttttttttttttcctaatttttggtcggcggcggtgctgggccaggggaaggaagggacacggaggccgccctcgtcccgccacctcctacccgcttccccccagccccggctccgggagatgtgccgggcggggggcccgggttcgccgagccgcaggagagacacgctgggccgaccccagagaggcgctggacaggtgagtgtctgcgggcccagggcgaggggcgaagccgcacctgggccaggtgtgcggggcgcgtggaagaggggaggcgggaaggatgggaggccggggcctgtcctggccgcgaggggggaggggacacgggagccgcgcggggcaccgcacctgagcgggaggggcgtcgggggcagcccgcacctcacccccactggcgaggggcctgggaggggcggcccccacggagcgcccggggcgcgggggtgcggacgggctaccgcagggtgcctggcggggggaggggaccgcgagtgtgcccgcgcgtggctgcgtgtgcccgcgcgcgcgccagcctttgtggggaagcggcgcggcggtgcctgcgtgtccccggtgcgtgtgcgcgcgggtgcttggcgccctgtttgtgtaggtgtctgggtgtgagcggagggggtgcgtgtgcgcgccgcgcgccggccccgcgccccagaggagccgtgtcgggggctggcaccacaggatgctgggcgagggggttgtttttctctgggaggcagtggcgcgggggatggggaggggtccgtctgggtgtccagccggccgcagtccggggggcgccgctgtcaggaggagggggtgcagccgggcagcaccttctctccgtggtgccgggttaaagcacgggaggccggcaggtttgatccactcggattattcgtgctttgaggacagctccccacccccaccccaggtgcgcattggattgagctgcgagggtttggttgtcatcctcccatctgacggtcctgggacccgagtccaggc

SEQ ID NO: 7849 - DNA, 6000 bp, Homo sapiens
gagggcagagtcatccccagatgagatctggggattccacggactcccaagagactctgcgtcctgtgatcgtctgccctgttgaggtcctgggtttttccaggagaattcaagaagcaacagcatgggctcctgactggttcaatatgaaggacacggaggagaggccgggctcacacctgtcatcccagcactttgagaggccgaggagggtggatcacctgaggtcaggagttcaagaccagcctggccaacatggtgaaacgctgtctgtactaaaaatacaaaaattagccgggtgtggtggcacgtgcctgtaatcccagctactcgggaggctgaggcaggagaatcgcttgaacccgggaggcagaggttgcagtgagccgagatcacaccactgcactccagcctgggcaacagagcaagactctgtctcaaaaaaaaaaaaaaaaaaacacggagggggacagtcaccaggggttctgctgtgatccctgccctgacccagggtctcccctgggtactatggatatcgcgttcggatccttccctggcgtggggccgtccggggcactgcagggagctgagcaatgtccctggcctccacccaacccactccatgccaggagcaccccccacagccacagatgtccccagatatcacccagtgtcccctggagggcaagaacccctgccatggactgaggcaggccacccgggagcctgcgtgggtcctcccttctccagagggcctggcctattgcctttgccctttctttattttttctttatttttttttttgagacggagtcttgctctgtcgtccaggctggagtgcaggggcaccatctcggctcactgcaagctccacctcccgggttcacgtcattctcctgcctcagcctccagagtagctgggactataggcacccaccaccatgcctggctaatttttgtatttttttttttttttttagtaacgatgaggtttcaccgtgttagccaggatggtctcgatctcctgacctcatgatccacctgcctcagcctcccaaagtgctgggattacaggcgtgagccaccacgcccagcctgccttcgccctttcattctctcgttctgcaaactcccacagaggattgtgacggctgaccgcgtgccaggctctatgctgagagttaaacgagtgccagctctttgtacacggaggcccctggtccccacccagaggcaaagtggccgtgcctagagtcgggaaggttgagccaaggccgggcgcccctgctgccacccagaggcctgacctgaactttgacccacacccctctgcttcccccacagctctctgaacaacggggcccagagctgatggcagacaatgtcagccactaacaacatagcccaggcccggaagctggtggaacagctacgcatagaagccgggattgagcgcatcaaggtgagcccagcgggcatcaggaagaggaggggagagacccttgggggccccgcaaatgatgaacaggaggctcggcaggagggcagaggcttgcaccccaactgtgtctcttgctgtgtgaccttgaggccctcccttaacctctctgagcctccatttcctcggcagaaagaggcagctgatctaacacctatctcctgccttcgtgcagcaatgtaacgtgctttgtaaacacactggggccccgtggagacggtcatcgtgacagagcgctttgtcgtcctcatctgcattgatctgtccagctccttggcaatgacagatgcaaattaaactgagagacacagtcccaggcgggaggagactgcatgtcgtatctacttttcacttctgtgttgtttgaaggatttgtttgttttgtttgtttgagacggagtcttgctctgtcacccaggctggagtgcagtggcgcgatctcggctcactgcaacctctgcctcccgggttcaagcaattcttctgcctcaacctcccaaatagctgggattacaggcatgcaccaccatgcctggctaattttttgtatttttagtagagacggcgtttcgccatgttgcccaggctggtcttgaactcctaacttcaggtgatccgcctgcctcggcctcccaaagtcctgggattccaggcgtgagccaccatgcctggcccgtttgaagttttttacaaggatcacacttgaggctgcgccttgtcgagatttattttaaggcaagctctgaaatctgcagtgtaggccagcaggctggagacccagggaagagttggtgctgcagctggaaccccaaggccacctggaggcagagttccctcctcctggaaggaccccaggctttttctcttaagcccttcaactgattagatgaggcccatctgcattacagacggtcacctgctgtgcttgaagtctacggatttaaatgtgaatcacatcaaaaaaaaaaaaaaaattttgcatgtgaggcacagtggctcacagctgtaatcccagcacattgggaggccgaggcaggaggatcacttgaggtcaggcgttcaattccagcctgggcaacaacatagcaagaccccatctctacaaaataaaaaacaggctgagcgcggtgactcacacttataattccagcactttgggaagctgaggtgggcagatcacctgaggtcaggggttcgagaccagcctggccaacatggtgaaaccccgtctctcctaaaaatacaaaaaaaagattacccgggtatggtggtgcatgcctgtaatcccagctatttgggaggctgaggcaggagaatcacttgaacctgggaggtggaggttgcagtgagccgagatcgcaccattgcactccagcctggggaacagagcgagactctatctcaaaaaaaaaaaaaaaaaaaaaagaaacaagaaaaaaacaaccttcacagcaacatctaaaaaaacatttaactggccaggcacggtgactcacgcctggaatcgcagcactttgggaggctgaggtgggcggatcacaaggtcaggagttcgagaccagcctggccaatatggtgaaaccccatctctactaaaattacaaaaaaattagccaggcgtggtggcaggctcctatagtcccagctacttgggagactgagtcaggagaatagcttgaacccgagaggcagaggttgcagtgagctgagattgcgccactgccctccaaccccaagcgacagggtgagactccatctcagaaaaaaaacaaaaacaaaaaaacatttaaccaaaccctggggcaccatggcccgccctagtgcacccataaaatcagccatcaccccacgtatccactcagaactcagctctccagcacctgtcaccagcttgtcattattggccacgggaatttattaggaaggggtgaccggcccttgctttgctcccagcggggaggcggacagagtcgtccctgctggccaggtggcacaggtggttctgatcggccggtgagtctccctccagcgcagctctgagccctcccagaccccatcacgctgctgctggccgggatccaaccagtaggggaggggtctgcctcccacgaggtgtctgaatgttccagcaatctgactgctgaggacagacctgagcattcaaagcattccttcgggctgaaaagagagaaagccctggttgaagtggttttccttttacgagtgggtgccagcccccagcccgggcggagggcggtgactcatcctgccctgtttgatgttgaggaggggcccccaccgcccctttgaatgtcgggcctcggggggagccaggatttgacccgtccccactcccagtcccgcctgaggttttacatccccagctccaacgcggcgaccagaaccacagaacctcaacggcgacgatcttggggctcaccagcccagcgcagtgggcatggggggtggtgccaaggtgccacgtgctggagccacaatgccagctattttcggggtctggaggctatttctgtcgtccaggagggccgcttcccaaatagaagtctagaaagcaggccaggtccgagtcatcacaggccgcagccggcgggctcactctgtgggcatgagcgtcccccggctgcccagctgggcaagaccccaaagctgtcccacaggctcctggccgtttgaagggcccaggtcccaggtatccttggggtccaaaggaggacagaggatctgggatgcagaggtactggccaggcgaggcggctcatgcctgtaaccccagcactttcagaggtctaggcgggagggtcgcctgagcctaggagttcgagaccagcctgagcaacatagtgagacctcatctgtaccagaaaattattctaaaaattatggccaggccaggcacggtggctcatgcctgtaatcccagcactttggcaggctgaggtgggcgggccacctgaggtcaggagattgagaccagcctggccaacatggtgaaaccccgtctctactaaaaatacaaaaattaccctggcgtggtggcgtgcgcctggagtcccagccacttgggaggctgaggtgggagaattgcttggacccagggggcggaggttgcagtgagccgagatcacgccactgcactccagcctggctgacagagtgagactctgtctcaaaaaaataaataaataataaaaatgaaaattatggccaggtgtagtggctcactcccgtagtcccagctactcaggtactcccagctgaggcgggagaatcacttgagcccaggaggtggaggctgcattgagctatgatagcaccactgcattccagcctgggggacagagcgagaccctgtctcaaaaacagataacaaaggcacctccgtgaagcgacactgcgatccttctcggatcatcccctcacctctgccacatctaatcctccccctgtgatcgccctctcgccttccaggaaagaaagcaaggagagaaaggtcgctgagtcccacagagacacagttaccggttacgggatgagatccagggccagatggacgtgtccccgtgtagcctgacccaggacaccggacaccccagccccagccctgctggggtgagctaagcggggagtggcagcggcacccccaaaggcatggccaggagagacgggcgtgtagcctggggcgggctggcagcagcccggggcagggggtccctcctgtgaccggaagcatcagcccctcagagggttggagtcatcagggggttcaggctgcaagagaaacatggagacgggcttatctcgtcctcaccgggcccagccccctggccgggtgtcaccgtgaaacctccctcaagctcatcaaatgtgcaggcagcgttttcctatcaggaccttccttccttggggtgagaatgaggtcttggactccgaaaacggggtccatctgtccctgaccctttgtgttcaaaatctggcaacgcttgctgaaggaagctcagccttttcttttttaaaaaaatattttttaggccaggtgccgtggctcacgcctgtaatcccagcactttgggaggctaaggcaggtggatcacttgaagttaggagtttgagaccagcctggccaacatgctgaaacccgtctctactaaaaatacaaaaattagctgggcgtggtggcaggcacctgtagtcccagctactcaggaggctgaggcaggagaattgcttgaacccggggagcaagagattgcagtgatcacaccactgcatttttctttttttaattttgggaaaagacacacataaatttatttatttgtttatttatcttaattgagacagggtcttgctccatcccccaggctggagtgcaatggtgtaatcttgactcactgcagccttaacctcccaggctcaagcaatcctccagcctcagccccccagttagctgggactacagatgcccacatcactatgcctg

SEQ ID NO: 7850 - DNA, 6000 bp, Homo sapiens
tttgatgggaattgcattgaacctaaatattgctttgggaagtgtgatcattttcacaatattgattctgccaatccatgagcatgggatatatttctattttgctgtgtcatctacgatttctttctgcagcattttgttgttcttcttgtagagatctttcacctcctcagttaggtatattcttagatatttttaattttttgcaactgatgtacaagggattgagttttgcagcaacctggatgagctggaggccattattcatgacaccacatccagctaatttttgtatttcttgtagagatgaggttttgccatgttgcccaggctggtcttgaactcctgggcccaagtgacccgcccgccttgacctcccaaagtgctgggactgcaggcatgagccacggtgcctggcccatcatagcacttttgatcattaggataattccttctccttgtcatttttggacacatgcttcccacatgcctcatcttccagagagggtttccaccagggctgtgctgggagttaaggctggaaaaggggagatggttccacctgccagtgccacatgagtctactcagggctgtaaccagcagggagggtccagtgtgagcctcagactcgcatgtgggacagacgcccatgtgtgacaacgctgcagtgaatctgtttcacacacatggaggaggcggctcagggctgaccatggacctgagtcaatgagcagagatatcccagtgccatccacaaacacaggggagaaggagccacaacttcccactttcatccaaaaccccgacccctccctgtctgtgagggccctggggttctcctctgtctcatacagaggcagaaacctcccccttagtgacccccagctttgcaagtcaccagcagcccctcggcgctggcatcttctgcttcttaaggtttcctgcctatgacaggaagtctcatttctcattttcttcattggaccatggctacatatttcagacacattataagtaggttttcccagtgttaggagcagatgtgggctgttgagcacataagtcactcaccgtgactgtgcagtccaacaccaggatccactcatgtttcaacccccaagacttaacccggtctggaaatgtaccatgactgaggccctcccatgacccaggcaccactggcccccaaaaccactcaggaggggggttcatgacaacaggctccaaatgaggaaaccgaggctcagagatgggacttactgcccaaggtcatgcacgcagggatgaaggtgagcaattcagaaaaaattaactccctatcccacccccaaatcagagctcaagacaagtacttgttcccaaaaccttgaaggcagactgagatgcaggggaatgcccaaggaagcggggctgggggtgggagggacgccaaggaggcaggaatgactcagaggttacttttaagggagggggacctgaacactattaaaaaaaataggaagaaaaaaaagaagggaagtctaagaaggaaactggaagaaataaaacccatactccaaagacaaaagaagagtcagcatttctttatttctccttttttcttctcattgccaattgcagctcaacttgaatttcacagcccgatgtgagatgcgtctctgctgatctgagcctgtcctgcagcatggacctgcaactttcctgaagcatctccagggctggatgccatggtaaggatcccgcaatgctgtgttgatggacaggctgaaggagggaagaggaccccacagggaggctctgagaagaagaacaagcccccagtcaccctcacttggacaggacagactcagaaaggtgctgggtctatcggctcctacgtcctgacccttgatgagatgaggacagatgaggcaaatcgcagaaaagggtcagggagataccatttctgtatgaagtatctgaagacagcctggtgcctgccccagtcccagccttggggaaatgaaagtcaagctcccggagagggcagttccccttcttttggggctgatgacgggacaacctcgtgatggagaacccaggttcccagtagatttactccatccaggaacggtggcctcatccatctgcacagctgggggctgtggaggagacgccatgactccctcccacaaacctctgatctgtcttgataaaattgaaagagggagaggggagactgtagcctggaaggaatcccacctcacaacttggtcctgattgaatagaagaccccagaggttcacagagatcccaaggtggggaggatctgcccagggttcaggaggcgaatctctctcaggaagctccgtgaccccctctctagtgtcactcctgtgcctcagtgggatttggagaggatgccttagattagagggtattgttcagtgggatttggagaggatgccttagattagagggtattgtgtctttcagcaacaaaaccgtacaaaaaaacacctggacatttcacatcagtggataaagcatatcttgtgccaaatcaggaccaaactgcggtgaaatttcgggttcacactacagttaatcgcctttgaggaaagcattccaggttggtgcctatctctgcgataaacgtctcccttcctggctacaggtaatggattaaagcgacactggccgaacagacactgtcttcacccgatgattatactgaaaaatggccataaaattgttccctccaaatccaattccctttgtgacaactctcaaaagaagatatacgaacggtccacaaacatatgaaaaacatgtatgtgtatgtgtgtatatacacacacacagcacggaatactactcagccacaaaaagggacaaaataatggcattcgcagcaacctagatgcagttggagaccattattccaagtgaagtaattcagaaatggaaaaccaaacatcatatggtctcataagtgggagctaaactatgaggatgcaaaggcataagaaggatataatggaatctggggactcacagggaacaatgggagggggatgagcgataaaagactacacattgggtgcagtgtacactgctcgggtgatgaatgcaccaaaatctcaaaaatcaccactaaagagcttatccacgtaaccaaacaccacctgttccccaaaagctattgaattttttttaaaaaaataataaattaaaataaatgtactacattaaaaacaacaacaaaatggcaaaaatccaattgcacatagcaaaatgttttcgtggtctctgcacgctagagcatgtaattggtctttgttcctttctactgttgaagaatattccattctatgcctatatcacatttggtttatgcattcaccaattgatggacatttgggttgttttcactatttagctatcatgaataatgacaaaaaaaggacatatatttgtttgggtttttttatttttaaaaggttacaattatttatttatttatttatttactgagacaaagtttcactctgtcgcccaggctagagtggagttgtgagatcttggctcactgcaaccagttcaagcaaatttttgtgcctcagccttctgagtagctgggattacagttgtgcaccaccacaggaggctattttttttaattttagtagagacagggtttcgccgtgtaggccaggctggtctcgaactcctagactcaagccttccactcgcctcagcctcccaaagtgctgggattagaggcgtgagccatcacaccatgccaaaaggttataatcatttaaattcgggttgcaactgtatgcttacaattctctacatttagatttaaaaacattttattgatggtcaatctggaacataattaatgcatcttaattaagtttccactgatgtatatagaaggctaaaggctgaagttttattcacctctagtagagtaaccaaccataaaatcattagttactttcaacttcataactaattgacatttcccaaatgagctgtctttaatcctgatagttctttagttttaaaaatatatttgccatgggatgctgatttgcaatgggtgtcataatgagaataaccaaaattgggtaaacgtgacaaaatattgacaaaatgtttcacacccttaaattacacaacgtcaataatgaggagaaagcattgcaaaaggagactactgcaatgctacttatattcttgcaataaaaccagcaaagcatccacatcaagagagttctcatctcacttccaactttttcccctgaagaacaatttgaatctctttggcacctaaagtctcataggtcaataaagcttctgctagattcttatgctcctctgcatgacttttcaagataagttttgctcattttttttaaggtttgcatcattcttctttatttttgacttgattttccattcaacatcaccaacaagtttttagcgaaatgtaataattatataattaaacatctttcatggatcaccctatccatctctactatataaatttaagattctaaatgttttaaaaatacttcttgattatggttattaattgttcacaagtccactggtaaatattacttattcctagactgaaacagagctaaacgtcaatactatatctagttttcatttgtatagatacaggactgagaaaatttgttcatctaaataaatactatggatggggtaggaaggtgttttgttataaccatgtcatacaattatttgaattttgaataagttttgctcatttatatgagtcccttagaatggttcttatttcatgttcaatagcagattgagtttctggacttagtttccctgtgtcactgtaggtcataactccaagcttttcgctaattccaaatttgataaccatctgctttgccattttagtggcattagcaaaatcactggaagcacctgttgtaatatggtcaattccaaatataagctcctctgccactcttgctcccatactaatgtccatttgtgcaagcagctgggctctggtttcattccatctgtcatcaccaggtaatggggacacaggtccaaatgttggcccctgtggcatgattgtagctttgttgatagacatttcatcttttgtgtaatatgcaataatggcatgaccagattcatgataagttgtgatggatttgtttttgttatcaatttctgtacttcttctgtcaggccacattataattttgtctttggaaaacttcagttccttcatggtaaccacttcttttccatcaacagctacaaaaggacgtgtatttggtgtgattttatgcacatgaaatatccagaatagacaaagccatagaaactgagagtagactagtgatttcttaaggctgagggaagggaagaactaggactgactacttgggggttctttctgaggtgatggaaatgctgtgggatgaggtagggatggtgattgcacagcatagtgaagacactaaaatccatttatttgtacactaaaaaatggtgcatttcatatggtgtgagttatgtcacataactcagtaagtaaataaataattcatatcccggcttctgcccagggtttggggagctggaaagagtttcactagctgggtgcggtggctcacacctgtaatcccagcattttgggaggctgaggtgggtggattgcctaaggtcaggagtttgagacgagcctggaaaacatagtgaaaccctctctctactaaaaatacaaaaaaaaagctgggcatggtggcacatgcccgtaatcccagctactggggaggctgaggcaggagaatcacttgaacccaggaggcagaggttgtagtgagccaagaacacgccattgcactccagcctgggcaacaaaagcgaaactccatccctccccctccctcccccactccaaaaaaagagcttctctgcaatcctaaccatgagtaaaactc

SEQ ID NO: 7851 - DNA, 6000 bp, Homo sapiens
aaagggctgggattacagtgtaagccatcgcacccggtcaatcacgagggtttattaaattctcaaaatgccatgtggcacaagtttagaatctggggacacccagacctgggtccagttcaattctctgtttcttcctggccatgcaaattatttgtatgccccgtgcctcagtttccccatctgtaactggagatgacgtgaggagggttctgggttaatcatgatcagccattactattgctgctgttgtgtgctgttgtactattgttgagctcagcaagggaccatggaagctgtcataatacctggtaaatgtccttgcatttactgagccacctcctacgaaccgcgggcaggggctgttttactggcagggaaacttaggtgcagaggaaagccggctgcccacgtctcttagtggagtgagaggcaggaaactgggtctcaggacaccctccctccacacacatcagggcggccacgttggggacacacgactatttttactttggtgggctccaggctgcccacgtcgtgatctgggtgttcgccatagcaaccagtgacgccatcggcccctacagccaattggagggggccggaagctgctgggctgccggatgacccagctgggagggcaaggtctcccgggagaggcggggaagggtcgcgggggtgtggcgttaccccaggcctgacttcagctgctctgcgctcagaaaaccaagctgtcacgatgggaggagaataatctacccctcgaaggtctctctgactgcttgaatatgtctgaggacagacaactcacggcgtttagttcaagcagtcatggtgatggaaccatcaccaccatcaccgtggccattagggtctccttcttccccttccaatagttgtgggaattttttttttttttttttttttttttttttttttttttttgagacagcgtctggctatgtcgcccagactggaatgcagtggtgcaatcttggctcactgcaacctccgcctccagagtagctgggattgtgggcatgtgccaccacacccggctaatttttgtattttttatagagatgaggtttcaccatgttgcccaggctggtcttgaactcctggtctcaagtgatccacctgccttggcctcccaaagtgctgggattacaggcatgagccactgcacccagccagttgtgggatcttataccacttcctccactaccccacgtgaaacagggagggatttgaaccctggtggggggtcccacttgcaccccatccaggcatttccttccaaaactctgacagtcctaggttcccagtctggctcccccactcctgcactgtgtgacccgacaagtgacttaacccctctgtgcctcagttttctcatttggaaaatggcccagtgacatagggtccctggaggaatcaatgagtagcaagctcagagcctggtgctgggggagacttggatggatgggagtcaagacaatgatcaagacgtgaataataaccaccagttgaaagttgcttccaaaagacaaaaagatgtgaatattttgtttgtttgtttgttttcagatggagacttgctctgtcgcccaggctggagggcaatggtgcgatcttgtctcactgcaacctccacctcctgggttcaagcgattcttctgcctcagcctcccaagtaagctgggattacaggcgcccaccaccacgcttggctgattttgtatttttagtagagataggatttcaccatgttggtctggctggtcttgacctcctgacctcaagcagtcctcccatctcggcctcccaaaacgctggattacaggcatgagccactgtgcctggcctgaagatgtttttttaaagtggcagagagaggtgaggcaaaatcggcagctccctgcaaaggctcccggggaagctggaccacacagaactctcctggcaccactcccggacccttcggtccccgcaccatctgctttccacccacagctccctctgtgcctgctgttcccctgggagtggttcccacccagaggagtggaggttggggaggccccgaccccctgaaactgccctttaaaggtaatatttatggtatacccgtctgcgcttgcccaggctgggggatgctgcctccccaacaagctttagccccaccttgaggaaatcccattttggagaagacatagcacagcaggagcacccccatactggagggattaagagagacccgaagcagctgggtgctgtggctcatgcctgtaatcccagcactttgggaggctgaggcgggaggatcacttaagatcaagagtttgagccaggtgcggtggctcacgcctgtaatcccagcacgctgggaggccaaggtgggcggatcacaaggtcaggagttcaagatcagcctggccaacatagtgaaaccccgtctctacttaaaatacaaaaattagctggatgtggtggcaggcgcctgtagtcccagctactcggtaggccgaggcaggagaatcccttgaaccccggaggcggaggttgcagtgagccaagaccacaccattgtactccagcctgggtgacagaatgagactccgtctcaaaaaaaaaaaaaaaaaaggtggccgggcgcagtggctcatgcctgtaatcccaggactttgggaggctgaggcaggcagatcacctgaggtcaggagttcgagaccagcctgaccaacatggagaaaccccgtctctactaaaaatacaaaattagcaggatgtggtggcgcatgcctgtaatcccagctacctgggaggctgaggcaggagaatcgcttgaactcgggggcagaggttgcggtgagccgagatcgtgccattgcactccagcctgggcaagaagagcgaaagagtgaaactccgtttcaaaaaaaaaaggccaggcgcagtggctaacacctgtaatctcagcactttgagaggccgaggtgggaggatcacgaagtcagcagatggagaccatcctggctaacacggtgaaagcccgtctctgctaaaaatacaaaaaattagccgggtgtggtggcaggagcctgtagtcccagctactcgggaggctgaggcaggagaatggcatgaacctgggaggtggaatgagcggagatcacgccactgcactccagcctgggcgacagagcaagactccgtctcaaaaaaaaaaaaaaaaaaaaaaagagtttgaggccattctggccaacatggtgaaacaccatctctactaaaaaatataaaaattatattagtcgggtgtggtggcgctcgcctgtaatccagctactcaggaggctgaggctgtgagaatcgcttgtatccaggtgacggagcctgcagtgagccaagatggcgccactgcactccagcctgggccaccgcactccagcctgggcgacagggcaagatcctgtctaaaaaaagagagactcaaagggagaagaggggttggaggcacacagagaggagagctaaggggcttcctggagtagggggtgtcaaacaaagcctgcaggcacatggaaaacaccagtccatgcccagcaaacagcacgtgcaaagggaggtgagactcagcctgctgggcaccaagcccggttggaagttcgatgcccctggaattaaatgggagagaagtcagcatggaccacatggcaccagccccagggcttccaggaggaggaggaggaggaggagaaggagaaggaggaggaggaggaggaggaggaaaataagtggaagctgtccatgagaaagcaggatcaccttggagggctgaacctagaggagccaccccagtagcggcagagacaaaagtccagatacaggctctagcccttctctgccgggggatgctctgtttgtgggacctggtgttttgaaattcggtcatgtgtaaagcaaaggtccaagtaggagatgataaatgtaataagataatagtagtagtagtaataacagctcacgttacccggtgcctgcacacgttatgcgtgaggctgagtttaacccaaattgggaaggtctccacctcctccctggacccagggctgtcgcaaactggccgcccgcgggccaggccggatcctttttcagacctttcctgcacacagccaacagcacgcctcacattgtcaccaccggagaggacgccctgggctatgcgtctggattggccggtcagcacccgtttgtgaatggactctttggcctttggcctccaggaaatctgattggctcgcatcagcgatctaccccctgattggctggggtgctcctggaccattaacaaggtttccagtcaaaagagaccccaaactggggctgatgaagacaacaccttcacgtgccagattggttagaatttctctggcttcctggtgggtacttccctctttgggcctcagtttcttcctttgaaaagtggaactaataatagcactgaccactcgggctgttgggagaattgaatgcatgagagggcttagcctgttaatatgaacggttattcccactttactattattttattattattttaatcttcttccacttggacctttatttttatttttgagatagggtctcgtgatcatggctcactatagcctcaaactcctgggctcaagagatccttcttggctgggcgcggtggctcacgcctgtaattctagcactttgggaggccgaggtgggcggatcacctgagatcaggagtttgataccagcctggccaacatggcgaaaccccgtctctactaaaaatacaaaaattagccgggcgtggtgacatgtgcctgtaatcccagctactcgggaggctgaggcagggagaattacttgaacccgggaggtggaggttgcagtgagccgagattgcgccactggactccagcctgggtaacagagcatgattctttctcaaaaaaaaaaaaaagagagagagagagagatccttctgcctcagcctccttgagtagctgggactacagtcatgagccaccacacctggtacacttagactttcattccatgctccttcctggcttcctgccctttttgattcccccactcctgctcctagccctccagaggagtcttcccagcccctcaatatgggcatgtcctctcctgctccagcaccttccatagctccccatcaccctagggggaaagtctaacctcttcaaaatcagcactgaaggccctggaagcattaagtcctggccatcagcctctagtgctaagaaataggttcaagttcttgtttccccatataaacaggtaagaaaggctacatgcctctgggcctttgcacgtgctgtggcctctgcccggaatgccctcattcagtcggggaatccgtgctcatccctccaccttcgtggagggacgcctgtgctgggttggtttggagaggaagccggaactgcgtgggttcaaatcctgtctgactctgtcacctatactttgtgaaacccggacagtggctatgcttctctgaacctcagtttccccttttgtaacatagaacttaccatcaggaaatgtttgacccccccaccatggaacaggccccacttcttgacgtcagcagcacccccattcgcctacccggaggcggtttctctattttaagaggctgcgggcgggttggcatctaactggggctggaggcgggactgcccccccaccaacaccacgctgctcgccaatcccgccccgccccctcctttccgcccaagtcccccactcttgcctctggcctcagcgcctccagttctgccccacccccgcgcggccagagaccgggtgtctctgatctgcagctcagcccgtgccttccctgaccactcccgacctggcttcccatcacctgctgagttcgcagtcccgcagctaccggtgcggctccaggttggagacccgccggccccattc

SEQ ID NO: 7852 - DNA, 6000 bp, Homo sapiens
cttagccaggaagaatttagtctttcttttcttttatttatttattttttttgagacagagtcttgctctgtcgcccaggctggagtgcagtggcatgatctcggctcactgcaagctccacctcctgggttcatgccattctcctgcctcagcctcccgagtagctgggactacaggcacccgccaccacgcctggctgatttttttgtattttttagtagagacggggtttcaccgtgttagccaggatggtctcgatctcctgacctcgtgatccacctgccttggcctcccaaagtgctgggattacaggcgtgagccaccgcgcccacccggaaattagtctttcactccagcctgggcgacagagtgagactccatctcaaaaaaaaaaaaagtgtcttcttttacaggggcaggtgcaacggctcacatctgtaatcccaacactctgggaggccaaggcaggaggattgcttgagcccaggagtttgaggctgcagtgagctgcaatctcacctgggtgacagagtgagaccccatctttaaaataaatgaataaaatttattcttttactatggtgtgttacattaattgattttcagaagttaaaccaatcttgcatttctggggtaaatcccacttgatcatggtgtataaccctttttatatattgctgtattgggcttactgatattttaccaatgacttttatatcatatttatgaaagagattggtctctagttgtcttgagatgccactgtctggctttgatattagggtaatactgacctcatataataagctgggaaagtgctccctttctccatattttggaacagattgtagagaattaatattatttatgctttaatgttttgtgaaattcaccaatgaaaccatctaggcctgagcttttctttgcgggagtattttaaattacaaatctctttttatttgttatacatctattcagattttctatttcttcttgagttggttttggtaattcatctaagaatttttagctgtcatctaagctgtctaatttgttgccatacgttgcttgtgatattcccctttatttatttatttatttttaaattttcgagatggagtctcgctctgttgcctaggctggagtgcagtggcacaatcttggctcactgcaacctctgcttcccgggtttaagagattctcctgcctcagcctcccgagtagctgggattacaggtgcgtgccaccatgcccagttaatttttcctgtttttagtagagacagggtttcaccatgttgcccaggctggtctggaattcctgacctcaggtgaccctatctgcctgccttggtcttccaaagtgctgggattacaggcgtgagccaccgtgcctggcctcatgtcttctctttttagaccatatagggtaacttcctgatgttgccatggcatttgtaagctgccatggcgctggtgggagtgtctcttagcatgctaatgcattctaattagtgtataatgagcagtggggatgaccacaggttactctcatcgccactttttgtttttggtgggttttagctggcttctttactgtaacctgttttatcagcaaagtctttatgatctgtattttgtgccaacctcctatctcatcgtgtgacttagaatgccttagctgtctgggaatgcagcccagtagacgtcagcctcattttactcagccccattcaagatggagttgctctggttcacatgcctctgacgctagcaagtgctttcaatttgattcgaagactcaatgtctgtttttaggttacatgaaactattttattttttcccgttgttccttttgctattttcagagctggtttctctttcttgctttcttgaaactctcttggtttctgccattggccttcacgtagctccctgtttcttctctaccagcccccaaaagccacggctcctggatctcaggggtcctggtggggcccaggcaggagaggagcatccaagtatgcaggagcacacagccaatggctgtgggaaatgtggtaagagccccaccagaaaaacagcaaaggagccagtctggagttaaaactcaaggaaagtgttccctgttcactccatccatgccaatatctattattttttgagtttttgattatggccattcttgcaggaataaggtggtatcgcattgtggttttgatttgcatttccctgattgctggtgggaatgtaaactagtataactatggaaaacagtgtggagattccttaaagaactaaaagtagaactaccatttgatccagcaatcccactactgggtatctactcaaaggaaaagaagtcattatgtgaaaaagatacttgtacacacatgtttatagcagcacaatttgcaattgcaaaaatgtggagccaacccagatgcccatcaatgaatgagtggataaagaaactgattttacatatatatatggtggaatactactcagccatgaaaaggaatgaattaatggcattcacagcaacctggatgggattggagactattattctatctgagttatggtcttgtctgccttagttaccatgtggccctcaggggccagcctgggcctaatgtacagtagcctcctaatagtgataaatctgcccattatacttatattcaatctggatgtgagatccacacactatatattgaacccatcaggcgttcaaactggcaacaacaacaaaaaggaagagtggctgggcacagtgattcacgcctgtaatcccaacattttgggaggccgaggcaggaggattgcttgaggccaggagttcaagaccagactgggcaacatagtgagacctctacaaaaaataaataaataggccgggcacagtggctcacgcctgtaattccagcactttgggaggctgagaaaacagtgggggtgtgtgagtttgcggggcaaggaggggtagggagagtttagaggaggaaagtgcaacagccagaggggagcagggagggggttgtgagaggctagaggagggtggcgtgggtgttccagagccagcaaggctactctacaggagcacggggctgtggtgggttctggcttggagcgctgtcccctggcttgggacagtgtcaactttcagtacctttctagccagaggggttggtttgggtggtctcagttgcttggggactcagatgtccccttcccggaccccatgacccctgtctgcagattccactcacccagcatctcctcctcaggccaaggcctatggctactgcaatgagccccagggacttgaagtccctggtcaccccgatgcagccactcatccccatgcagcccttcatcccagtgcagctgctcgccccaatgcaaccagtcaccctgatgcccttgtgtcctccagaaagagactatttactgctcgctgtcgtatccttcttctgcgtcctgctggcaatccccgctctggtgttctccctcaggatgggcaccacccagctaccaactctctttgtccccagatcttctttctctttcctgccgatgccctgcttctccccagggacctcttcgtgtttctcggggatttgcctcctccctcttcaccatctgcttgcccttgcacctctccagggccacctctctgctcctccctctgtattctgcctagatctactccctcatcctggctccctggtttcttcctttttcctctgggagactgagccctgccctgacctccatcatgccatcatcctgatcttgccctcttcacctctccccagggattttcttccccctccccatcttggaaacattcacaccagcttgcctttacccccacagacccaggaagccaacttccttgggaatcagagaaaagcacagatcaattccagactactttttggattcagcatcaccagcatcctggtgggctgcattgtgatcatttgctccattgtgatcaaaagcttgaaacagaaaataggaaagcctgcctccctcagtgagtaatggactgttccccctggagcatttgaactaggacatcagtgactgcctgtgttggaggaagtcccccctcctgtccaggagacaggattgctcagttattactcctgccttatattaagattggaaatagtaaaataaaaagaataggagagtttggaagcactgatccgacaggaaaggctgcatattgggcaagtcaggtctcagaaaacagacctgtgtgtaaggccattattcaaggaaaacagtttgaagggttagtagacactggagcagatgtctctatcattgctttcaatcagtggccaaaaaattggcctaaacaaaggctgttataggacttatcggcgtaggcacagcctcagaagtgtatcaaagtactaagattttacattgtttagggtcagataatcaagaaagtactgttcagccaatgactacttcgattcctcttaatctgtggggtcgagatttattacaacaacggggtgcggaaatcactatgcctgctccattatacagccccgcaaatcaaaaaatcatgactgagatgggatatataccaggaaagggactaggaaaaaatgaaaatggcattaaagtcccaattgagactaaaagaaattaagaaagagaaggaatagggtatcctttttaggggcaactcacctcttcatctggcacccagcatggggcacgaatccacaaccctgagattaagagtcttatgctctaccgactgagctagctgggcttcttgcccatttaaagtttgagaataggttgagatcgtttcggccccaagacctctaaggcactcacattccattgactgctggcgatggccgggtatgggcctgatgctccagtgccatccattttcagggctagttgattcggcaggtgagttgttacacactccttagtggattctgacttccatggccaccgtcctgctgtctatatcaaccaacaccttttctggggtctgatgagcgagtaatcaaaactcaatatcaattgactcaaagagcagagttggttgcagtcattacagtgttacaagattttgatcaacctatcaatattgtatcagattctgcatatgtagtacaggctacaagggatgttgagacagctctaatcaaatatagcatggatgatcagttaaaccagctattcaatttattacaacaaactgtaagaaaaagaaatttcccattttatgttactcatattcgagcacacactaatttactagggcctttgactaaagcaaattaacaagctgacttactggtatcatctgcattcataaaagcacaagaacttcatgctttaactcatgtaaatgcagcaggattaaaaaacaaatttgatgtcacatggaaacaggcaaaagatactgtaccacattgcacccagtgtcaagtcctacacctgcccactcaagaggcaggagttaatcccagaggtctgtgtcctaatgtgttatggcaaatggatgtcacacatgtaccttcattcggaagattatcatatgttcatgtaacagttgatacttattcacatttcatatgggcaacttgccagacaggagaaagtacttcttatgttaaaaaacatttattatcttgttttgctgtaatgggagttccagaaaaaatcaaaactaacaatggaccaggatactgtagtaaagctttccaagaaaattacacatacaacaggaattccctataattcccaaggacaggccatagttgaaagaactaatagaacactcaaaactcaattagttaaacaaaaagaagggggagacagtaaggagtgtaccactcctcagatgcaacttagtctagcactctatactttaaattttttaaacatttatagaaatcagactactacttctgcagaacatcttactggtaaaaagaaca

SEQ ID NO: 7853 - DNA, 6000 bp, Homo sapiens
tctctgggatgcattcaaagcagtgtgcagagggaaatttatagcacgaaatgcccacaagagaaagcaggaaagatccaaaattgacaccctaacttcacaattaaaagaactagaaaagcaagagcaaacacattcaaaagctagcagaaggcaagaaataactaaaatcagagcagaactgaaggaaatagagacacaaaaaacccttcaaaaaattaatgaatccaggagctggttttttgaaaggatcaacaaaattgatagaccactagcaagactaataaagaagaaaagagagaagaatcaaatagacacaataaaaaatgataaaggggatatcaccaccgatcccacagaaatacaaactgccatcagagaatactaaaagcacttctatgcaaataaactagaaaatgtagaagaaatggataaattccttgacacatacaccctcccaagactaaaccaggaagaagttgaatctctgaatagaccaataacaggatctgaaattgtggcaataatcaatagcttaccaaccaaaaagagtccaggaccagatggattcacagccgaattctaccagaggtacaaggaggagctggtaccattccttctgaaactattccaatcaatagaaaaagagggaatcctccctaactcattttatgaggccagcatcatcctgataccaaagccgggcagagacacaaccaaaaaagagaattttagaccaatatcctttatcaacattgacgcaaaaatcctcaataaaatactggcaaacagaatccagcagcacatcaaaaagcttatccaccatgatcaagtgggcttcaaccctgggatgcaaggctggttcaacatacgcaaatcaataaatgtaatccagcataagaaccaaagacaaaaaccacatgattatctcaatagatgcagaagaggcctttgacaaaattcaacaatgcttcatgctaaaaactctcaataaattaggtattgatgggacatatctcaaaataataagagctatctatgacaaacccacagccaatatcatacttcacaatagcaaagacttggaaccaacccaaatgtccaacaatgatagactggattaagaaaatgtggcacatatacaccatggaatactatgcagccataaaaaatgatgagttcatgtcctttgtagggacatggatgaaattggaaatcatcattctcagtaaactattgcaagaacaaaaaaaccaaacaccgcatattctcactcacaggtgggaactgaacaatgagaacacacgaacacaggaaggggaacatcacactctggggactgttgtggggtgaggggaggggggacggataactttaggagatatacctaatgctaaatgatgagtcagtgggtgcagcacaccagcatggcacatgtatacatatataacaaacctgcacattgtgcacatgtaccctaaaacttaaagtataataataacaaaaacaaaagctaatcatagtattctcatttgaaacaacatccattcctaggtatatacccaaagtacggactcaaacaggtacttgcatgggaatgttcattgcagcattattcagaaaagataaaatatgaaaacaatccaagtgttcatcaacacatgaataaacaaatatggtgacacatacaacagaatgataatctgccataaagaggaaggaagctctgacacccgctggaacatgcatggactttggaaacattatgctaagtgaaatatgtcagaaatgaaataacataattgtataattccatttatatgaaacatcaagaataggcaaattcatagagacagagtagagatgatcaaggtctagggtggaacatacagggagttattgtttaaaagatacaaactttcagtttaaaatgataaaaattttctagggaaaatagtggtgatggtaatttaacactgtgtgtgtggttaatttcacttgattgtggattttaaagtggttagaatagcacattattcacagaactgtgaaaaatagatttctattatttaattcacccaggctaaggtgtttgttatggcagctgaagcccatgaatacatcatctgacccagtgttttcaatgaaaggcatcagtttttcaatcaagttagctggaagctcctgtccccagcagaaccagagaccataaaacaacagctccagcaggggctcagccagcacaggtcccacaaggcagcgtcaatgtcaggccctggatggcatgtgaggccacagcaatacaaccacaacgtgaaagtgtaagtatttttactacttacagacactggggagcacttggcacacctggagaccacagacacagaggtcagtgagcccaggcagggaggagagaagagaccggtaagccaatgcctttattaagtccagggtgttatctgacagatttccagcagggagctttaatggatgtgttcaaagcaagcagcaaacactgggaccaggagctcatgctgtgactgagaggtggtcactttaaatgtgagggtgaatgtcagaattatcagtttaaagaaagcagctggagagaggagagcccagcacaccaagcaggagagatgcctctaagatttgatctctggacaccaactggagccacttgaaccagatacagtattgaaaactgccatggtgaccaagccctgcctctgatttgaggcaaataaacttacaccttaaaaaatgaatgccaaggcaacatgacactatgagcatcatgacatccagggacaccagcaaggtgtggtactgtgccctggagtcagaatcctgggttctggtccctgggagtgagaaaatgaaagtgacttgtccctgtccctctgacattgatattcccactctgctgctccctcttctcctcccaagcccacgtgcactgctcagccctagacatcactgcccccagggtatatacagtgccgcctactgcatacaaacacgaactcacagaaagtgacaaaaatctgcgtttgggacatctgattgtgaaagggagaacagtgaacatagagccacagagactgggactcacggggctggaagggtgatggagctgtaacataacatatgtgtgacctagtgtgaagtgtgcagatccatgtggaataaaacatgcagcctggcctgggattgctgccgttcacacttccctccctgtccaccagagggcgacagagtccctcccaccctggagccttcctaggggatgccaacctccctcagcggaacccacagcccagcaggatccaccctcatcagggtcacttcggcctaagtcctcagctctctccatgctccccacacggactctgtcagctcctccctgacctggtggccaccaacctaacaccactccccctacaggtagctcctccccacacacctgctccttccctgggcccagctaaaggcatctcccagggcagcactggtgcacgcgacgctacacggggtgctttcccctcgtggcctccctccatcctcatcaactctttctgtcactgctctctaaatacccgcccctgctccatctgtcctcttctctggggcatcccaggccaagcctagcgccgacacagaacagcggctgcctgaggacccacagcctccccgggaatcagtcaggcaccctgtgacctgcctgcccgctgcaccccggggtgctcagagtgcgtgtgatggtcacacacaggcaccatccgggatgtggccacctacccccagctgtcccttgggaagacagacctctcctgtgtgcttgctgggagaaggggggtgttattgctctttgatcccagaacacaactcacccccacacaccctctcaggtgtgagcaaggtccctccagacaggctctctggccactgcctcttcctcctctacagagagcagcttgaccaggtcaaaaccctcaggatagacccctgggtatgtcagcacatggagggctgagcccatcatggccacggagtaagttgggatgaatctctccacctctaacccctgccctgtcccaggctccccctcctgcgtctcaatgagccatgtcccacggggttcctgggtgactccccacttcctcctgcaccaccagggggaaggtgtggtgaccacaggacaatcagctgggcagagaagagaggacatcaaagatggtcaggaagaacatgagaaatcctgagcttcagctcagccgccagacccgagggagccatagactgaccaagaactgtccctttgactatgggaatcacagcccccaaagagcaaccagcacaggcctctcctcccaagaggcatgagagattcaccctgcacacctccaggtaggacactttcctctgtgacacccaggtcctcaatgtccatccttggaagctgcagccaagctagacacgattagagaaaggaagggtccttctcaccaggcaacacacagctcacacacagcacaatggggcatcactgtgacagggacctggtgcagctccagcctcctgcactgcaagggagagccagatggggatgaaagagggcaaagggcatgaatgtgcaccgcaaccaagacccatggggacacctggaggctgaggcccaggactctgcttgcccaacctgcagggtatgtgtgtgactgtgggtctgtgtgtgtctcttctgtgtgtgtgtgggggggggggtgtgtgtctgtgtgtgtttgtgtctgcacaaagtgtgtgttgaggtttggtgaaagaatcactgctgaaaaaggcagaggcctccacaattcccagggacctgaaacacagacaaaaggaaaaacagaaggagggacaaggaggcaggatgtagagaggaggggacagagaggtgtcctgggcctaaccccacccatgagcctgagaagtgctcctgccccaggaagaggctcagcgcagaaggaggaaggacagcacagcctacagccgtgctcaggaagtttctggaacctaggctcatctccacagaggagaacacacaagcagcagagaccatggggcccctctcagcccctccctgcacacagcacatcaaatggaagggggtcctgctcacaggtgaggagagaacttcctgggagaggacaggaggaggaagcagagtgactggatggggtctcctggagaggatggggttctaaaaaatgaaagaagccagcactttgggaggctgaggcgagtggatcaggagatcaggagttcacgatcagtctggccaacacagtgaagccctgtctctgctaaaaatacaaaaatttaaccaggtatggtggtgtgctcctgtaatcctagccactcgggaggctgaggcaggagaatcacctgaacccgggaggcagaagttgcagctagccgagatagtgccactgaatgccagcccgggcgacagtacgagaatccgtcacaaaaaaaaaaaaaaagaaaaaaagaaaaaaaaaaggaaagaacgctctgttgatgcctggataggggaaaatacaccagagagggacaggggtcaaaataggaaagtcacattgaaccggaattggtaagaggtaggaaaatcttaagtgttctgttttcctgattaatcatcagaggccagcacattttgaaaaatgataataataactatatcagatgacacttcaaataaaaatataagcaggacatgaaatgctgtcctcagcaaaaaacctcaacaattgggagaaaaaaaacacccagggcatggagggccctgagaactctcacatctacaggagtctgcagcctgttccaggcactggggtgcaaccaagatcacaaaagtccctgtcctcacggagctcacgctgtcatgggggggaagacagacatgcaaagagatctagaatgtgaggtcaggtgttgacaagaaccctggagggagca

SEQ ID NO: 7854 - DNA, 6000 bp, Homo sapiens
gaacctgagaaggagagagatcaagctttggtggtttggtctgatctctcctgagggtgtggtcaggtgtgcatgtggggcgtgtgatgggtcaggcatgttcccggtggggtgaggagggtgtggaaggtttggggaaaggcagttgggcatgtccctgactctctatcccctccactttgatagcctcccttcgatggggaggacgaggaggagctgtttcaggccatcatggaacaaactgtcacctaccccaagtcgctttcccgggaagccgtggccatctgcaagggggtgagagccccctgactcccagcttctccaggctcacaaccacacaccccattgctgtctctgtgcctattagaaaaatgctcccattcctgaagtcactttacttccatctgttggaaaagttgatatgatgcataggttttgttagaacaatgatttccagccctgttgccacgaggcctggagatggcctctgtctcatccttctctgtgactcccactccccagctccctgcttgcaggaagtgctgaaagtccagggtgtctgtctgtctagaactgggtgggtcaggtaaacccaacttctgcagcttttcttcctgtgtgaacttgggtgagtcaccaaaactttgtgagcttaactctcttcaggggttatggagttgacacagaagaaagcacctggcccatagcagattttcagcccatgtcagcaccttctgcgtctagctgctctctctgcatctccctgacagtctctctggtttctgtctcatgcctcccctccatctgcatacgatggggctctctgtgtttcttccttttctctgtgtctccttctgcatctctgtctacacttttgggcctttgtccaacccccctaccccccatctctgtcccctcctgtgtccactctcatacacacacgctacatctcaccctcctctcctgctggctttctgtcctcccttttctctgggtctctgtccccatatttggtctttattcctccctctgggtgtgtgtttcctgggtctctatccttctctctttctgaatctctgtccccctgggtctcctctgtctcctcccttctctgagtttctgccttcttacctggggtctctgtaccaccctctgaatttctatttccccttttctctgggtctgcaacctctcttcccccattccctccctcttccccttcatctcctctacccttccctccctccccctaccgacctccctctgtccttcactctccccttccctccctccccctacccttccctctccccgtccctctctccccttccctctctccccctaccccttttccctctcctcttctccatctccctcatgatttgttctgtttctctgtgtgtccctgggtctctgggtatgaatttcatctgctatcattttcatgtatcctctccttcttcctgtctctctctctctctctctcactcactctcaccctctgtctctctctctctctgtccctcttcctctctctctcctctctgtctctctctgtctcgctctctgtctgtctccctcctcctcctcctccctcctcctcctcctcctcctcctcctcctcctcctcctcctccttcttcttcttcttcttcttcttcttcttcttcttttcttctctctctctctcctttcttttcccttcctccctccatttgcctgtttcccctggctgttcttatctctccggatctcatgcctgtgtctcttggttcctccatctgcctgtctctgtccctctttctctgggtctacctgtccggcactctgtctgtttgtctgtctgtctctctctgtgtttcccacagttcctgaccaagcacccagggaagcgcctgggctcagggcctgatggggaacctaccatccgtgcacatggctttttccgctggattgactgggagcggctggaacgattggagatcccgcctcctttcagaccccgcccggtcagtcaccctccaggcaacaaaaacctggtccctgaaggggtggggttcccctgggcctcaatatacctgtatgtgggggtggggttccctctgcagagccccccgcccccaacaaaaggaggtgcagacaccatgaagcatgaatagagattctgcaggagacaggagatgagactggggtacacagagggacacccgaggagccctcggagctgcttaactttccctcccccacgtctcccacagtgtggccgcagcggcgagaactttgacaagttcttcacgcgggcggcgccagcgctgacccctccagaccgcctagtcctggccagcatcgaccaggccgatttccagggcttcacctacgtgaaccccgacttcgtgcacccggatgcccgcagccccaccagcccagtgcctgtgcccgtcatgtaatctcacccgccgccactaggtgtccccaacgtcccctccgccgtgccggcggcagccccacttcacccccaacttcaccaccccctgtcccattctagatcctgcaccccagcattccagctctgcccccgcgggttctagacgcccctcccaagcgttcctggccttctgaactccatacagcctctacagccgtcccgcgttcaagacttgagcggagcccgatattctccctgaccttagcgttctggactctgccccaatcgggtccagagaccacaccactaaccatccccaactccatggggttcgagactccatcttggtagttctgtgcctccccccagaccccgcccctggggaaatagcctcacggggttggctgttccagactcaggttccagaacagccctcggcctccgaggctccccgcctccactctagttctagatgagtgggaggcgtgcccccctcctccagtacgtcccgctgctgtgctctggggatttctgggatatatggaggattctttccccagaggctcccaatcagcttttgttctagacttccccatcccgaagccatcacttctccccgcagcccgcctgccgtgcatggctcctgtctggctcggacccaccccaactctccccagtgcctgccactctctgggactctcctcctcccctcctcttcccttagcctctcccacccggccacagctgctggagaataaatttgggatgctgatgctgaagtgtttggatattttcttgtaagcttggagaatgaacggggtgtggaggcgggacagtgactgtacatagacacaaacagagaaggaaagcacggagacccacaaagtgagaggggagacacccactgcaggggagcaagcagagaagcgcgcgcagacagaggcaggagacccagacagacagagacagggagagaaaatatcacagagggcaccaacgtggacagtgcacagcgagagaggggcacggagatcactgagagtgccaggtggcgacccccgcgcagagacccagcgcgtccgtgttcaccagagcagccacgcaagctcacatgcacccccaggctcagacaccggggagaagtccttcccaagcggggagatcacagtctggcctcttcttgagagacctagagacctgatcagaggaagagacccccacgccagagcaaccaaaaacagccagaacccgagagcctaggaatcggcgacggaggcacacggcaggcagacgcgccttctgggcctctttcccttgacccacttgagagtctggggagtgccggggaccgtgcagatggactacatttccccgcaggcctcgcggcagacccttcccccaagtgcggctccttgccgccagggctgatgggaaatgtagtctccggtcagggccagaccagtggagcggtgtgccttgtctgtgtgtttggaggggactgagccccaaagcttcgcagtcttccttgcggacccgggcacgtcttcttccctgcagtctcctgggtttccatgacccggtccgggtggatgctggggctgcccctctctccctcatcaccgccgcgacacccccatccagtgcccgcaggccccagcccccgctccgaccctcggcgggcggcctgcccctttaagagtggccccgctgacatcacggcggggggggggggtggcccggctcctggctccgcggcggctgcaggacccgactccgctctgcgcccgcccgctgctgtagggaccccggcccgggacgccccctcccgcttcctgcagccgtccagaccccaggctccgccccaggcctggctagagccccagtcctcgtcaggggacccccaggattgtccctgctgtctctccttctcagagtctctctctgtctctctctgtctctctgtctctctctctctgcctctgtctctgtctcttctccaagctcaaggtctctgggtctcagcatctctcagccccaggcctctgggcgtccccctgtctctttctgtctcttcctggtctctgacctctccacttcccaggcctcagaatctctgcgcctaggtggtgaggggtggtcttaaactctgtctctctccctctttgtctctctctgtctctgtgtctccttcagtctccagacctgagtccctggatttctcggcctcaaggtctcggcgtgactttctctctctgccctgtctctctttgtgcctctgcccctctcgggctctctgcctctgtttctattctctctccctctctgcctcccccatcctcaaggcccatctccctccctcgctgcatccttccccccttccctccccgcccctcccctcctccgcagtagccaatgagcggccgccggttcctgctcccggctccgtccgccgagtgaggccgcggccgcggggggtggggggtgggaggccgggagggggccgggacgccgggctccggggcgggggcggggggcgcgggcaccggcgaccccggtggcggcggcggcggccgggggaagcctcggggccggtcatgcggctgcggggcccgcggcccggagcgtccgcccagccctgagcgaggtgagcgctagcggagggtcctgggaggaagaaggggcgcccctcgaggtggctgcgagccgggtttggggcaacaagggacccgagtggctccaggggtggtgagatcctggcggtcgggacgcccgaattcgagcggctatgggggatgcagggacacctgggcctggcgatcccggaggacggggtccgagggtcccggagtgggaaactgcactcctcgcgtccgagtcgcagcgagcgtgggctggggagggcagaggccgggtccctgaggaaggcgaggtacggggcgagggcggaggacccaggcccggccagagcaggatgtgggtctggaaaggggtcccagaaagggggagttacggtctcccgagagatggaggagagatggagtttgggcttaagacttgcagaaggggaccccggagattcaaatgcctgaatccgggaaagggtgggagaaagagggagaagaggaggcttcaggcctggggggagggtcccaaaggaggaaaggctggaggaataaggagatctgggcgggccagtgagagggaggaggaattggagcaaggttgggttttaaaacggggtgcgagaatgtggagaagggacgaggtcccagctgagagtcagaggggcgaaagggggaagctgagatcggctacctgggatggaggcagccagggtggccagggtgatggtgcccgtttccgagcccacagggctgcgaggggaccaggcagctcgcggtcaaacccctgagccgccaggcgggggatgggaggaaaagctggccagagcgttccctgactccggatctcggaggcctccaagaggttgggggggaaggaggggggatctggaggctgggagtgcggggtggagcggggaggagtgagggttgtctcagactccagagtcttta

SEQ ID NO: 7855 - DNA, 6000 bp, Homo sapiens
atgccactgtgttccagcacaggcgacagagcaagaccccatctcaaaagaacaaacaaacaaaagaaatcaatcattttgaaagatagtcaccaaaacttttaaaatttaattgaatctaacaaccaactaaattcaatgtatacagttgtctaaatatttaaaattggaaaatggacatatgtgcaatttcttattaattcattaagtagtaagttctaatggtagtaaagtaaaaaggagctctaacagtaattttgatgtagcaatgactaataatttggaatatctgcaactctcatgtgatgagaaaatacctgtgattactattgataatgaagccacaagcactgctgctgcctgcattcataactgaagggaatgctaaattttagttagaagttaaaaaaaaatttggccggacatggtggctcacgcctgtaatccaagcactttgggaggccgaagtgggcagatcacttgaggtcaggagtttgagaccagcctggccaatatgatgaaaccccatctctaaatctttgccttggtatcattttttgtaacctcagaagactgtgaactactcatccaaccaggagaatgcttttagggtgtttcctgcagtttttcctctcttctatttaactgacatgttgcataattaacagcctgctgatttacatagcagataaagagaggcagaatagtacagagatgcacagatctgaggcatccgagataggaaatgagagaacctgagaaggagagagatcaagctttggtggtttggtctgatctctcctgagggtgtggtcaggtgtgcatgtggggcgtgtgatgggtcaggcatgttcccggtggggtgaggagggtgtggaaggtttggggaaaggcagttgggcatgtccctgactctctatcccctccactttgatagcctcccttcgatggggaggacgaggaggagctgtttcaggccatcatggaacaaactgtcacctaccccaagtcgctttcccgggaagccgtggccatctgcaagggggtgagagccccctgactcccagcttctccaggctcacaaccacacaccccattgctgtctctgtgcctattagaaaaatgctcccattcctgaagtcactttacttccatctgttggaaaagttgatatgatgcataggttttgttagaacaatgatttccagccctgttgccacgaggcctggagatggcctctgtctcatccttctctgtgactcccactccccagctccctgcttgcaggaagtgctgaaagtccagggtgtctgtctgtctagaactgggtgggtcaggtaaacccaacttctgcagcttttcttcctgtgtgaacttgggtgagtcaccaaaactttgtgagcttaactctcttcaggggttatggagttgacacagaagaaagcacctggcccatagcagattttcagcccatgtcagcaccttctgcgtctagctgctctctctgcatctccctgacagtctctctggtttctgtctcatgcctcccctccatctgcatacgatggggctctctgtgtttcttccttttctctgtgtctccttctgcatctctgtctacacttttgggcctttgtccaacccccctaccccccatctctgtcccctcctgtgtccactctcatacacacacgctacatctcaccctcctctcctgctggctttctgtcctcccttttctctgggtctctgtccccatatttggtctttattcctccctctgggtgtgtgtttcctgggtctctatccttctctctttctgaatctctgtccccctgggtctcctctgtctcctcccttctctgagtttctgccttcttacctggggtctctgtaccaccctctgaatttctatttccccttttctctgggtctgcaacctctcttcccccattccctccctcttccccttcatctcctctacccttccctccctccccctaccgacctccctctgtccttcactctccccttccctccctccccctacccttccctctccccgtccctctctccccttccctctctccccctaccccttttccctctcctcttctccatctccctcatgatttgttctgtttctctgtgtgtccctgggtctctgggtatgaatttcatctgctatcattttcatgtatcctctccttcttcctgtctctctctctctctctctcactcactctcaccctctgtctctctctctctctgtccctcttcctctctctctcctctctgtctctctctgtctcgctctctgtctgtctccctcctcctcctcctccctcctcctcctcctcctcctcctcctcctcctcctcctcctccttcttcttcttcttcttcttcttcttcttcttcttttcttctctctctctctcctttcttttcccttcctccctccatttgcctgtttcccctggctgttcttatctctccggatctcatgcctgtgtctcttggttcctccatctgcctgtctctgtccctctttctctgggtctacctgtccggcactctgtctgtttgtctgtctgtctctctctgtgtttcccacagttcctgaccaagcacccagggaagcgcctgggctcagggcctgatggggaacctaccatccgtgcacatggctttttccgctggattgactgggagcggctggaacgattggagatcccgcctcctttcagaccccgcccggtcagtcaccctccaggcaacaaaaacctggtccctgaaggggtggggttcccctgggcctcaatatacctgtatgtgggggtggggttccctctgcagagccccccgcccccaacaaaaggaggtgcagacaccatgaagcatgaatagagattctgcaggagacaggagatgagactggggtacacagagggacacccgaggagccctcggagctgcttaactttccctcccccacgtctcccacagtgtggccgcagcggcgagaactttgacaagttcttcacgcgggcggcgccagcgctgacccctccagaccgcctagtcctggccagcatcgaccaggccgatttccagggcttcacctacgtgaaccccgacttcgtgcacccggatgcccgcagccccaccagcccagtgcctgtgcccgtcatgtaatctcacccgccgccactaggtgtccccaacgtcccctccgccgtgccggcggcagccccacttcacccccaacttcaccaccccctgtcccattctagatcctgcaccccagcattccagctctgcccccgcgggttctagacgcccctcccaagcgttcctggccttctgaactccatacagcctctacagccgtcccgcgttcaagacttgagcggagcccgatattctccctgaccttagcgttctggactctgccccaatcgggtccagagaccacaccactaaccatccccaactccatggggttcgagactccatcttggtagttctgtgcctccccccagaccccgcccctggggaaatagcctcacggggttggctgttccagactcaggttccagaacagccctcggcctccgaggctccccgcctccactctagttctagatgagtgggaggcgtgcccccctcctccagtacgtcccgctgctgtgctctggggatttctgggatatatggaggattctttccccagaggctcccaatcagcttttgttctagacttccccatcccgaagccatcacttctccccgcagcccgcctgccgtgcatggctcctgtctggctcggacccaccccaactctccccagtgcctgccactctctgggactctcctcctcccctcctcttcccttagcctctcccacccggccacagctgctggagaataaatttgggatgctgatgctgaagtgtttggatattttcttgtaagcttggagaatgaacggggtgtggaggcgggacagtgactgtacatagacacaaacagagaaggaaagcacggagacccacaaagtgagaggggagacacccactgcaggggagcaagcagagaagcgcgcgcagacagaggcaggagacccagacagacagagacagggagagaaaatatcacagagggcaccaacgtggacagtgcacagcgagagaggggcacggagatcactgagagtgccaggtggcgacccccgcgcagagacccagcgcgtccgtgttcaccagagcagccacgcaagctcacatgcacccccaggctcagacaccggggagaagtccttcccaagcggggagatcacagtctggcctcttcttgagagacctagagacctgatcagaggaagagacccccacgccagagcaaccaaaaacagccagaacccgagagcctaggaatcggcgacggaggcacacggcaggcagacgcgccttctgggcctctttcccttgacccacttgagagtctggggagtgccggggaccgtgcagatggactacatttccccgcaggcctcgcggcagacccttcccccaagtgcggctccttgccgccagggctgatgggaaatgtagtctccggtcagggccagaccagtggagcggtgtgccttgtctgtgtgtttggaggggactgagccccaaagcttcgcagtcttccttgcggacccgggcacgtcttcttccctgcagtctcctgggtttccatgacccggtccgggtggatgctggggctgcccctctctccctcatcaccgccgcgacacccccatccagtgcccgcaggccccagcccccgctccgaccctcggcgggcggcctgcccctttaagagtggccccgctgacatcacggcggggggggggggtggcccggctcctggctccgcggcggctgcaggacccgactccgctctgcgcccgcccgctgctgtagggaccccggcccgggacgccccctcccgcttcctgcagccgtccagaccccaggctccgccccaggcctggctagagccccagtcctcgtcaggggacccccaggattgtccctgctgtctctccttctcagagtctctctctgtctctctctgtctctctgtctctctctctctgcctctgtctctgtctcttctccaagctcaaggtctctgggtctcagcatctctcagccccaggcctctgggcgtccccctgtctctttctgtctcttcctggtctctgacctctccacttcccaggcctcagaatctctgcgcctaggtggtgaggggtggtcttaaactctgtctctctccctctttgtctctctctgtctctgtgtctccttcagtctccagacctgagtccctggatttctcggcctcaaggtctcggcgtgactttctctctctgccctgtctctctttgtgcctctgcccctctcgggctctctgcctctgtttctattctctctccctctctgcctcccccatcctcaaggcccatctccctccctcgctgcatccttccccccttccctccccgcccctcccctcctccgcagtagccaatgagcggccgccggttcctgctcccggctccgtccgccgagtgaggccgcggccgcggggggtggggggtgggaggccgggagggggccgggacgccgggctccggggcgggggcggggggcgcgggcaccggcgaccccggtggcggcggcggcggccgggggaagcctcggggccggtcatgcggctgcggggcccgcggcccggagcgtccgcccagccctgagcgaggtgagcgctagcggagggtcctgggaggaagaaggggcgcccctcgaggtggctgcgagccgggtttggggcaacaagggacccgagtggctccaggggtggtgagatcctggcggtcgggacgcccgaattcgagcggctatgggggatgcagggacacctgggcctggcgatcccgga

SEQ ID NO: 7856 - DNA, 6000 bp, Homo sapiens
ctcgcaggctcgccggcgagggctgaaaaagaaacggcctcagcaccaccgctggttgtcaccactggggtcagggaagcccagggacgctgctcaacatcctacaacgcaaaggacagcccaccagacgacaatctggcccccagtgtccctagcaccaaccgtccctccagcaagctccatagctgccactccaggccaggcaggcaggcggccccggtggcccgattgcccacctgccacccgctggtaaaatcacccccgggtcctcatacgccctggtcaggcctggggaaccaaaagacaatactgctggctgcgggggttctcccctagagtccattccttcctggacgcggctcactgaggatgaaaagtcggaccgaggagagcacacactgtcacgtctctgaaggtgacacaggtggtcagacggtgccttcactgccccacggaaagccggctgtctcccatccaccaggaggaggcagcacaggacgcagccagcgggagctcctgaccctcctgagaggccagaggaaatgaaggcaagccatcctctgcagcgaggcgccattcttggcctccttctcccttctcgcctgactcggggcctcagagtttccgaggagagctggcaagccctaacagatcagtaggatcccagggctcacctgcctagcaggggtatgggaggctgtcaccgacaccggagagccaggcctgcttcaggcccatccttggaaggtttcaagttcccttctgtgcccagcccacagaggctggcagcaaaaacggcagaggaggcaggcagggccccggcccacccacatccaacccagcactgccagttaccagccacgcgtacacaggtgagcagcctcccggcgctgggcctcagtttcctcatctgtaaactgggaagagccactcccactgctgtttgggggtcacaggcagagtccgcccagtactgctgtggtagtggccaagtcaagaggtagggaccccagagcccatgtgaggggccacatctgaagagccagaaggaggaggacccctgcctgacccgactctgctagaaggctcaggagatactgggtacatggtggctgggcttcaggagatattgggtacacggtgggtgggcttcagtagatactgggtacacagtgggtgggcttcagggctccccatgtacctggggctgctccctgagcgcctctaccccaggactcctgccctctacagatgcagttctggagagtcgcctggagccccagctgggacgccgccaacagccccacccagaaccactggcaccgggctgccagatcctgaacccgactgcgggatccccgagggcaggagctgtgcgccccgcacacacgtctgccgctcactttgcagtataggatggccccttccccaggcctgggactgtcctgctggggcctgagtcagcctgtggcgcagcactagcatcccctcaacgtggtgccctcagcctctgcctccctcaggagaagcatcatctgggagcacgttcctgccggagctgtgaagccctgagctggggcccaccgcacctctggagagccctggactttcctgcaatcctccccggaagggttccctctcctggaagacagtgtcctgcctctcagtaggacacagactccctgagacaccacagggagtgcggggcagtgggcagaggcctgggttctgaggtcagatgggaggaaggtgggatctagccctgcccactccacatagacaaccgaggcccctcacctaccaccaggctgcagccaaggcccaggcagcagagagcggccactggggggatagtaacgctcattcccaactcacaaggctgggatagaacgtgcccctctaggccggggatgcacatccctgcgtcccagggctacacggtgcccgccgtaagggctgctggaccatccctccaagccaccctgggcaggtccagccggctctgaaatggctgtgcagcccagcgcggtgcttcacgcctgtcatcccagcacttcaggaggctgaggagagaggatcgcttgagtccaggagctcaagaccagcatgggcaacaaagtgagaccccgtctcggcaaaaattttaaacattagcgaggtgtgatgtcacatgcctgtggtctcagctagtcaggaggctgagccaggtggatcccttgagtccaggaggtcgaggctgcagtaagctgtgatcgcaccactgcactccagcctgggtgataaagtgagaccctgtctcaaaaattaattcattaaataaaatggctgagcaggtccagggataagagcccagaaggaaacctgagtccttcagcagtgctgctcaaggtcgccaatgacccgctgagcctgtgacccagggcccaggagcaccagccaccttcctgttcccgtcgcagctccgccaagcctcccaaccctgcctgccttggtgccctcatcagatgccctctccttctcccagaggccctggaggctccagccctgccctggccaggtggtagtatgggcaaaacacgttcctcgataagcctccgtttccccaccggcagcaaatagctcacagggtcaccatgcagcgcgtgtccagcacagagcatggccccacaggtgctccagggctagctgagggcttttcacctgaacctctgtccactctcaatcctgggaggccagcgttcctgtctatctcctctctggaggccgctgccctgtgcaccctaaaatccccttgagaagacatggcaaaggctagatcacgccagcctcttcaaatctcataggaaactgggtgtgtgtaaatctggaggtgtggacatgggacatgcatccccccctgtcctcagagggcagcctgatgaacatgtcacggaggcggaaacagagggtcagagaaacctcaccgcaaggaagatggatcctgccttctgcggggggaggcagtcttctaccagacagtaacaagaagccctaccaccccaccagagatgggaaaaggagttcattctcaccagcaaaagggaaatgcagacacgccatggtaagaggcaggcagctgcctttttcccataggaacggggggcagacaggaagacgacatcaccaaagggaccctcaaaaataagcctttgggaaacaaatgagccatttgggatgcagacagatatcataagcctgacttgcgccgggtgcagtagctcacacctgtaaccccagcactttgggaggccgaagcaggaggtcggctcgaggccaggagttttgagacaagcctggacaacatagcgagaccctatctccacgaaaacatacaaagttagccaggcttggtggcacccgccgcccatagtcccagctactcaggaggttcaggcaggaggatcccttgagcccaggaggtcgaggcctcaaagagctgtgatcgcaccactgcactccagcctggactatagagtgagaccctgtctctaaaaatagggttaaaatgagcatcgtgagtctggtgtcacagcctccgagaagcctctcccacgcgttgccttcttcaccaactcccagcccccgccaaagccggctgcgtgctcccaggacatcacgacctatgctacgggatctgtaggcacagctgtcggcaggtccctgagagcacagccggcatcgtacgcagctctgaatcccccgcctcaaacacagcgaagacgctgggctgtggggagctgacaagtgattgcttgcatctgtccacctgcaaacaaccgcccacaggtgcaggtgtcccaagcacacttatcagggaaatcagaaaaaaatgctaccttttctggcaaaacaggaaaataaacctattcttaaatcctagagaagatgtttctcttttgcaggaaaaggttctgagctgagactgtttcatggttaaagtaaaaacagtgcttgaaactcacgcccaatgaggaaatctgggacgaaggaagtcaggggctgggtgaagcagagagccactatcaagggacagaggtaacaggggagtctgaatgacatcacactcgataaccctccctccacgactttccttgcgatgtccctctttttctccaatccaaatcccacatctcctccaagaaacgctgccatgacgatgaaaaccaccatgacgctgtgaggtggagtccaccaacgtcctctgcccgaccaaaagcatggaattcctcggagcccactcgagtaagctttgacttcctccctgccagtcatgctggacacagggctcgacaaacacaagagacgatcctcggaccatcctaactcaacgactggagactgaggtggccgctgccagaggcgcggccggaggaaacgtcatggaaataaacaagggcggccacaagcacatggggtccgggaagcggcgggcgccaatcaggggcaggaggagtccaggacctgcctagcgccggccgcgcccgtctcccgagcccccttgtgtcaggcccggtgcccggtactcaacatgcgctcgcactccgccctctagacagccctggcaggacgcgtcctcctagttgacatttcacactcgtgaagacgaaggcttagggacatctagtgctttgcaccgggtcccagggtgggtggttccggtcccgactgggaaaaccgtcgcccgcgaacgtgtggggaggaggctgggccgagaacggggaccccgggcgggaccggggtggggtccagacccgggcaggggagccgagcccaaggcaagcaggcgggcgggcattacctgctgcggggggcgcctctccgccgtcaccgggcgcgccggagccccgggccccgcggtgccggaagtggcagtagggccgccggcagggccccccgggcgccccagaccaataggggcagtcaatggcccggaagaagccagtggagcgtagcatggtccgtcccgcggcggggccccggcccggagccgcccgggccccagggccccctcactggcgccgcggtcgccgccgcccgcgcctcacggaccccgccgccgccatcttgctccgaggcccccggaggccctcgggacgccgccgcaagggaccccgggaggggctgcccgcagcgcgcctgctcagaaacgcctgctcctgcgcgaccaaggctggtgacggacccctgggccgggacagacggccgcgggaggaagtaaggagggcaggggctgccctgcctgcggtctccgggagcctcgccagcgccgccgcccgaccttcggcggctgtagcggcgccatcttgagccccaggcccctgcggcgccagggctgtccacggcgcgcctgaccaaaaaagccccgcggggcccgctattactcatttgcatattatttcctttcgttagcatatcaccttaaggcgccctctgctggacgaggagagttctgcggggaggtggccttaaacctgggccaggtgaaactcatggttgaattactccgttcacagtctttaaaaatcccctcgccctggtatacagctggctctcaagaaacgccttaatctccccaacctcgactcttgtcatcagtctaatgaccaggtccacgttcactcatttgttcaacaaatattgagcgcctactgtataccagctagagggtgcattttaacagacaaacgaggaacaaggctgggatggggcaactctgtagtctggtggagtaggcccacgtcttaatgggaagtttaacctggtgcattttggtgggattgtaaaatagtgccactgctatgtaaaacaaaaaacccaaaaagtttgtttttaagagacagggtcttgctctgtcacccaggctggagagcagtggtgcgatcacggctcactgcagcctcgacttccctggctcaggtgattctcccacctcagcctcccgagtagctaaaaccacaggtg

SEQ ID NO: 7857 - DNA, 6000 bp, Homo sapiens
acagcatatgcagaagaccaaagatggactgggcgcagtggctcctgcctgtaatcccagcacttaagggggccgaggtgggcagataacctgaggagttcaagaccagcctggctaacatggggaaaccccgtctctaccaaaaatacaaaaactgccgggtgcggggtggctcatgcctgtaatcccagcactttgagaggcctgggtgggtggatcacctgaggtcaggagtttgagaccagcctggccaaacatggtgaaaccccgtctctactaaaaatacaacaaaattagccgggctttgtggtgggcgcctgtaatcccagctactctggaggctgaggcaggagaatcgcttgaatccgccaggcggaggttgcagtgagccaagatcgtgccagtgcactccagcctgggcaaaaagaatgagactctgtctcaaaaataaaataagataaataaaataaaattaaataaaaaataaaataaaatagaaaaattagccaagtgcagtggtcggcgcctgtaatcctagcactttgggatgccgaggcggtggatcacttgaggtcaggagttggagaccagcctggccaacgcggtgaaaccccatctctactaaaaatacaaaaattagccaggcatggtggcacacacctgtagtcccagctactcaggagtctgaggctcgagaatcacttgaacctgggaggcggaggtggtagtgagccaagatcgtgccactgcactccagcctgaacagagtgagactctgtctcaaaaagaaaaagggggtgctgaggccgggtgcggtggctcacgcctgtaatcccagcactttgggaggccaaggtgggaggatcatgaggtcaggagatcgagaccatcctggctaacacggtgaaaccccatctctactaaaaatacaaaaaattagccgggggtggtggtgggcgcctgtagtccctgctctttgggaggctgaggcaggagaatggtgtgaacccaggaggcggagcttgcagtgagccgagatggcaccactgcactccagcctgggtgacagagcgagactccgtctcaaaacaaaaaaaaaaagagggaaaaaaaagagggggctgggaacggtggctcacgcctgtaatcccagtactttgggaggccgaggtgggtggattacctgaggtcaggagttcgagaccagcctggccaacatggtgaaatcccgtctctattaaaaatacaactattagccaggcgtggtggcacacgcctgtaatcccagctactcgggtggctgaggtaggagaattgcttgagctcgggaggcagaggttgcagtgagccgagatcatgccactactccatccagcctggccgacagagcaagactctgtctcaaaaaaaaaaaaaaaaaaaaagagagggaaaggctgagttctttcaggtggggcatggaaagagaagggtggaggtcagcagggaaggagcctctcaggacaagggagaagctcctggcagacttccatccttgaccttggccttgcccccaggtcctggaccggatcaaaggctcactgctgccccggcctggccacaactttgtgcggcaccatctgcggaatcggccggatctgtatggtgagtgaggttgtgcatttggttccttgatggatcactcaacaagtgtggcctgagttgcagatgccagtgtatagctgcggacaaatcagtcactcagacagtgtgacttacctgctgttcagggagacagagacatgaaggactgcagagggtggcgggtagagagcagcagagcagacaggaggagtggccctgcagttctgcagggtgcagcagggcaggcctccctgaggagggtgagggaatgagccttgttggcaacaggaggggtgggggagacctaggaaaagaggcttccagaaacgacgtaagcttcatggcaggaacttgcatgaactgcagggcggcattaccactggagcgagtgagctgcagggaggtcacaggcgaggggacagatcacacaagcctcccatgctgtggcaagaagagatcttttttttttttttttgagacagagtctcactctgtcacccaggctggagtgcagtgatgtgatctcagctcactgcaatcttcccctcccgcattcaagcgattctcctgcttcagcctcctgagtggctgggattacaggcacgtgccaccatgcccggctgatttttatatttttattagggacggagtttcaccgtgttagccaggctggtctcaaactcctgacctcaggtgatccacccgcctcggcctcctaagtgctggaattacaggtgtgagtcactgttatctggccgagaatggatctttaagtgttttcggggtccctctcgccatcatgagtggcgagggcggaagccaggaggctggggtggaggcggccacatggtggggactgtggatgtggagagtggcactggattctggaacgtgctggggaagtagaagagactggctttgtggctagataggtgggggtggggggagtgggaggttaggagcggaggcaggctctagggatttctgcctggactaacgggatggatagagttgccacgtatccacgggaccagcttggcagtgagggcagagggcaagggtgtggatgaagccggagatgcccacccgggagcttgaactggagcctgcagtgctcagggcagagccctgggctctagaggaggcataaggccctgggcttgaaggaggtcatactatgggtgaacgcagacatggaaggggccaagaactgggcctggctgctccccatggctgaaggggtcagagagtcaaagaggaggtgacaggggttgaggaattggcaccaatgaggtgagacacaggccaagggtgtgcagtcctgagtgtttcggggagggggatgaactgacagccagcactgggctcagccaccaggaggcccccggtgtcctggtgagtcaggcaaggtgcttaggaagaggctggggtctcagcacagctcagtcaggatacatgtctgcttgtcctgggagtgcagggcccgggaccctgactgtgccccctacccccaggccccttctggatctgtgccacgttggcctttgtcctggccgtcactggcaacctgacgctggtgctggcccagaggagggacccctccatccactacagcccccagttccacaagggtaagcagacgggcaggcccaatgcctggcagggccctggggtacagggggtgactgctcaccttgccccccccagtgaccgtggcaggcatcagcatctactgctatgcgtggctggtgcccctggccctgtggggcttcctgcggtggcgcaagggtgtccaggagcgcatggggccctacaccttcctggagactgtgtgcatctacggctactccctctttgtcttcatccccatggtggtgagtgtggcctggcgcggagtgggtggtggctgtgtggggacactggcatggtcacctgccgcctcattcccatggtggtgagggtggcctggtgcagagtgggtggtggctggggggactggcatggtcacctgccgccgtgttgctcccaggtcctgtggctcatccctgtgccttggctgcagtggctctttggggcgctggccctgggcctgtcagccgccgggctggtattcaccctctggcccgtggtccgtgaggacaccaggctggtggccacagtgctgctgtccgtggtcgtgctgctccacgccctcctggccatgggctgtaaggtacgggtctggggtggccacaggtggggccgaggggctaggggggcatgggctggccctgcctctgaccccaggggtcttgtgcagttgtacttcttccagtcgctgcctccggagaacgtggctcctccaccccaaatcacatctctgccctcaaacatcgcgctgtcccctaccttgccgcagtccctggccccctcctaggaaggcccgggtcccacaggtaaggactattcccagctgggctaagggggctgccctcccactcccagtcaaggcgagaggttctggggccactcccagacaattctttctttcaggcaacacctaagtggaccaacccctctgcctgtcctgccccccagacgatgactgaaggctcctttgacaccttgagatgattctgctactttccagacttttcttacaaagcaaacacttttattttctatgcaaaggtgattcagagaatttatataaaggcgggcgaggggcagccgagcagggagctttgggacagggctggggcccccatatcccccccgggccacctgctttccctcctatggctcccctggaacaggagggagagccaagggggcggcccagcctggacagcgcccgctcctgcctgggtgcacacacggcgggcctgagctccagcatctgagtttgggggtatgagaaacaggggagcagaaggagaagaaaactgcctgtgctgcaacacgtttcctcatttattttttctttctttttctttttttctttttttggagggagaggtccctgcaaggtcccttcccgggcaggggagggatggaaatgccgtcacagtagtagggactggagcgtctacaaggatggaggggagctactcaggcctaacgttagctacaaggaaaaaggacgccttccgtgacagatccttgaggtgtctgtgtctgccccaagtggccggcagtggccttccctccgggcccaaggcctgcagccacctgctctaactcttgagtgggggggcggggggggacctgcaggggctcggggacaggacagcagcaagaggcaggggccgaggacggaggccttcccgacagtggggtgggttgtacattcaagtgtgaggtgaaccctttggtggggagggggcccctgaagcctcggcggggccacccctccccgcggcgcctctgagtctagggagaggggctgctggctcggcccggccggcctggcttcacagagggtctgcggattgacactggttcttttcataaaaaaataaaattaaaaaaagcagcatgtcacgtccgttgtgaccgaggcctggtcgtcgaaggggaggccccgcctggccaggctaccttcccactggagacaggcagggggacaggtgctaagggacctggcaggcagggctggcaggccccatggcgcctgttccagcagatgacaagcccaggtcagggtagagcgggcaggaggggggacgagggctcccacaacatgattttgtgtaaaatatggcagcgacacacgctcagggccgggaggtgggggttagggtggggacggcggcaacatcgtgtaaaaaagtgtcccagttcccatagcaaagagagctgtgaccgggtgttcgagcttctccagtacaagggggaaagccgcccggcgggggcggcgggcagggacatcatttggtttcctggtgctgtcagtccgcggggcgggcccctagctcccgtagtgcatggtgttggtcgggatggacatgggcgacgccatggagatggcggggccgcccatggtgaactggctgttgactgcatagtgggcactcgtgctgccaccaccactgccctgggcgccggaggaccctgtggagcaggcaatggcagtgaggggctgccctggcccgcccagcccccaggcagagtcacagagagagagaaagggcaggcaagagggcaggcgggcggccggacagaggatggcgactcacacgctagctcggcccccacgggccctgcccccgccaccctcgttaccttggacaatccccgtgctcattatggagcccatccgggagtgggtgtgattgacaatccccgtgttggctgcgcagcgagagggaggaaagaaggaagggagacggcgtcacc

SEQ ID NO: 7858 - DNA, 6000 bp, Homo sapiens
agaccctgtctcaaaaagaaaggaaaagaaaaagaatacaccagaaggtacccagagaggccagtgtggatgtacagccagcacataagatgctggttagggacaggcgcagtggctcacgcctgtaatcccagcactctgggaggcccaggcagggggatcacctgaggtcaggagttcaagaccagcctggccaacatggcgaaaccccgtctgtactagcaaatacaaaaattacttgggcgcggtggcacgtgctataatcccagctactccggaggctgagggtggaaaattgcttgaacccgggaggctgaggttgcagtgagccgagatcgcaccactgtactccagcctgggcaacaagagcgaaactccgtctcaaaaaattaaataaataggccgggcgcggtggctcacgcctgtaatcccagcactctgggaggccgaggagggcggatcacggggtcaggagatcaagaccatcctggccaacatggtgaaaccccgcctctactaaaaatacaaaaacttcgccctgtatggcggcacacggctgtattcccagctactcgggaggctgaggcaggagaacggcttgaacccgggaggcagaggctacagtgagccgggatcacaccgctgcactccggcctgggcagcaagagcaaaactctgtctcaaaaaacaaaaaacagaaaaacaaaaagaatcaagtaagtcgaagccacactgataacagccaatttttgtgaaccaagggagtgtcaattcaagaatttacatagatgtctacttttgctatctcctatgtgccaagcaagatacaggctctgggcaatcagaaacaaaagagactcactcgttcctctcacagtactcagtccttactgagataaggacaaaagaaaatgtcctgtctggaatgcagggaaaccagaacttcaggtcaggggacatttccattgaattgtgtggagttgaagctgaaaatacttttttttttttttttttttttacatcacggcatggtttattacgtgatttttttactatacaaacaaaaaatacagaaatgcaatatgtgaatacagctaaatgcagaatggtgacttttttctcttcaagaggccatgattcccatttctagtaaaataaagagaccgcatacaggttggttgtgagattcacaattttgcctagaaatgatctataaatgcatttttcccccctgctacctaccgtaaatcgtaaaaagggagttaaagcaaagtttccttgttggttcctaccatatggaagatgctatattctattttagcagggtcaatatttggaaaatatctaaattaaatattattacaaaaatgaagctgtaatgagattctggctaaagagggcactaaatgagaataatatatatttaaagaatccaaaacaaacaaacaaaaagaggttattataaaaagctctaggtgcactgtaagcatatagggtttttttttcatgtgtttttttttaaacaatggaagtgtcaaaaatagggtcaactgtgttagactaaattacattattgtatatgctgcattgaatggaacctttgtattataattatcatagagaagcacagtttgcatcatattatggcaattcatcgtcaatgaaaaccttccagagtccttttattttggaatctcctgtaaactatcaaaccaccagaacatgactgtacaacagtaaaatgttctcttgcattaaactgaagagacctgtttaataaaaaaagaaaaagaaaatgtaggaaaggtacttagagctgttactttctaagtacacaacaccctagacaattcgaggcatcttaatctccatcaagaacaacaacaacaaaaataatttttgtcatgttgttaaatccatcattatggatcaaactggtgcaacttggtcaaatgaatccaacaaacactgatgtccaagctggcatattggcaactaatacacaactggtggtcaatagagagtttaaaagatcttccctttcttgttgttcttttccaaggttctcaaagagttctgttgctctaaaatacgttgttgagcttcccagtttgctttctcatcctcaaactgacgacgtttctcctctaattctttgtgccgtgctcccaaattctttttcagttgcacatggcactgctggagctaaatcacagcacaatatataccccaaggatactgccttcctctgaccctttttccattaacttcagtgataatatcactacccaccacagcaagaggtaaacggtcctttatctttttaacacgtttcttttcttcttcatcatctgtttctggaaattcatatattttaattttatgttcttggatttctttcattatctgttttgtaaactgttgacattcctctggtgtgagtgtgtctgctttggcagtaagtgggatgatattcactttttcatgcaaatgtttcataaactcaacatccagtggtttaagtctcaacaaaaggcaatgtcaagtagttacaaacatgcactacccaatcctgcctgaaggtgggagtcttcagttatgtaatggtcctgttatcaggcatctgacgtctgctcactcgcgattctgcatttaggtagtcctcaaatttactatcaatgtaatcgataacaggctgccagcaattactactatccactgcatctccaaatcctgaggtatcaactatcctgagcagcaactaaacaccaccttctttgattaaaactttggattgttccatccaggcttctattttcccatagaggtccaaaaaacgcccttgtttgttaagttgatatatgtaaaccttttctccaggctgttccttgaggtttacataattgggaactccttcaagcatctgtaaataaaccttttcagctgtagatctctctattttcagttaatttgcagaccaccaactataggagccaagttgaaagagaaaaaagtttctcttcccagcactttctttaggatgcttttcattgcttcccaactggaggcctcgcccctccacccacctgccctagtcctcagctgcctccagttctgtccacttaaatacagactcccggtagtagagaacttttttaaaattttattattattattattattattattgacacagtcttactctgtcgtccaggctggagagcagtggcacaatctcagctcactgcagcctctgcctcctgggttccagcgattctcctgcctcagcctcctgagtagctgggattacagacacccgccaccatgcccggctaatttttgtatttttggtagagacgggggtttcaccatgttggccaggctggtcttgaactcctaacctcaggtgatcctcctacctcggcctcccaaagtgctgggattacaggcgacagccaatgtgtgcacggcccaggtattaaggaattcaatctctatttctcaccaatgaattaggctctggaagttagtagattttaacaaatacttgttaagctaagttcttctcaaaggtctttaggaatattcagtaaaagaggactctgttaactgaaaaccagttctgttccagtaaatcctcaacagatggagaaaatgagactatgccccaccctttccccttagggcctccacattgattagaggaggaattctccttttaatgactgactgagctatcactcctctctgtcagtaaaaacagcagcaaaaaaaatgtcttggctgggcgcagtggcacatgcctgtaatcccagctctttgggaggccgaggtgggcagatcacctgaggtcaggagtttgagaccagcctggccaaaaccccgtctctactaaagatacaaaaattagccgggcatggtggcaagtgcctattgttgtacctgagcgagttagaaaaacgccacactttgagacgaattaagagtcctttattagctagcgcctgagagacgtctaaggcttaaaattctctcagcccggaggaaggggcttgattaacttttataccttggtttaggaaggggggggcgtccagttaaaacaattttacagaagttaagtaatcaaaaagttaaaaggataaatggttacaggaaagtaaaacagttccaggtgcaggggctttaagactattacaaggtgatagacgcggggctttgggcgttatcagtcagacgaattcttggggactgcggatatagcttgccacagtatcttatcagttaattgcattcttggatgtgctggaagtcagcttgcacaagttaagtccttgaggaagggactgccagtgaaagagccaagatggaatctgtctggctttcttagcttagggagagtcagttcaggtggaaacaaggctaggtgattaaaggaaaagggagagtctaaaaacagggttagtaaaaaccaggttgggtattacactataatcccggctgcttgggaggctgaggcgggagaatcgcttgaacctggaagatggtggttgcagtgagccgaggtcgtgccactgcactccagcctgggtgacagagcgagactctgtctcaaaaaaaaaacaaatttcttggccaggtgctgtggctcatgcctataatcctagcactttgggaggcccaggccggcagatcgcttgaggtcaggagttcgaaaccactgtggccaacatggtgaaaccctgtctctactaaaaatacgaaaaagttagctaggcgtggtggcagacgcctgtaatcccaggtcctcgggaggctgaggcaggagaatcgcttggacccggcaggtggaggatgcagtgagcagagatcgcactacttactgccctccagcctgggcgacagagtgagactctaacaacaacaaaaaaaaaaagaaaaagaaaaagtaaaagaaaattctgacatcaagctcattgaaatgtattcttccctttcctcagctgctgccaaggtgctcggtccttccgaggaagccaaggccgcgttgcagtgaggccctcacttcatcccgcgactagcaccacgtccggcagtgccagccccacactcgcccgcgccatggcctctgtctccgagctcgcctgcatctactaggcgctcattctgcacgacgatgaggtgaccgtcacggaggataagatcaatgctctcattaaagcagctggtgtaaatattgaacctttttgacctggcttgtttgcaaaggcctggtcaatgtcaacatcgggagcctcatctgcagtgtagaggctggtggagctgctccagctgaggagaagaaagtggaagcaaagaaagaagaatccgaggacggtgatgatgacatgcgctttggtctttttcactgaacctctttttataaagtgttcaataaaaagctgaacttcaatttaaaaaaaaaagaaataaatgtattctttgcatctggcatagtgtgcccagcgcgtgtgatcccagctatgcaggaggatcatttgagtccaggagttccagtccagcctgggttaacaggtagaaccccttctctggaaagaaaaaaatgtaaaaaggcattctttgtgtattatttttttgaaacagggtctccctctataccccagactggagtgccttggtatcatcacagcttactacagccttgacctcctgggcccaagcagtcctcccacctcagtccccggagtagctgggaccacaagtatgcaccaccatgcccggctaattttttatttattattctctttctcttttctttttttttttttttttttgagatggagttttgctcttgttgcccaggctggagtgtaatggcgtgatctttgctcactgcaacctccgcttgctgggttcaggtgattctcctgcctcagcctcccgagtagctgggattacaggcacctgccaccgtgcccagctaatttttgtatttttagt

SEQ ID NO: 7859 - DNA, 6000 bp, Homo sapiens
accgcttgtgtagcgtagctttgcctctgggttagctgtggggtggtggaatcctgcccttcctgcagcccagacccaggcaggaggacctggagggcccgctgtgccttggggctcttccggatttgtctgacaccaggctcctaggactaatgaggcctccaccagacttggtcttgactaacctcaggggagctcatacctctctagaacaaacttactgtcctcagcttttcggcagccataaataaaagtcatttgtgttcgtttatttaatgctttccttttacagtgaagtgaaggtctttgatgacctccttcctacctgctaaccaaatatggaaatctgttctggacagagtccatggccgtgccaggaagcaggcgttagccaggggcctgcctggagatcagccctcctgagacaatttctgtgggggtggaagtgggggagggagaaagtcgctcagaactgatggtcctggaccggccacggtccccagagcctcagcctcccaggcccaggctttgttgaagatgtccgggccctggactggcgctgtctgggcccccactgacctgacccagctgtttctctctccctgatggtccttgttttctcggtttgtagttcctgggtaggatggccagataaaatacaggatgcccagttgggctcggattacagataaacgaatgtgtaagtatgtcccatgcagtattcgggacacatactgaaaaccggtttgttgctcttctgggattcaaatgtaacggggtgtcctgtttgtttcacaggtatcaggactcagctagggggtccttgatgtttatttgccccattgctgggctgttctcaggaggatgttgagaccctggcgtggagcgcctcctcggcgtgtccagcagagggcggccgtgcctcccggaggcatcgcggggcccagagcgcagcccagccccgtcccctggtcctgtggctcgaggtcggggagggaggggcggtggtcgctgcggggcaaatgtttccactcacccggagccacgacccacggcctgtgcagggagagtcgaaagcgcggcccccggtgagcacttgggaggtgaaccggttccccgccctggtgggctgtcaccagtcacatcaagagatgcaggacggcggtggcctcaccagaggcattacgagttctctggagcccctccgccaccaccgtccttgttcttccttgagtcggaaccaggtccttggggtctgtgggtgctcagtggctttgcagacctgcaaagatttgaggtcttccaggtgcctctccttgccttcaccagatgctggtttcgggggcagggatagggctgccaggcatcaggaaggtttgtgaacggggatttaatcgagtgtttcgcggggtggcccctgccatctctgcccctcgttttgtacgagaagcaggcggaaaccagctctccctttgagaacgcactgttgccctccgctgttgcttgtgtgtcttgccttgctgtgacccagggagagctccctgcagctgtcagctccctggtgacctcaggctctgggcatcccagtaagcacggcttgcgcacccactgtgtgccagctcccactttcctggagctcgtgggaggagacggggacagtgaacgaacgcacagactgagatggtgggaggggctgtgcgttccgggttgtctgcacgaggggctctggcaggggggccgcgtcccggcttgtctgcgcgaggggctctggcgaccacgtccagcactactgctgtgtgtttttctttgctgtgacccagtgaagacctcctcacagacagagcacagcagactcgcggtgctgaaacccggagggttaccctgtccctgactgactgtaaggttacactaaattaagaggcactccaaggattgcaaagtccgaggggaattttgaattcgtgggtcctggattgtgaatttgaaggcagcggtttccaacccttttaaatcttgaccccaggaagaagtaccttctacatcttgacccagcaaacacgtgatacctacccacactgtattttgttcaattaaccctcaaatgatgtttcctaatgtttggccctgggtcaagcatttcacaaactatttaatcttctctacaatcccaggtggtagctactgtcttgccgcctttatgcagacagagactgagggataccttagatgtctttccaaaccatccaccccctcagccttccctgcccactgcctgcacgtcaaacccactgacgggcactcgttcgactccaagagccccgtgccaggaacctgggagacaactcccgttttgactctgggcaaggtacttcacctctcaagtcccagagaagcagagaaagcaacggcaggtatagtggctggctgcacttaggtggcacctactgtgtgccaggcccccttctgcccacttcacaggtgtcttagtctccatagagtccatttggaaacaggcccggagccatccaggttgcgatgaggcaccaaggtggcagagccagtgctgggcaagaggcgggagctgcagttgctgaacccgtgagcttgcttgcctgggagtggcgacctggccctcaggggttgcttgtctctaggggacccagcctgggtacatgtaccaccacccgcttccagctctgctatttgcaggtgaaggagaaagccactgaggcctggcctccaggccaggctctgtccctgctgggagctgccctggcctcaggttcttcctggaagggaggaccaggcagctgggggcagcagcagatccagctatgaaagccgtgacaagaagttccttgaagtgtggtgggctgcagtcagcatatgtaggagacgaccccaatcctgaccctaatcctaattcttgctttccccaccagattttaatccttatcctgcccagggattttaagggctaacccaaatcctgacccaaggggaaggatggaagggggaacagcctgcagcctcacctccaccctctatcctcccaggtctacctccacccctctcctgggtctctccctcttggcttggccccatcccacagcccccactgtcttccccccgctcccactttggcaggcccctccaagtgacctctcccttgctccccagcacacagtaggtgctcaatgaagaacaccgcctttccttgactccagtagatgttgcaccctctccatcttaggagaaaatgtgcgttggctgtcaagactacactgacagcagtggtcactcatttgcagacagggtgaagtgtgggggaaagcgcagtagtgacgctgaaccctacatttatgtagcattgatgctaggcaccagaaccctcacaatcctaattccgacgggagctagagcccccccaccccaccgtgagtgcagcaagggagcacctcaaccctgcccttggagggccacaggtcagcttgcaccgtcttcccacccagcaccactctgggtgcctttgctgtctcccaagagccccttgcccttggagttccctcatgatgcccccctgccccacgtgcaggtgtctgaccatccgggaagcagggtcgaggagctcccagttgaagtccagttgctgagacgcaccctgttttggtgttgctggggcagggggctgatggtggtgctgaacgggttttagaggagggtcagggtggcagcggatctggggcccagcagccttgtttctgaccccaggcctgccacttcccatttaagtgaccgtgagtggcagaggtcaaggctggactccggaaacgtgggtctgacactcctgaggcctcccggatggtcccagccgaaaggacccagtgtgggtcccttgggcctgggtttccctggctcaggtgccctcaatccccaggcaccctcagctcagggctccccacgacctggtgggggcacagaccccggcgccatttcatggggttcccagctcctggcgcccccgtgctcttctgtgaaatgggacagcaagtgcgctgataggaacggtgcctgggcacagggctgcgcctggacaccctacgccgtcgcaaggtgggtgccgaggaactcgagcttctaacgtgccaggggtccaaggacgcgccaggattttgagtattaggagaaaagaaactcctgaaatgaagccacgtcgccccttccactttaaggtgcctcctgctgtcggagtttccaggcgcacacggcgcggctgccactccctgaggaggaaagtcgggaaccgtcccgcggggccggtcccgccgctgctcgtcctccttctccacgtccccgcccggggctccgccggcccgacccgcggggaacctccagcctctgaggacctcacgccgctcggagacccgcacagcccgggtcagggccgggactccgggcggacgaggtccccgtggcgcccgcacgctcgccccacccgctcttttgggcgccgcggccaggcgggggcagagtccgcgcggtcccgggtccgccgcgccccgccccccccgctgctcccctgcccgccgctgccgtcccccctccctcctcccctcccccccttcttcccttccctccccctcccccctcccctccccgcccctagccctcccctcctcccctccccctccctcctcccctccccgcccctaaccctccctcctcccctcccctcccctcctcacctctcccctcgtgccctccccgcccctcccctcctccccttcccgcccctcccctcctctccgcgcggggcgggctccgcgccacgtgactccgcggccgggccgggacgcgacgggacgcgctgggaccggcgtcgggggtcgcggggaccatgcagcggaggtgggtcttcgtgctgctcgacgtgctgtgcttactggtcggtaagagccttggggacccgggtgttggggggaccctcccgggacggacacgcccccggctgcgcgcaagtttgcaggggaacgcggaggctgcgcgccctcgtccctccgaggaccctggaggcggggacctcgcgtgaggaccagacctccctccgcgccccgcactgcgcgcgccctcccaggctcgggggtccccgcgtcccaggcccagggggatgggggtcgcgagaggcccggggagccggggccagcatcccccgccccggcagcaggaagtctgtgcggaggggccgcgcgcgcgcctccatcccgccccgcctggcctgggaggtgagtcacgcgggcccgggaggtgggggcggccgcgggttaccccggcaggacgtccgcgcctccgcccctggggtgggcgctcccgctgcgcgcggagagggctgaccctcggtcctggcacccggtgcgtcggcgggattcgaacccgtgcacgtgcggggaggcccagccgccctgctggctcgggcgggggagacactggggatgaaggctgggtcccaggcttcgggtgaacggggtggcggggggccgggaggccaggagaaccaaacctgtccggcgggtttgcgggccacactggcggaatgggcatcccgaggcccccctcccgcagggtcccgggaacaaaggccgagtgtttgctctgtggctgcacagacaatggccctggaattctatctctggggggtgccctcctccccaacgtgtttcctgcttctctgccatctcacagcagaggccaagtcctcttacctccggaaggagacccttttttagggtgggccaggtgacagcaagaagtccctgtgggtgtctgccagcccgtggtaccatttcctgagcacctatggtgttatttatgtaaacatttaggtggcactttctgtatgccaggaactaagcaacatgcaaataacaaacatttcccttacaacagcctgtgagggaggtgctgagtcacctgccggaggtcacacagcagcgggaggtacag

SEQ ID NO: 7860 - DNA, 6000 bp, Homo sapiens
ttgttggatgagtaggagtttgtcagtccaaaagagaataggattcttactgggtgcggtagcttgcacctggagttctagctacttgggaggctgaggccgaagggggaggatccgttgagcccaagaggtcgaagctgcagtgagttatcatcacaacatgacgctccagcctgggcagcagagcaagagcctctctctaaaaataaataaataaataaaaataaaaatccgagtggctcacgcctgcaatcccagcactttggaaggccgaggcgggcggatcacttgaggtcaggagttccagaccagcttggctaacatggcgaaactccgtctctactaaaaatacaaaaattagccgggcatgggggcacatgcctgtaattccagctactgaggaggctgaggtgggaggatcacttgaagccaggaggcggaggttgtagtaagtcgagatcgcgccactgcactccagcctgggcgacagagcaagactccgtcttaaaaaaaaaaacaaaaaaaaaaaacacaaaaaaaccctaataataataaattattaaaaagtctccgggacagtctcctgccaggcagtgctggctctcaggagaccttagctctggcccagcccatgcccaggaagacagagctggcacagaccaacccccaacccggattccctgtatgagccagcacaggcggaacccccccaccccgcccaccctgtttccctatatgagcaagtacaggacagaatgagaggcttggggctggaggaactggagggagagttggggctctgtcggaggaatcaaggaaagctgcatgtaagaggaggcaagggagatggggttttgaagcatcaataggagtttgacacattttattttattttattttattttattttattttattttattttattttatttttagtagagatggggtttcaccatgttggccaggctggtctcgaacccctgacctcaggtgatccacccgcctcagcctcccaaagtactgtgattacaggcttgaaccactgcacctggccgacccatgtcattttagaccagtgctgaccatttctgttattctgagatgaaggaaattttcaatgtggcactatctactactgtagccactggccatggggctactgagcactggaagtgtggctggtgccatcagggaagcaaatacttcatgttctttttattttattttattattattttttgagacggagtctcgctctgtcacccaggctggagtgcagtggcgcaatcttggctcactgcaagctccacctcctgggttcacgccattctcctgcctcagcctccccagcagctgggactacaggcacacctccacacccagctaatttttgtatttttagtagagacggggtttcactgtgttatccaggatggtctcgatctcctgacctcgtgatctgcccgcctcagcctcccaaagtgctgggattacaggtgtgagccaccgcacccagcaaatacttcctattcttaaatttcaattaaaaattaaaaactggcactagattccattttttgaagacacatatatataaatacacatatatatgtagctgggactccgagtagctgggaccgtagacacgcaccaccacgcctggctaatttttgcatttttagtagagatgcgggtttcaccatgttggccaggctggtcttgaactcctgacctcaagtgatccgccggcctcagccttccgaagtgctgggattataggtgtcagctgccgtggccgggctatttcaattaatttcagttaaaaattaaaaactgacatgatttccgtttttgactatatatatatgtacacacacattaaagttttcaaatacataaatacacacatatgtacacattatacatataaatgtaaatatatagatatttgaaacagggtcttgctctgtcacccaggctggagtgcagtggtgcaaatatagttcactgcagcctcgacctcctggactcaagtaatctcctgcctcagcctcctgagtatctgggactacaggcatgtgccatatgcctagctaatttttaaattttttgtagagatggggtctccctatgttgcccagtctggattcaagtgatcctcccgcctcagcctcccaaagtgctgggattgcaggcgtgagccaccgtgctcagcctcgtgtatattttaaataccttagcgtttctgaattttccttttcagtataaacgctgtaaatctaaatactgtggagataagtatttctgaggaagcactggtatccatattggaacaccccatggatgggaaacacaccagattctgaagacttggtacatctcagttactttttttttttttttttttttgagaagtagtctcgctctgtcacccaggctggggtgcagtggcgtgatctcggctcactgcaagctccgcctcccgggttcaggccattcttctgcctcagcctcccgagcagctgggactacaggcgcccgccaccacacccagctaatatttttgtatttttagtagagacagggtttcaccgtgtttgccagggtggtctcgatctcctgacctcgtgatccgcccgcctcggcctcccaagtgctgggattacaggtgtcagccaccgcgcccggccacttttttttcgtttatgaggtggggtcttgctctgttgcccaggctggagtgcaatggtgccatcacagctcactgcagcctccaactccttggcttaagcaatcctcttgcctcagcctcccaagtagctgggaccacaggcacacaccaccgtgcccagctaatttttggtatttttcgtagagacaggatctcattatattgcccaggctggtcttgaacacctgggctgaaatgatcctcccgcctcagcctccaaaagtgctgagattacaggcatgagccaccgcgcctgaccttgtttggataacttgagatgtgtaaaatatattattaaaattaatttcacttgctcttttttagttgttttactgtggctaccagaacacttaaagttatgtttgttatttgcttatctttctcttggaaagctgtgttcttgacctgtgggccaaatccagctgcagcctatttttgtatggcttgtgagctaagaatggctcttacatttttaagtggttgaaaaaaaaacccaaaatatgaaaaccattctatcaaacgtggaaattacataacattcaaattccagtgtctgcagacaaagctttattggcacacagctgtgcccatccatttatgtatcatttacggctgcgttttctgtacaacagcagagtggagtagttactctacccaaaaaagctaaaaatactgactgttggcttttttacactttattttttagagacagggtctcacttagtcatccaacctggagcgcagggatacgatcatggctcactgcagcctccaactcctgggctcaagcagtcctcccacctcagcctcccaagtagctggaattacaggcatgcaccaacgtcctcagttaacttttaaaaacatttttttgggggggccgggcgcggtggctcatgcctgtaactccagcactttgggaggctgacgcgggtggatcacgaggtcaggagttcaataccaacctggccaagatgatcaaacctggtctccactaaaaatacaaaaaaaatagccgggtgtggtggcggaagcctgcaatcccagctattcaggaggctgaggcagagaattgcttgaacccaagaggcggaggttgcagtgagccgagatcacgccactgcactccagcctgggcgacagagtgagactgcgtctcaaaaaaaaaaaacaacacaaaacttttttttggcgggcttggtgggtcacacctgtaatcccagcactttgggaggcctaggcgggcaaatcacctaaagttaggagttcgagaccagcctgaccaacatggagaaaccgtctctactaaaaatataaaattagcctggagtggtggcgcatgcctgtaatcccagctacttgggaggctgaggcaggagaatggcttgaacccgggaggcgggggttgcagagagccgagatcgcgcttctgcgctccagcctgggcgacagagcgagaatccatctcaaacaaacaaccaaaaaacccaaaaaccatagtatcctcttgtgtacgcagccggcactcagtaagtgcccctgaagagcacttatttattcattgctgcgcgaagctacgggggcaggtggcacagcgccacgcaggagtagagactgccagattgttctaccgccaaccttagtggcgccacaggagatggacacgggaagactatgacgttactggccctgtgacgtcatggcaggatccgggcaagagaagccaaacgaggtgacgagctgtagactacagcaaaaatatggaacgcttcacgaatttgcgtgtcatccttgcgcaggggccatgctaatcttctctgtatcgttccaattttagtatatgtgctgccgaagcgagcacgactcaagggttactgtcacacctattttaagcccttcaatcaaatcatcttttggttaggataacttatggtcggtttcatatttagcataatttcctacagtggtatgttgcagaacaactttcgtgcttacgcttactttgatgtcttcgatcacgtaaaatcccatatcttatcgtaattttaccgccttatactggcctcatagccgcggtggattgtgggtgccaatatgcaaaagaggtggcccagatgcaggcccgccccctggagcggccgaggtagggggtgaggcctccgcgggcgccgctggcatcccagcgttctctgcgggcgcaggggggccgctcttgcccggcgtggcgactcgctagcgtcagcagcgccgcagccggacgagaaagcggaagatggcggcggcggccgggaggccgtgaggagagcggcggctgcgagggcggccgatggcggccgggaggcgccctcggacacttgcgggtcgttagggcgcgacgctgggaggcatgtcggagcacgtggagcccgcagctccggggcccgggcccaacggcggcggcggcggcccggcccccgcgcgcgggcctcgcacccccaatctcaaccccaaccccctcatcaacgtgcgcgaccggctcttccacgcgctgttcttcaagatggctgtcacctattcgcggctcttcccgcccgccttccgccgtctcttcgagttcttcgtgctgctcaaggtgaccgcggccccgacccccgacccttgaccccagcggctgtcccgacccccaagtctgctacctccgaccgcgacccctggccccgctggggacagcgagcgccaccctgcaccctgaggcctatacccggccctaccgattagggctctccctcgcgacctctgaccctgggattggccagggacaccgtctcgtgaccccatcccgcccggggacgtccacccgggaaggccggatcccgctgcactagaagccgctgttctctactctggaaacctcactgtcagctccctccagggcccatcctgtccccggcgaccgcctttcccaggtccccacctacccaggcttggagtccggtcctggcctgcgaggtagcacctcccgccctttgacccctgactgtgccgcctgagaccctcagttccgaggcctctctcccctcccaatgtgctggcccagaacccagcctgacgcaggtctccctcggaccaacccctgtcctggaagtcgactccccactcccctctctccctccttgtagcctttcagctgcgttccccgctcctgagcctcaggggaatgtgacttagctgaggtcacctcgctagggttagcggcaaagtcaccggcagcagcgtaccaccccatcc

SEQ ID NO: 7861 - DNA, 6000 bp, Homo sapiens
tgtatttttagaagagacggggttacatcatgttggccaggctggtctccgaacttctgacctcaggtgatccacctgcctcggcctcccaaagtgctgggattacaggcttgagccaccgtgcccggcctaaaactattttttctcgcagcctcaactgagacggagactgacctgggatgtggagccccagcctggcctggccctgcagccctccaccggactcaccaaagtatttggaggtggtgccgtcctctgcatgcaccacgaccagccccggccgcaggacctgcagcgtgggcacgtgggccgccaggatgccgaaggctccggtcagcgtgggcacgtccacctgccggacgttggcaccgttgaagaacacctgcagacaacagcgtggggaatgatggcggggcaggccggccccgcgcccaccgggcactcggcctgtcctgctaagtaatgggtcagggcaggacctggcgctgatgtgaggcactgagacaacccagcgcagggatccgaagttgcagctttggtcctcaacagttgcgcctcattctactgatccgcgaaatgggaatgcaacgatccggcgacacccaggctttggccagggagatcggggagggcacccaggagacgcttatctcggggaggtgcccgggacgagggcagcgcagggctcgggcagcagaggcagggccgagggtccagggctgagtagcctcggcttccggggcgcgcgggtccgggggcccggaagcgggggtcgcgccctgggggtggggaccctggactccgggggcggcggccacggagggtcccgacccgcagcgcccgaacctgcgtgggagaggcgaaggtgaaggacatctggttggggccagaggcggcagccggggcggcggcggcctcggcataggcacgggcgtggcggacgaggcggccaagtcccgggcggcggagcagcgcggcgggcagcatggcagcggcgggcggcaggaagcgggtagctggcggacagcggactccggcgcggcgcgggcggcctggagggcgaggaggacgacgcgcagggacgtctgggaggaggagtcccggcgagagcgcaagcgcgaactacgactcccggcagggcgcacgcgacgttgacgacgcagtgccccgtcgtgaggtattctgggggttgcagttttgttccggcccgggctgcggcagaaccagggggtggtcagataagggcggtgaaaccgtcctgggaggtggagtaaaacgaacttcagtgaaattcaagattcggctgcgtggtggctcacgactgtaataccagcgctttaggaggctgaggccagaggatcacttgaggccaggagctggaaaccagcctgggcaatagtgtagatcgcccccacccccgacccgtctgtacaaaaaaaaaaaaaaagatttttggggcgctcattggatgcagggccctggatagacatcaagaaaacatcaagtttccggctctgggccaggtgtggtggctccaacctgtaatcccagcaccttgagaggccaaggcaggagaatcacttgaccccaggagatggagaccagtctgggcaacagagggagaccccgtctctacaaataatcaaaattagccgggcgtggtgatgcacgcctgtggtcccagctactggggaggctgaggcgggagcatcgcttgggcctaaggagattgaggctgcagtgagctatcattgcgccactgcctagcctgggcaacagagtgagaatcccactctggggccgggggttatttagcagacatttgagatcattaataagcaggtcaggccgggcgcggtggctcacgcctgtaattccagcactttatccgatctggagggcgaggcaggcggatcacctgaggtcaggagtttgaaaccagcctggtcaacatggcgaaacctcgtctctactaaatatacaaaaattagccgagcatggtggtgggcgcctgtaatcccagctactcgggaggctgaggcaggagaatagctcgaacccgggcgggggggggggggggaggttgcagtgagccgagatcgcgccactgcactccagcctgggcgactgagcaagactctgtctcaaacaaaaaaataaataaaatttaaaaacaaacaggtcgtagtggtaggtggtggcaaaagccaaaaataaatcacagtaaaagccgagaaagtgtgcaggacgggacagggtggaaggctgcaggtgcagctgttctaggaaacggcgaccgcggcgaggggcacagcgcgggcgacgcgggagggctcgctggggatcccggaccccggcgcgctgctcctcgacgccggcagagggcgctccgcgcccggagatgcgctcgccgaccccccacctcctgcctggccgtcgcccccgtgcgcctctgacgcaggagcgcgtgcgcgggcggctcggggctccgctgccgtcagccagcggcccgcgcagcctcgctcgcggctatgacgtcaccgccccgcccccgcgctcacgcaggtctgcggcacccggccgggcccccagccccgctccttaggctccgggaaaatgcggaatcggggatggcgggggttggggctcgggctccctggaaagggccttgagcctggcgcggtgggctggaccccaggggtgcagggagcaggggaggccctggggctgtggctttacaagggtgcagccagggagatccaatgcctcctgctgtgggcgaatccgacacgatccgtggctccctacatccggaggctgcaccctcgccccctgcccgtgttcaggccagtgcaatggcgggcgccactgtcccctggaacccaagcacctgaagaaggccctgctggtccgactcaggatgaaggcgtgggcctggctcctcccaccgggccagcgctgtgacggtcacttggagcctggtcatcctggccctggctcggggggtgcagaggaggaggcctgttcacttttcgagtcgtgacctgtgcacctcctggctctcaggaccgcatatccagctgccactccaggaaactgggaggcctaatagactcagtctcactcgtggaaccacttccctccagtccccactccagggtcgcccacgggtgagggcgccattactccagccccaaacctggggttcctctggaattccgccctgtcccggcctgtgcacccagcatggccaccgcggctaccatctcttgcctaggaggccccagcctccccccgtttagtacaggtaccttttcttcacacagccagagggagtctttattaaaaatcagaaacctggcggggtgtgggggctcacacctgtagtcccaacaatttaggagactgagacagaaggatctcttgagcccagaagttcgagaccagcccggacaacatagcaagattccatctctacaaaaaaaaacaaaacaaaaattagctgggcatgatggcgcgcacctgtagtcccaactaccttccgggctgaggctggaaaattgcttgaatccgggaggtggaggttgcagtgagccgtgatcacaccactgcactccagcctgggcgacagtgcgagactctgtctctccaaaaagcaaaaccgaaatacaaaaaaccctgaagcctgcccatgtcatggtcctgctgggaacaagacgatttctctgcttccttcacaggcattgacttgcaaacttttttgcctcaaaacctttgcccatgcaattcccatttgcctggcaccaggttccctggggctgcccttggagttcacagctatcggagtggtggccccacagcacacaggaacaggcaaggcgcaaggcatagggccttggagggacgtagcagaggaggggacccaggcatgggctggaagccaagagcagaagcgccgagactgtgaagctggggaaggagttgaaggaaaccggggtgaatctctggctgcatggacagaggcctgggtacagggcacctgcaagggcagaggcggggaggctgagctgggccagccacgtgccagagcggtgtcagcctttctttgggacgagaaagaggaggcgctgtggggtgttaggcgtgggctcagaggggttggggtggcgctcgggccaggctggtggcaggtgtgtggcctgagtatctgcaggatgaggttcgatggtctaagagggagaagcgggggcagctttgggctttgggtttctgcgggtgtcgttctgatgtcaccccacgaggagcaggcctctgtgagtgcacgtttgggccccgatgggctctgctcagctttgtgccggggtctgtgatcgctgtcacacaggggagggggcaggagaggcatggcgagtcctccacagtgccagaggggacctgcgtggggaagcaggcggggcgcctgtgtccagagaccctgggctgtgcagcttaaaggggaattgtggccgaggggccctggctgtgccgccccagaacccccacggaccaagcaacgtgagaggggagtccgtgcccccccggaccccaccccctcctgcgcacgcggcgcacctcgggctgcagagtcgtgaattccaggacacccccagctgcgtccctgggacctcaggaccgggcgaggtgaatcgtgccgatgggccgggggcggggctcggccgccgcggcgggtgcggggggcggctccgcgtgcggagtgggcgcccgggagcgcaggctccgccccccgccccgccggaagggaaggggaggcggtggccggcgcggagccagccagacccagcggcgagcgcagcgggggcggcgggccggggaccgggcagcaccgggcgcgcggagcgggcgcgccgccaacgcggtcacgtgcgcggcccctcctctcgcgccggcctcccccgcgccgcgctctccattcataaattctccgcctgctccgcggccaccgggcgccggagccagccgcgagcgccacgcagccgcccgccgccagcccgccgcccatgggccgctcgtcccggcgctgaggtaggcgcggcgggctcggggctgcggggggcggacgggggacaggccggggatcgcagccggctgtgggctaagcggccggagggagggcgcggaggagtccggcgggcgtggggaccgagatccgggccttgcgccccccacccggctgcctccagagggacccccgctcaggccccgccccagcctcagtttctccctgtgaggtcgggcgaggacgatggcgtctcggctcagccctggcgtcgggtccctgcctcccctggctcgccatccccacccttggccggctcgggggcgcggtgctgccccgtggggaacctccgccctcggctcccgcagccgcctcccccaggagcccccctcttcccctcggcctcctgccatcttccccggcctccggtcaccatcctgcgcctgtccccaccccctccagcctgaactcatttcccgacctacatatgcggccccttcccccagtaccagggcccgggcagcctgtgaccgggagcgctgaggacaccagcccccgccgggaccctgcccggctttgggcctcagtttcccgctgtcgcgtgtgggcggaagtccgggaagggcaggagcggctgccgcctgtgcgctcctctcgctccgggaaaggtctcgcgcgtgcggtgctgacctggggccgccgagcaccccggcgccagccccgaccccctgcgattcccgggcctccccacccggctgcgccgcacagcgtccaggcggctcctttccctggtgccgcgccccgcctcagtttcccccgagcgtaaggcggccggggatgctccgggcgcccgggctgggcacggcggggaggcggccgcggccatcttgcggcttcgcgcccgcccccccgaggccgccgcccccccccaggccgccgccccc

SEQ ID NO: 7862 - DNA, 6000 bp, Homo sapiens
cgtgacgtagacaggatgccaggggcctggccagcctcccccaatgctggggagcatccctgggcctggggccacacctgctgccctccctctgtgtggtccaagggcaagagtggctggagccgggggactgtgctggtctgagccccacgaaggccttgggctgtgcgtccgaccctgctgcagaaccagcagggtgtcccctcgggcccatctgtgtcccatgtcccagcacccaggcctctctccaggtctccttttctggtcttttgccatgagggtaaccagctcttcccagctggctggggactgtcttgggtttaaaactgcaagtctcctaccctgggatcccatccagttccacacgaactagggcagtggtcactgtggcacccaggtgtgggcctggctagctgggggccttcatgtgcccttcatgcccctccctgcattgaggccttgtggacccctgggctggctgtgttcatccccgctgcaggtcgggcgtctccccccgtgccactcctgagactcccaccgttacccccaggagatcctggactgcctgactcccctccccagactggcttgggagcctgggccccatggtagatgcaagggaaacctcaaggccagctcaatgcctggtatctgcccccagtccaggccaggcggaggggaggggctgtccggctgcctctcccttctcggtggcttcccctacgccctgggagtttgatctcttaagggaacttgcctctccctcttgttttgctcctggccctgcccctaggtctgggtgggcagtggccccatagcctctggaactgtgcgttctgcatagaattcaaacgagattcacccagcgcgaggaggaagaaacagcagttcctgggaaccacaattatggggggtggggggtgtgatctgagtgcctcaagatggttttcaaaaaaatttttttaaagaaaataattgtatacgtgtcaacacagctggctggatgattgggactttaaaacgaccctctttcaggtggattcagagacctgtcctgtatataacagcactgtagcaataaacgtgacattttataacgatgccctgcagtccccgggttctttttggtgtcacatgtttaggaagggaagtgggggggggccctgacgttcacctcgggtgcagcaaggaccgtggtccaccctgtgcactgggcttcctcgaagcgactcctcactctgaggagcccatggctcccagggcggctgggaacctgcatgtgtactcagggctccaggccacctggaagcaggattggctcccggggaaaagcagctccctgggggctgcacttgggcgcgtaggaaccatccaggacctgcggtcctcccagcccccatctgggagggctccccatctcccaacgtcccccccccgggctgttggaacccacttccctgccccttcctgctccgaagtcggctcgaagtctgagtctgtcactgctcctctgaaaccttccacggctccgttgctggcagcgtcaaccccacactccttagtgcggcatctgtgacttcctccacaaccggatgcccacggaacccacggacagagctctcggggggaaggggtgtggcaggacctgtgggggcgctgctcatcccaaagtgcccactggcaggcatctgctgctgtgcccagggacttggccgctgcatctctgcgaggacacagctggactgccctgctcccctacagggttggggtggaaggagtgccttcctggccacttgacggggggtggcccccaggagagagccctttggcacacaagtgccttagggaggagaaggctcagcacagtgactcatatctgtaatcccagcacttcaggtggctgaggcgggaggatcgcctgaggccaggagttccagtccagcctgggcaacatagtgagaccccatgtctataatttttaagggaaagagagtggccaggagttgacagaaggtgctgagggagccctgtccaccactctacccagctggcctctaaattcatgctggaaaacaacttttaaaatatacattggccgggcgcggtggctaacgcctgtcatcccagcactttgggaggctgtggcgggtggatcacttgaggtcaggagttcgagaccggcctggccaacatggcgaaatcccatctctactaaaaatacaaaaattagccgggcatggtggcgcaagcctgtaatcccagctatttgggaggctgaggcaggagaatagcttgaacccaggaggcagggattgcagtgagctgagattgcaccactgcactctagcctgggcgacagagcgagactgtctcaaaaaatcaaaattaaattggttgtacctggtgacacacacttgtagtcccagctacttaggaggttcaggtgggaggatcgcttgaggtggcagtgaactgtgattgcaccactgcactccagcctgggcaacagagccagaacctgtcaaaaaaaaagggtgggccaggtgcagtggctcatgcctgtaatcccagcactttgggaggccaaggcgggcggatcacgaggtcaggagatcgagaccatcctggctaacggtgaaaccccatctctactaaaaatacaaaaaattagccaggcgtggtggcgggcacctgtagtcccagctactcggtaggctgaggcaggagaatggcgtgaacctgggaggcggagcttgcagtgagccaagatcataccactacactccagcctgcagcctgggcgacagcaagactccgtttcaaaaaaaaagggtggaggggacatccagatggtccaacaaaataacaaaaaccggctcaagaaacaaaaaggaagttctatgtcatgttgaatggcttcaggcacagctggatccaggtgtcattacaaatctctctccatctctcagctcttgtttatgtcactgtctctgatgaactcttttttttgtctgtttgttttgagacggagtttcactcttgttgcccaggctgcagtgcaatggcgtgatctcggctcaccgcaacctctgcctcccgggttttcaagcaattttcctgcctcagcctcccgagtagctggaattacaggcatccgtcaccatgtccggttaattttgtatttttagtagagatggggtttctccatgttggtcacgctggtctcgaactcccagtctcaggtgatctgcccgcctcaacctcccaaagtgctgggattataggcgtgagccaccgtgcccggccactggtgaactcttacattgtggcatctggaaactctgggctgacattccagcagcccttgtgttcctgtcctttctcttaatagtctctgtgtcagcccctgcatcccacttttttaagtttccaccaatgggaagagtcttattcaggtgctctctgatcccaagctcaaaaaccccaagccaactggaaagttctacaaacaatgcccagggccgggcccggtggcttacacctgtaatcccagcattttgggaggcggatcacttgaggtcaggaattcaagacaagcctggccaacatggccaaaccccatctctactaaaaatacaaaaactagccaggtgtggtggctcacgcctgtagtcccagctacttgggaggctgaggcaggagaagcttgaacccgggaagcggaggttgcagtgagccgagatcgtgtcattgcactccagcctgggccacagagcgagactccgtctcaaaaaaaaaaagaaagaaaaacagtgcccagactgtggtgtccaaaacctatttccggctcccaccctgagtccttaaccagggatagggatgggttagcacccgcagtccccagagagctgcaggcttggggtgtactgaggggctgaccccaggaggacaggccaggctgggcagaagaacccacggtgtccattccttatcacgaggcctgcaagtgacgctggcgcccgagagacaaatcacgcccagtgccccgtctaggctatggcctttccgttcatgctgtaaaggtgcctgtgggtcaggcagtccaggagggcttcctgagggaggcaactcttgaatatgggggaaaaggcacaaaagtgcaatggcggtgtctgggaatatgcccctcttccttctgcccacaccggcccggtgtgcaggggggaggctggaagctgggagctgagtgagcatgtacggtgctgcgccgggttgtgggagagcagaggaagcagggactggagaaaggcgagcccaagcgagcctggtgcggtggaaagcaggaggcagaaagacctgcctgtcatcagctaagagcatccagagacgttcaccgagcaaggagccaggccaccctctgctgccggaatgaggaataacccaggctcgcaaacggaatcctgcaaagagatttccgacagggcctccaagcaacgggcaacgctgaggctcagggaagcactgccgctcgaccaaagtcctacagcgaatcaggaacaacgcctgacgcctccaaaagtgggctccaatcccagctcttcccctctgtgtgactctgagcaagacccttccccgctggacctcagtttccttcattgtaaataacgttctggcacatactaggcgcacaaaatcactggcaggtagccccgcggagcccagaagcacaatcggccgccagaccacgtggccagaaagcaccgccctaacgccgcccactccggaccacttctccgcggtcgtccaaccctcgccggaagttactgtaagtggcttccgggtctgcgcgcacagtggcggatgatgtttttttttcctccccccccccccgccctccccgcgcgcgtgcgcgccgcggccgcgcctgcgcagtgtagccgggtcagctggacagggtcatcctgagggtgcgactccgccgcgatggtgacccggttcctgggcccacgctaccgggagctggtcaagaactggtgaggacgccgacccgcggccccatccgcgctcccgcctcggcccagccccgcgccgctgcgttccgtatttgtgcgcgtttccgggggccgggccgggccgggcccaggtcccttgttgttcccggtgacagagggggaaactgaggccgagaggcggagcggcgcgtcccggcgtgaacgggacgtgacggacccaaggccaaaccccagcatgcccggctccgcggctaggccgctccaagcctcagtttccccatctctaccgggggatccgaatggtgaccccctggacggaagcgcccagaaggtgccgagtcccgatccccagcccagcactcgcggcatcttcggcctttgccactattttggtttttatgatttttaacaaggagcgtgaaagcttcagctgcgcctgagcccacgtgggcagcgggacggcataggggtggcccccatagaagccgggctgggggtggcctccgtagggttgtctggtgtttccacgtggggtgctaagaagcaaggcctggctgggtgcggtggctcccgcctgtgatcccagcgctttgtgaggccgaggcaggtggatcacctgaggtcaggagttcgagaccagcctggccaacgtggtgaaacccgcgtctctactaaaaatgcaaaaattagccaggcgtggtggcgggtgcctctaatcccagctactcgggaggctgaggaaggagaatcgcttgaacccgggaggaggaggttgcagtgagctgagattgcgccattgcactccagcctgggtgacagaatgagactgtgtcccaaaaagagaaaagaaaaaaaaagcagcaaggtcttagccgggtgcagtggctccggcctgtgatcccagtgctttgggaggcccaggcaggagaatcacttgagcctgggagttcaagaccatcctggacaacacaatgaaaccccatctcta

SEQ ID NO: 7863 - DNA, 6000 bp, Homo sapiens
gggatctacgccctggactgcgagatggtgaggctgttctctgcccagcgtcgggttcaggattggggaggacctggcctggtgcggccgccccatctggccccatctgggcctggctcaccggccagcgctcagggtttctctcgcagcaccggtgcctgtggctcctgccctggaccaacaccccatacttcccagcagagccaagcacaccgggcactgggccccggctctgcctctgaatgggaggcaggagggctttgcgaaagggggttactgaggtcacaccccactcggcctctcctagaagtcccacagagtctctggtcactgcctctgcctggaggggctctggagactcaaaggggcagggaaggggagggagggaggccggtgcctgggacacatctgaggtgcatcccttgcccgcagtcctacaccacatatggcctggagctgacgcgcgtcacggtggtcgacacggacgtgcacgtggtttatgacaccttcgtgaagcctgacaacgagatcgtggactacaacaccaggtgtggccagtgccctccacgagctgggagccctcccagccgcctctccccagggacccaccctcccccgccccaccagccagtgcttccaggctgagccctggtgcccctcctgcccgttcccccaggttttcgggggtgacggaggctgaccttgccgacacaagtgtcacgctgcgtgacgtccaggccgttctgctgagcatgttcagcgctgacaccatcctcatcggacacagcctggagagcgacctcctggccctgaaggtgccctgccggcccgggtcccgcgcggttctccagcaggacctgcgcaggccccacgtgcgctgatctctgccgctgcccacaggtcatccacagcaccgtggtggacacgtctgtgctcttcccccaccgcctgggcctcccctacaagcggtccctgcggaacctcatggccgactacctcagacagatcatccaggacaatggtgagtgccggtgcctgccctggggccgtccctgcgcaggggccgggtgctcaccgcatctgccccgcagtggatgggcacagctccagcgaggacgccggcgcctgcatgcacctggtgatctggaaggttcgagaagacgccaagaccaagcgatgacgcctgcccgcctcccacccgcctctcctgccgtcccgctggtccttagccccatgcctcttccaaaacagtgcaataaatctccggtaacccgtccacctggccgaggcagcccagagcagcgggatgagctggcggccagagaacgcccagcccagcccacccccgctcacgtcctgccgcacccctccgccggtccccaccctctgccccccagccctctggcgtctctagaaactgctgctgatggagaccaggacagagcccgcccccacccggcccgcagcccctcctgcccctcctgccaggccctccctcccgggtggtggccggcacctctgctcctcacgtgggtcgcggggcgggcttgtcccaggtttgtttgagacagtctttttttattttgtattgttatttttattatttttaatttaaacctgatgacttgcacagcatctttcccaccgggaagagcgggcctgctgccttccctcctgcggggtgggggtgggacagaccccagtgggggccagggccacactcagcgcagtgtgggctggacccgcctctgtgctccaggggctggccggtcttcgggggcgccggcttccaccactcgccgccccacccctgcactccgtgacctctgagaacccagctggcccctcgttagccccagggtctgccgtctagagggagcccaccggcctccggacactgtcttcccgctagagccccgtcctcctctgcggggctctccggacccccttccccctcacctccaggcagggacagaataaatgtttgtatggattttagattttgtggtggtcttggtcttggtgcctggtgaggcctctgcatgtgccccggggaggccactgtccctgcagccgggactgattctcttcccatcaacgcagagaaaacagagcagtgaaactttccctcacaaaagctggcccagggctggctcccccagggctgggccacacctgctgtggggtcccagttccagccccagatcatgggccaccatcctgcagcttctagtgcctctcggacagtgggtggtgtccccagccctgtgtggagctgggccctgtgcacagagctggcttccctctctgccctgcccagagatagggactgcacacagatggtgagagggggttaaagagactgggagctgctgtgtgttgcccgtcaaaggatggagtgcagacacggaaagctgctccggcccttgccaggaaacgccacacattgtgtagtgcacgcacgtctcgggcaactgtggttgcatcgggaccccatttggaaatgggaggcccaggggtgtttaggccccactttttattgacctcaagtagaaaaagtgatgagccttgcgggacaggacccagcagctgggggcaggttgcctggagtgggtttcctgccaccctggtcttgggcttctgctgaagggcaaggccaagggcacaggtcccgggatgaggacgtgggggccctccccagaggactccatcccaaggctcccttcccggttctgggctctgcatctctccagggccctcctgggggaccgtggttaggccaggcccttccaccctcgagggctgttcttgtgactagtgactctcccacctcttctgtaaaggagttgttttctttttcttctttatttttgagacacagtctcgctttgtcacccagtctcagctggctgcaacctctgtctgccgagtagctgggattatggctgtgccatcacacctggctaatttcgtatttttagtagagatggggtttcaccacgttggccaagctggtctcgaactcctgacctcaagtgatccacctgcctcggcctcccaaagcgttgggattacaggcatgagccactgtgcccggctctgtgttctaaataaatggcgcaggcgtgtatgcgctctgtttctgtgcattcccatgtgatgtctgcctcccccttcccagaacgcacctggtgcctcaggacatagcccacggggggtcccaaggctggccagccctggcttcagcccccagggactcccttcagcttgtgaagccacctgttgccactggaggcttcagggcctttgcacaagtgccctgggcaagctcctgcccccagatagtgccccctgcgaaggctggggtgggggaatctggtcctcacagctgcacccaaccaggtctcttctaaagtttattagaacagtgtgttcaaactcccagccccggctttttttcgtaaccactgagcaagcaagcaagcacaggggaagtgttgaaggaatgaaaggagagaagtcaaacacagtggcctgcctgcctgcttgtggtcccagctactctggaggctgaggcaggaggatcgcttgagcccaggaggtggaggctgcagtgagctctgatcgcaccactgcactccagcccgggtgacacagtgagactctgtctccaaaaaaagagaggttccctggcagcctccagggccaagcaggcttccaatttgggcttccaaagaaagagggtttgtgatcaccgagagccctcaggtggttgccgctttgatgggggaggtggcttccctatccccctccacccatgtttgcctctccctttgggccctcaccccaggtagcctcactcttgggggcatttcatcttcagcagcccctccgcacacactttctgaccctggctccaggccctatcgctggcctggacccgccctagcctcgtcgctgaactcacccctgccacttcttcagtaaggatccctgagcccctgccacctgctggaaagaaccctgcgggcttcctcttggccttagggtggtctcaatggctataaccgcctctccccagcctggtgctcagccctgcatctgcgcctaggaggcgctcgttgaacgtgtatgggatgaatgaacgaacccaggacacggatcagacatgacttacataaccgccgttacctgtggtccttcctcctgcactctgccacgctggccgcaccagcctcagccccgtcaggtctgcaaggcccattccgacctgacccaggcccacctttccaagaacccttccaaccccgccctgcggtgcaggttctttctgctccctgaccaagcccggcccggccctgccctgacaccctcttccctttcaggctccgcccctgcactggcactgctccctaaggccctcccaaggccctgccttctgtcctggacccaccctgagcgccctcctaccctgaccctgctctgcgcggccccgccttcctcctttgtaacggctccggatcccagccccgcccctaccataacactgctccgcaaggccatgctcaaccccgcttcccgctctggccaagcccctgagtcctggccccgcccctactctgactttgctcagcgagaccccgctcgtcctcgccttccttctagtcccttccccaaagtcccggcccctccccagacccaggcactgctcccgagcgtcttctatcccggcctgttctgcgaggctctgcgaggccccgcccttcggccgtgaccgcgtccctgaggcctggcccccatcctgctcggccgtgctccgctcggccccaccctcgaggccccgccccttcttcgccttggccccacccaccccctccaggccccgcccccggcccccttccggggtccgaactggctccaccttcgccttggccgggccccgaggccccgccccgagatcccgccccccgtttcaggaccgttggcaccgggctaacggttccaccacgtccgccgccctggacgcccgcggcctgcccccccctgcctctcctgcgccggtgagcggcgggtgctcccactgctgtgcgtccccgggagcccgcgcaccctctctgggctccacccaggctgagagctggggtcgtggcggcgggggtggagagcgcgcccctagaggttcgcgcggtcggggccccggggcgggtgcagacagccctggactctggagccctgtccagggcggtcctgtgcccctgcggctgcgggaagacggggtggggggcttccgagtaatggggcatcccagttagtgagggggcaggaagccagcgctgtgtccgtgtctctttctgcccccagatacacttcgagtggattctggccatttgagcattctctccaactctccaatccccagtctgcccccacgggggtctcccccacctctcccccgtcccacagcctaaacccctcttcgccctgaacctcccttttcctcatgcggtgaatgggcactggccccgctcagactcccaggagcaccagagctggccctgagccaagccctgccccaccaggacctggggacacgggtgactcagacgtgactcaggaaggctcaggtcctgctggcatccgcggaggtgagacggtgatcagagctgggatgggagactccccaggcagaggggcacctgagaggaggcacaaggcccagcctggccgggctaggaagtatgaatggagaccagaagggtgaggacgggtgcatcgggtggccggaacacaggggcaggggcttggcggggagggcactgctagagagctggcaggtggggggccagttgctggcgtctaggggtggtttgcccatcctcatagggggccaaaccagggcccccggtgcagggctagagccagacccacattcctgaacctgctagtggagaagattccaggatcttctgacgatgtccgtctgcctccatcgcccccatc

SEQ ID NO: 7864 - DNA, 6000 bp, Homo sapiens
gctgagggtcaggtgtgtgccgtgtcttccaggatcagtctctggggaactggagaatcaagaggcaggtcttggagggggaggagatcgcctacaagttcacgcccaagtacatcctgcgcgccggccagatggtcacggtaggtggtggggcaggagggcgagggtggccacggatggggtgtgaggtggggtcaggggactggaggcacaggacttggcgggggtgggtggggatgatggtggcaccaggcaccgtctcagagcggctgccgcagtcatagaacctccatgtgctggtgtcaccccactgggcctccctggagcctgagtggtgtgccctgggtctgagtccaggctgctggggctggcaggcgtccccgtgaagtgttaacagtcaggcgcatgggccatggagcctggtgggtgtcagatcccagttcagcccctgcttgccaagagcccttggcctctgtgaaccctggtctcttcttgtgtatcctggggaccatcaccctggataagcctgcgtcgggctggaaggactgaacgcccagggcattgaagggggctttgtggtaggggccactggctggcccacgtccctggaaccagaggtgaccctgatggggccattgttattgggtcctcaggtgtgggcagctggtgcgggggtggcccacagccccccctcgacgctggtgtggaagggccagagcagctggggcacgggcgagagcttccgcaccgtcctggttaacgcggatggcgaggtgggtgtgtgtggcttggggggtgctcggctggagtcctgggcagggtctgggcaccctcggggccgccacagcagctctgggcccgatcccgggacatgccgccgtgtcctgtcccgcacaggaagtggccatgaggactgtgaagaagtcctcggtgatgcgtgagaatgagaatggggaggaagaggaggaggaagccgagtttggcgaggaggatcttttccaccaacaggtaggacccctgtgcccacttgcggctggggggcagcctctggggcagagtgagctcgtgcacacacatacacatgcgtgctggccgcatccccgacgggagctccatctggctgccgtggctcagggtgaagccagccttggctgttaccagcacggcagagacctgttcttgcctcctgggtcgtgcccatcgtgtgaatttgcgacatcacagacctcagggtagctggccagggggtcccctgagaggtgggtgttgaacagctccccaaatgctctctggtcaaccggcttcctcagtcgaagacacaggtcccttcaatactggcttctggggagaagatgagtgcagaaaccacagctgcattaaacgcgtgcgtcgcaagttcctgtgactgttttggaacccagaacagaatgtgtagctcacaggcgggctcatggggacatggaagtggaatggaaggctctagaaatagacactgttgttgctcagcccctccctggtggggaggtgggggcagccatctacctgccggctgcctccaggctggccctgatcatggccgaccttccttccttccttcctgcagggggacccgaggaccacctcaagaggctgctacgtgatgtgaacccacactcctcatccacacacctttctttacccagagccactgaaaactatttttatatcattggctttctttagttcttgatacatttctagagaatttctaagcgaactgccagaacgtgtgggtgggtctcccccagccctccctcctggcgggtctcctccagcctcacttcgctgccacttcgccgctgccccggagacttttcaatcccaccccactcctcatctcaccatttggtcaaattggaagcccagggccaggacccggaggtttagaagatgcttgggcttggagggaggagggccggcgaggctagcgaggggacaggagacggccctgctgcggacggagcgcggaaactgcgtaggaattcagtggtggtgggtttttttaaggctttctacaaaaccaaattcagaatccaggcgtcgacctggtggggcccggggccaagcctgcattctggctgcccagcttcggacagcgggaactcctcaggcagccacgcagcgggtgtgggccagcatggggatggcgtggcccccagggcgggttttcactccgctgcctgggcttccagattcccgttctggcagcgcaccggccgggtttctcggaccgttgactttatttgggggagttttcccgcagttcagttcctgactgtgcaaggccaacagggcaggggaggggaagacctggggaaggaagaatgaggacagtcccgtcgtaagacctgtcacaacaataagcagggaggggagatgtggaggggacacatctggttgccttggaggcagaagctgtgagtttcagaacagctgtctgcagggaacgccaccatgttgaccctctggaggagagcgctgtggagcccctcccgtgttccagctccgtctgccctgtgcctatatatacacatgcgtctatccatactgtgcttttatctgtgattttctcgctgaaaccatgtttctcagacaggccaaggccacctgactcctatcacgacgcacccaagcccctcagtccagcttcccaatgcctggcaccccccttcggcaatagctcaccgtttacaccctccctcatagatacacagaagttatttttttaatggatatttatttttttacattggtcagtacacaggtcaggagctcacgccagggccttgaggacaggctgaccctcctccccggggtggcgtggggctggggcaccctccgacggcagagcctccttcagaaagtgcagctcaagtcttaaagacaccaaaactgagccatgggcacgcgccgtctccgggccatggcgttcactgcagggcgggggcggcaccgctcccctgtgactgcatcccgcctccctggggacctgcctgtggcaggaaggaatggggggccccagccccaggccgggaaggagccagcggccgacaaagcagaaacacccgctgctccacgtagcccctgctcgctgtccttgctctcagaagtcccggtcccatgtagatagaggggggcgcatcttaccaaagcatttcctcctggaggctacgccgctgtgctcccagtcaggcggctggtagggagctttgcctgccccggggataccctctgccagccgctggaagtgggaatgctggcgacagactgtgtcctctttcccaccttcatagcaggaatcacccggacccgactggctgggcttcgtgctagcgagggttctgggggtgggtcttggtgatcttgtcctatggggagtctgcagtggtctcagccacatcctatgtattttggctctggaggagcaaagctgtatcctggagttggtctgtgatttgccgacagccttgcaggctgggctcagggacaaagtcccccccaaaacccgcaggtcctcatgtccagacgctgcccagtcctgtcctgaaaacagcacgccccaggcccacagaaccccccaccctacatttgccttgggtggagctgggggtggtcctaggactgcgggtgcccttagctgaagggggtggggagaagcgtggactgggcagcctgtgggtaattggaggttcattgagaattgagtctttggaaacactaagaaaatcaaatttttaaaagttatttatggcctgggaaacaatttgcatttgtccccaaatacgcttagctgtgtgccgcttagaacgatgcgaaaccatccctctgtgtaagcccgtgccgtgtgactcgaagcctagcgccctccctgcgaagcatcagacgccacccagccctggggggaggcccacgcctgctggaccaacgcgggttctggggtgcacagcgccaggttaacgctgaagcctgccccgctgagcccaggagccgggaggcctgcgggctgacccagaatccgatcatgcacctgtcctcatgccagcggctttggctggggttggtctgaagcctgcacgcggcagttctttgttaaagatctgagggactcctcagtcctggggcgtcgccgcctgcagcctcttccaagccctgcgtccagcgagcgtcacagcacaacctgcaaaaacggagctgggctgcagctggggctggcatggactttcatttcagagattcggtttttaagaagatgcatgcctaatgtgttcttttttttttccaatgatttgtaatatacattttatgactggaaacttttttgtacaacactccaataaacattttgattttaggttctgcctctgagtttattcctgaggggaagctcgagccggggcctctgccctaatgaagcggatgtctaagaaagatccctccacccccaaggaaaaaggtcactggctagtgtagctagtgtaaacaggacccaggcgatgcatgggaccctgcccttttttttctagtgagcctccgacgctgttgcacaagctgactcttcgtcacgtgatgcgaccgggctccgccccggcggcaacacgctgtatagacgcgccgggtgcctcgtgcgcatgcgcggcaggcccttcgggacgagctggaggcagagcgtgagtacaaagtgatcggcctcggccgcacgtagtagcccccctactccccggccaagtcagggcctccctcttcccgcggagtcgcaaccacgggtagctcgtgtaggtaacggcaggtccaggcctccgcatgagcggagggccccccgcgcgaccttgaatggcccgggcgcgcgcggtcgtgtgggagttgtagtcctccgtccccgtccgcgcggactccgtttcccgtggtgccccgggcggcccgcttccggcgcagttagttacgagtcggcgcacgcggcctcggtccggttgactttgcggagccatggagggcggcttcggctccgatttcgggggctccggcagcgggaagctggacccagggctcataatggagcaggtgaaagtgcagatcgccgtggccaacgcgcaggagctgctgcaggtgcggggctggccggggacgggcgctgggggcgacagggccacccctgggggccgacgtcgcggctaaagcctcgcgtgtctccacagaggatgacggacaagtgtttccggaagtgtatagggaaacctgggggctccctggacaactccgagcaggtgagacccgcggaggttcggggcaagggtcgcgagggcctagattcgaggggggaggtgtctgcgcgtgcgcagactaacggggaggtgcgacggagtggtcactgcacgtgcgtagtctgcagcccgggcgtcctggagccggggtcagggcggtccccggggccgcgaagtcccgagctgagccgtgcgcccctccgctcccgcagaagtgcatcgccatgtgcatggaccgctacatggacgcctggaacaccgtgtctcgcgcctacaactcgcggctgcagcgggaacgagccaacatgtgaccggcgagcgcgggccaccccaccctgttcatttccataaacgtgctttgagaggcggggtccgcatgtacgtactgcctgcccggggcttaggagggtggcaccggtgctgggacacacgggactgtgtcctcgccaccccccgccctgccccctgccagccagtgcagcttggatctcgggggtgtggggccctgtgccttcctgaagtgctggcagcccagtggcacctccttcaggcctttggggtattcccctagtgtgcccaagtcagcctcatattctgggcggacagcttgtctggacttcggagttgggggtggtcagacaccacaggagctgtcacctcctgcggatgggcaaataaattggtggaggacggagagaaacct

SEQ ID NO: 7865 - DNA, 6000 bp, Homo sapiens
ggcgggtggatcacctgaggtcaggagttcaagaccagcctggccaatatggtgaaaccttatccctactaaaaatacaaaaattggccgggggcagtggctcatgcctgtaatcccagcactttgggaggcctaggcgggcggatcacgaggtcaggagattgagaccatcctggctaacatggtgaaaccctctctctactaaaaaatacaacaaaaattagccgggtgctaatttttggtggtgggcacctgtagtcccagctactcggtaggctgaggcaggagaatggcgagaacccgggaggcggagctttcagtgagccgagatcacaccactgcactccagcctgggcaacagagtgagaccctgtctcaaaaaaaaaaaaaaaaaagtgtaaagaaatagaattaaatattattctgataaaacacaagatgaaagacacaccatgtcatacccattaggatgggtatgtcaaaaaactggaaggtggccgggcatggtggctcacacctgtaatcctcacactttgggaggccacggcgggtggatcacctgaggtcaggagttcgagaccagcctggccaacattgtgacaccccgtctgtactaaaaatacaaaaattagctgggcgtggtggcacgtggctgtggtgtcaggtacttgggaagttgaggcgggaggatcacttgaacccgggaggcagagattgcggtgaaccaagatcatgccactgcactccagcctgggtgacagagcgagactccatctcaaaaaaataataagaatgaaggaggctgggcatggaggctcacacctgtagtcccagcactttgggaggccgaggtgtgtggattgcatgaggtcaggagttcaagatcagccagaccaacatggtgaaaccccatgtatactaaaaatacaaaaaaaaaattagccgggcgtggtggcgtgcacctggagtcccagctacctgggaggctgagaaaggagaatcgcttgaacccaggaggcggaggttgcagtgagctgagatcgtgccactgcactccagcctgggagacagagcgatattgtctcaaaacaagaaaaaaaaaaaaaggggaaggaaaccctgacacaggtcacagtgtggatgcatcttgaggcaatcccgctcagtgagagagccagacacgcaaggacaaacactgtgtgacccactcctaggaagtccctagagtcatcaggttcactgagacagtaggatgggaggtgccaggggctggggaggggggtgaggagtgagtgtttcatggggacagaatttcagtttgggaagtcgagaaagttctggagatggtggtggtgatgggtgcacaattatgtggatgttcttaatgctagtgaactgtgtgtacttaaaaacagttaagggcccaccgggcaccgtggctcacaactgtaatcccagcactttgggaggccgaggcgggtggatcacctgaggtcaggagttcaagaccagcctggccaatatggtgaaaccttatccctactaaaaatacaaaaattggccgggggcagtggctcatgcctgtaatcccagcactttgggaggccgaggtgggtggatcacctgaggtcaggagttcaaaaccagcctggccaatatggtgaaaccttatccctactaaaaatacaaaaattagccgggtatggtggcgggcacttgtgatcccagctacttgggaggctgagacaggagaattgcttgaacccgggaagctgaggttgcagtgagccgagatcacgccattgcactccagcctgggcgacagagcaggactcttgtctccaaaaaaaaaaaaaaaaaaaaaaaagagcactcaccccttgggggtgctgtgaagattaaatgagttaatttaagtacttatgataatgcctggcacctagcaagtgctttatgtttgctaggtgtttttttgtcgttgttttaatttaaattaattttattttttttgagatagggtctcactcggtcgcccagactggagtacagtggaccaattataactcattgcattcttgaactcctgggctcaagcaatcatcctgcttcagcctcacaagtagctgggactacaggcacgtgccaccatgcctggttaattttttatgttctgtagagattatgggggcgtgtctcgctatgttgcccaggctggtctcaaactcctgagctcaagtgatcctcttgccttggcctcacaaagtgctttacaaaattaatacaaaaattaaccgggcgtggcagtgcacacctgtaatcccagcttttcaggaggctgagacacgagaattgcttgaacctgggaggtggaggttgcagtgagccgagatcataccactgcatcgcagcctgggtgacagagtgagactctgtccaccttcccctgcgtcccccacccccggcaaaaaaaaaagtcaggcttggtggtgcacacctatggtcctagctactcgggaggttgaggtaggaggattgcttgagcctggaagttcaaggctgcagtgagtggtgattgtgccaccgtactccagcctgggcaacagagccagaccctgtctcttaatgtttaaagaaatagtttctagaattaaatattattctgataaaacacaagatgaaagacacagcatgtcatacccattaggatggcgactgtcaaaaaaccaaaaggtggccgagcgtggtggctcacacctgtaatcctcgcactttgagagggcaaggcgagtggatcacctgaggtcaggagttcgagaccagcctggccaacatggtgaaaccccatctgtactaaaaatacaaaaattagctgggcgtggtggcacgtggctgtggtctcaggtacttgggaagttgaggcgggaggatcgcttgagcctgggaggcagagattgctgtgaaccaagatcatgccactgcactccagcctgggtgacagagcgagactccatctcaaaaaaataataagaatgaaggaggctgggcatggtggctcacacctgtaatcccagcagtttgggaggccgaggtgggtggatagcatgaggtcaggagttcaaaaccagtttgaccaacatggtgaaacgccatgtgtactaaaaatacaaaaaaatttagccgggcatggtggcatgcacctggagtcccagctacctgggaggctgagaagaatcgcttgaacccgggagggggaggttgcagtgagctgagatggcaccactgcactccagcctgggcgacagagcaagactctgtctcaaataataatactactaataatagttaaatgaaaatggttaagatgacagcttttatgttatatatattttagccatttttttttaaaggcacagggcagacagggctcttagttaggttctggggtagggggctagaaaggcccgtggcatgaggggagggtaggccgaagtggggtctgaggtcaggggccttgaatcccagggagaggctggggcctggactcaggggtccctgggagccacaggaggctgtagagcaggggaggagccagggaaggaaattctgaaggaaacagggccgtgccctgaacacacgtggaatccgggtgttcgctgagtcacaaatcctggaagctcagggtcgtgaagaggaagtccagccgcgctatgcgaggtcttcctgtttttggagggggcaggcaccccagggccgattgtcgcgaatcaccttcacctctgggggctcagaatccctgagccagaaggccagggcagggctgggggatacccctgctgctcagacaggaaaatgggctcggagcttgcccaatacttcccagaaggacgaggctgctgaacttctcattcggggctccgggacctggactgtacccctttctggtagggggtgctctgaactgggaccttcagcatggagggcgggggttcagagggtgaattccgctgctatgtcattacctggatgggagagtgtctccactccacacacctagaagtttctgcaaagttaccttgaatgggagtgggaagcagtcccccgtgagaggtagtgaggtgcctgtcatggaggtgtgcaagcggagaatgaaaaggctggatttgggaaggaggtcagatctaccagggtcacagaggcccttggcatggggaatattctgtgattctgtggttatgtagtactgtcattcccagcttgtggctttttttttttttttttggatggagtcttgctctgttgcccaggctggagtgcagtggtgcgatcttggctcactgcaacctccacctcctgggttcaagggattctcctgcctcagctctccagtagcagggattacgggcacaggccaccatacctggctaatttttgtatttttttgtagagacagggtttcgctatgttaggcaggccggtcttgaactcctgacctcagatgatcctcccatctcggcctcccaaaatgttgggattacaggcgtgagccaccacacacagccagcttgtggcttataaaattccaagagcctttgactctttttttttttagcctttgagtttaatatttttgtgttttaattctaagtatttttatgcatgtattttgcgattgcatttttaaatatatgttttaggatatttgtatctattattataataattattattagttttaaattaccgaatgcagttttgtttgaagtcgtttcctgggctttcacgcacacgtggccataaagttgttctgataattaaatcagtgctgtgtattattattattattgccattattgtttttattaattattatccccgtgaggaatttttctgggatttgaaggagcgtctgctgctctcgcccgccgtcttgtggccacgagcgggactgcaggccgctcacctcgccgccccttgcccgcaggcgtcacctcctcctgtcgcctggccctcgccatgcagaccccgcgagcgtcccctccccgcccggccctgctgcttctgctgctgctactggggggcgcccacggcctctttcctgaggagccgccgccgcttagcgtggcccccagggactgtgagtctgggggtgtctttgggcgggggtggagtcccgtgggagtatctgggttcccagttgggtctgctgcccccactgggggactcaagcagtccaggagccacccctagaaggggcatgacctcaggccaccctctcttcacccccagcccttgctcacacccctctccaccccctcactcagacctgaaccactatcccgtgtttgtgggcagcgggcccggacgcctgacccccgcagaaggtgctgacgacctcaacatccagcgagtcctgcgggtcaacaggacgctgttcattggggacaggtattgctggggacagcaaggaggcctgtgtgacgagcagaatgagcgagggggagagagagaggaggcgagggcagggaggggatggagcaggtcgtgcagggcctgttgggccattgggaggacttaggctttgacccggaggaaggtgggagccacggagggttttaggtaggggaaggactggacctgactcaggtgctcacacgcgcccgccctctggtggctgcttctgggagggggcgagaatggaatccaggggaccagggtggaggggactgggctgtccaggctggctatgattgaggctggaccaggtggaagctgtcgtggggagaagcaagtgtgagattacggggcttctagggatgggcttcccaggaaggagagagaccggacagatcaaatgctttggagaggatgaggaggatgcggaagtgaccactgggcttaactacacgaggtcaccaatgacgttgagcagggcggcttcctcggcaagggtgtgaggggagagagcctggtgggcgcctgggaggcgccgagtggggcacc

SEQ ID NO: 7866 - DNA, 6000 bp, Homo sapiens
catcctggttaacatggtgaaaccctgtctctactaaaaatacaaaaaattagccgggcttggtggcgggcgcctgtagtcccagctacttgggagcctaaggcaggagaatggtgtgaacccgggaggcagagcttgcagtgagcagagatccagccaccgcactccagtctgggtgacagagcgagactccgtctcaaaaaaaaaaaaaaaaaaaaaaaaaaaaaaaaagaaagaattaggagtcctagaattgggaggggatgcagagggaaggaaagaagagaaagagtagaaaatgtcaaaaacaaagacctgctgggcgcagtggctcatgcctgtaatcccagcactttgggaggcagaggtgggtggatcacctgaggtcaggagttcgagaccagcctggcccacatggcaaaaccctgtctgtactaaaaatacaaaaattagccgggtgtggtggcgcatacctgtaatcccagctactcaggaggctgaggcaggagaattgcttgaacctggaaagcggaggttgcagtgagctgagatcccaccgctgcactccagcctcacttccagacgaagtgagactctctcaaaaacaaaacaaaacaaaaaaaccccaaaacaaacagaaaccaaagaccttaaagacacataactcaaggttcaaaccctggggctggcaatttctggctgtgtgacctggggcaagttactctgcctctctgatccttagtttcctgatccagaaaacagaaatcacagttggtttaccttggcaggctgaggtgggcggatcactttaggtcaggagtttgagagcagcctggtcaacatggagaaacctcatctctactaaaaatacaaaaattagctgggtgtggtggcacgcgcctgtagtcccagctactcgggaggctgaggcaggagaatggcgtgaacccgggaggcggagctttcagtaagctgagatcgcgccactgcactccagcctgggtgacagagcaagactccgactcaaataataataataagaagaagtaaataaataaatagcgccacgtgctgtggctcacgcctgtaatcccaacactttgggaggcagaggcgggtggatctcgaggtcaggagttcaagatcagcctggccaacatggtgaaaccccatctctactaaaaattcaaaaaattagccaggcgtggtggtgggctcctgtaatcccagctacttgggaggctgaggcagagaattgctggaaaccgggaggcagaggttgcagtgagccgagatcgtacggctacactctagcctgggcgacagagcagaactccatctcgaaaataaataaataaataaataataaaagaaaatgggaatcaggctgctgaataatgtaatgaaatagcccagaaaacagcagctatctcatttttggttttgagacagggtcttgctctgctacccaggctgcagtgcagtggtgcaatcttggctcactgcaacctccacccctccagtctcaagcgatccttccacctcagcctgtggagaagctgggattacaggcatgcgtcaccatacccggttaattttgtatttttggtagagacaggattttgccatattggccaggctggtcttgaactcctgagctcaagtgatctgtccgccttggcttcccaaagtgctgggattaccggtgtgagccaccggccaacagtagctatttctttttttcttttcttttctttttttttttttttgaaacagagtttcactcttgttgcccaggctggagtgcaatggcacaatctggctcactgcaacatctgcctcccaggttcaagtgattctcctgcctcagcctcctgactagctgggattacaggcatgcgccaccgcacctggctaattttgtatttttagtagggacggggtttctccatgttggtcaggctggtctcaaactcccgacctcaggtgatccgcccacctcggcctcccaaagtgctgggattataggcgtgagccactgcgcccagccaacagtagctatttcttacctctcaccctagggctgtgggaggccaggcggggactcctgggcagatgttgccatcaagaagaaccaaaagcctgggagatgactctgtctcaaaaaaaaaaaacaacaaaaaacggtgtggggcaaaatcaccagggctcatcccctagaccagagctattttgttactcaaggccactaagaagttaagggttaacaggcaaatctcccactgaccttgaatcttggatgagtcacttcccctctctgagccatcccagccctcccctcctccctctctctcactcactgtactccagccactggggcctcctcactgttctaacaggcagggtgtggtcctgcctcagggcctttgcacggactgtgcctgctgcctggaatgctgttccccctaactggacatggttccctcctggcctctctctcttctcttcttggatgtcactcagaaaggcctcctctgacctccctactaaaaactgcggccccaccgggtgtggtggctcatgcctataacccagcaccttgagaggccagggctggtggatcacatgaggtcaggagttcgagaccagcctggccaacatggtgaagccccgtctctactaaaaaaaaaaaaaatacaaaaattggccaggcatggtggcacaggcctgtaatcccagccacttgggaggtcgaggaacaagaatttcttgaacctgggaggcggaggttgcagtgagccgagatcgtgccactgcactccagcctgggtgacagagtgagactctttgacaaaaaacaagaacaaaatccccgcatcccccacattcatctcgtcctttgctgtcctaccacgtgacacattgtaaagttctctcacttatgttgttccttgttcgtctctcccactgggtagtgtgtgtcaccagggctggaattcttatctgtttagctcaccgctgtccccagcgcaaggactcaataaatatggttgaatgagtgaatgagaaggaaaaagcctgttacaaatgtcatggaatggggtctcagattcacttgagaatctcactagctgcctgaagttacttaaatttaaacattcaggccaagcgcggtagctcacacctgtaatcccagcactttaggaggccgaggcaggtggatcacttgaggccaggagttcgagaccagcctggccaatatggttagtcctcgtctctactaaaaatacaaaaattagctgggtgtggtggcgcgcgcctgtaatcccagctacttgggaggctgaggcaggagaaccgcttgaacccgggaggtggaggttgtagtgagtcgagatcgcgccattgcactccagcctgggagacagagcgagactctgcctcaaaaaaaaaaaaaaaatttaaacattcagcttctcactgtgcattagccacgtggtgcttttggctacaatgttggatggcacacaattctagaattgcagaaagttctattggacagtgctagcatagaccctgtccccactcacccccccaaaaaaatgcagtcacagacacccaatttttcccatgttctttctaaagctaccagaagcttcattctattcaaataatttggcagaggtggcaaactggtggcccctgggctggacaaagccccagttgggtttcatttggtccaattgttccctaacaggcaggacatgtctacagcttgaacttcctgtggatctgtgactctccaggtgggtctcccatagggcactgctctcccctgcccctctaagcagggcatcactgccacctcctcagcagaaatattcacctcctccctggaccatctgagattgagaccttggtttatagaccaagaggataaataatttgggaggtggagaggggcggggtaaaatccaagtgggggcagcttcaggaaaaggttgatccagcagtcacagagcctggagcctgacccctccattgcccctggctgaccctctccaggcctcagtttccttctctgcaaaatagggatgattaaaaagacaatacagtgctgggaggatgaagtggtctgatgttgggcagatcaggccggaggctggacaagttcccgtggtggttcaagtcactcatatagctgggttgggccgggtgcggtggctcatacctgtgatcccagcaatttgggaggcccaagcgggcagatcacttgaggtcaggagttcaagaccaacatggtgaaaccccgtctctgctaaaaatacaaaaaattagccgggcgtggtggcacgtgtctgtaatcccagctactcaggaggctgaggcaggagaatcgcttgaatccaggaggtggaggctgcagtgagccaaggtcgcgtcactgcactccagccttagcgacagagcgagactgtgtctcaaaaaaaaaaaaaaagtgtgtgtgtgtgtgtgtgtgtgtgtgtgtacatatagctgagtcggagcccatggtggagggcgtggcccctgacgcgctggcgagggtcaccctgcaactctcccagggttctcgcagcctcagtttggccataggggaaatgggcgacctggggaatcccagcacctgtgcggcgcccccgatcgcactcacctcccagggccaacttcacagggtccccagctgcggagcgggggtcccgtggctgggacaggcgtggtccaagagtgctccctccccttcaggggcagggcgtggagtccttcccggacttcatgacttggcgaggggcggggcctagtggaggcggggcagggaggagaggggcgggcctggcgcgggcaatccctcaacctgattggtcccctcgcccgtcactccagtgcgcccccaacctaccacgcagtaaaagccacccccgcctcggcccggacggtttccaagctggttttgaagtcgcggcagctgttcctgggacgtccggttgaccgcggtgagtggcgggggcgtctcagttgagctggggggcggtgtccatggagtcctggggcaccccaggggccggaggggtcggggagggcctttctcggggtgggatttgctggactctgcggcctggggaggggtcttcagcccaggctggtcacccctccccccagaaaaatccaacttctgcaacgaagctcagactttgaaaccctcttctcacttcctgggacttttgaggggcgaaagagccccgtagaaggggtgatattgaagggggtgggctaaataccgccccccgcccaccaggttttctctaaattttgaacagtttgcttttggaaacgccatttgcaggcaagtttcctcctgcgggcagaatctccgccctcccttctggggttttcagagacaccccccgccaccgcaaagccccctcccctacagatggttttgccacgggtgggggtgggggttgccccagctcctggcgcccccaactgattctggggaggtcttgggcaaagcctgcccacttccctcgggtgggcgtggcgacgaggtggcttaaaagtaggaaggcctatccgttaactgctttggggttcttgtcccggctaggcctggcagtgggacctggggcccttggaattttggaagtccagtcttagcatgctctgaagttgctggatggctgggtctggcctggagctccccttctggagccagcggcaaggcaggtcactgacccccaggggtttcatagggtgttgacatctgccatggccacccttgcttaaaccagttccaggaagtcatggtggacagaggggacgggaggaagctgcctgagtcctaagtgggacttgagaatcggtcgaggccaggagtttgatgcctgcctacctggccccctgcccaggtgagctcaggctccaaaggaggtgaggagaagcacagatttaggcaatgat

SEQ ID NO: 7867 - DNA, 6000 bp, Homo sapiens
tgagctgtgattgtgccattgcactccagcctgggtaacagagtgaggccctgtcttggaaaaaaaaaaaaaagaattttataattttctgttcttgttgtatcgacttgtaggatcatcttttgtttctggctaggcaaccatagttttctcatttacagtgaccgcatttttttttttttctttagacggactttgtttcttattgcccaggctggagtgcaatggcgcgatctcggcttactgcaacctctgcccaccagtttcaagcgattcttctgccccagcctcccaagtagctgggattataggcacccgccaccacgcctggctaatttttttgtatttttagtagacacagggtttcgccatgttggccaggctggtctcgaagtcctggcctcaggtgatctgcccacctcggcctcccaaagtgctaggatgacagacgtgggccaccgcgcccagcctacagtgaccacacttaccagaaatccttttgtgagtctgcacctggtggcaggtggttgacatagtgtgattcatttcaccctccagacagccctaagggaccaatattatttattttttattttttatttttttgagacggactcttgctctgtcgcccaggcaggagtgcagtggtgtgatctcagttcactgcaagctccacctcccgggttcacgccattctcctgcctcagcctcccgagtagctgggactacaggcacctgccacctcgcccgctaattttttgtatttttagtagagatggggtttcaccatgttagctaggatggtctcgatctcctgacctcctgatccgcccgcctcggcctcccaaagtgctgggattataggcgtgagccaccacgcccggcagggaccacgattattattatccccatttacagacaggcaaactgaggcacagctagagtagggagacacgcaggaaacacacaaaccggccaaaatataaaatcattccaaatcatgataaataatctgatactgaagtaaagatgatcatgtggtcacctcagtgagatggtctgggagggtctcccagagactcgaagagcaaggaggaacaattggccttgagaaaagcaggaggaacagcatcctggtcagagggaacagacagtgcaaaggctctgtggcaggaccttacctggtgtgttggaggcacagcaaggaggcccgagtggcgggagcagagtgagcgagggtgacagagggcggggaagggggtaggttatgcagagcttggtgagctgtgggaagagcttaagcttttactctaaataagatatttcctatctcctcccagcactgttgactccaggaatttttgctctgttgcccaggctggagtgcagtggcgtgcttagagttcactgcagcctcaaactctcacatccaagcgatcctcctacctcaacctcccaggtagctgggatcacagatgtgtaccaccatgcccagctaacttctaaaactttttgtaaagacggggtctccctatgttgcccaggctagtcccaaatacctgggctcaagccatcctcccgcctcagcctcctaaagtgctgggccaaagtgcctggccaactccagggattttaaagactgttttgtttacttctgttgtccacagcacttcaaacaacctgggagcggggccggatgcatggcctgaacagatgggtttcccaagcacatgctggaatgtatttttttttttttttgagacaaagtctcactctgttgccaggctggagtgcagtggcgctcagctcacttacaacatctgcctcccgggtagaagcgattctcctgccttctgagtaactgggactacaggcacgcgccaccacgcccagctaatttctgtatttttagtagagatggggtttcaccatgttagccaggctggtctcaaactcctgagctcaggcaatccacctgccttggcttcccaaagtgctgggattacaggcgtgagccaccgcacctggccaacgtattttttgtttgagagggagtctcactctgttgcccagctggagtgcagtggtgtgatctcagctcactgcaacctctgcctcccaggttcaagcaattctcctgcctcagcctcatgagtagctgggactacaggcatgcaccatcacacctggctaatttttgtatttttagcagagacagggttttgccatgttggccaggctggtctcgaactcctgacctcaggtgatccacccgccctggcctctcaaagtgctgggattactggcatgagccaccgcgcccagctgctacaatgtattttaattctgtttttgatgtatttaatctgttttctttgactgctcacaaaatccctcagaggtactagtggttgtcccccttttctagatggggacagctaggcttacagtgttgcggccacttgtttgaggtcacctcccaaacaggtcactgggctggggttcgtgccatgatcagcccctccacgatcagccatctcattttactgtgtctccaccaattctccaaggcttcagcacccactgtgcgtgagaaaccacgctaagcatttgtgcacagaccaccccatttgatccttcaagatgggatcgtgttcccattgcttggatgagaaaactgaggccagattgtaaacggtcagatcagggtcaccccaccaggaagaaaaacaaagtaggctctgcaaacgtggctgctgcactggccgctgggaaactccaagcttaaattaggttccttgttaaattattcattatctcctctcttttctcctgtttatgacttccgccttatcgttttgttccccgggttaatgctttttgtttatctgcatctgtggcctggaatgaatgaatcaacaattttggaggaaaaaaaaaaccaattctaaagttgagttcctctgttgggcaccaggccttctccaaatatgtgccttgaggaaataaatgctttcgacatgatcaaaacacaaggactgatgtgcaatcttgcttggtggctgtgagccctccaacccccttacctttgtcaatatcccccttttatttacttccgctctgttttttttccttatttttgagagtctcactctgtcgcccaggctagagtgtgcagtggtgtgatattggttcactgcaacctccgcctcccgggttcaagagtttctcctgcctcagcctcccaactagctgagactacaggcacctgccaccacgctcggctaatttttgtatttttagtagagatggggtttcgccatgtcggccagcctggtctcgaactcctgacaagtgatctgcccaccttggcttcccaaagtgctgggattacaggcatgagtcaccgggcccggcctcttttctcttattattccatcttcaggcaccaatggcagccaggctgccacattatagcaattcatcatcacaccctccttaggagcaggggctaccttgccccattttacagatgagagctgagatccagaggcaaatccattctacagatggggaaagtgaggctccgggcctcacacagcaaatcagtgttttagctgggttccaactgtggctcgtcctgactccagggaagcaggggatggtaattaggtgagacctgtgtaaagtgcttactctataagaagtgctccatcatccattcattcatgtgttcaacctacaatagggatctctggagccacactgtagtgtaactagaataaaaacgggataatgggaccaggcgcggtggctcacgcctgtaatcccagcactttgggaggccgaggtggacggatcactgaggtcaggagttcaagaccagcctggccaacatggtgaaacactgtctctaacaaaaatacaaaaattagccaggcgtggtgacagcacgcctgtaattccagctactccggaggctgagacaggagaatagcttgaatccaggaggcggaggttacagtgagccgcgatcacgccactgcattccagcctgggcgacagagtgagactccgactcaaaaccaaacaaacaacaacaacaacaacaaaccgggataatgggatagagtggagtggggcgtggctggtagctgttgtcagggagggcttctcccaggcgctgcttatttgagcagaaattggaaagatgagaaggggaagttcttggatgctcaagttagaggaactgtaagaagctggctgaggcgggaggatcacccgagcccaactactcaggaggctgaggcgggaggatcacctgagcccaggagtttgaagctgcagtgagctatgatcataccactgtactgaggcccaggtggcagaccccatctctgaaaaagcaaagaaggagcagctggtttttctggatcattgacatggtgggggggaggggacagggtagtgggcgctaatgtgaaacggcgagctgcagagaggaggcgggattttattccaagggtactggggagccgtggcacagtttagggcagcgcacagaaagtgccatgccctttgcacccaggacgctggggctcccgcacggacagtagccccaggggcccttcccgccgccgccgcagccgccaccaccaccaccaccccagccgcccacgtgtcccgcgaagccccgcgccccacgtgctcccgcggccctttaaacaccccggagccacgtgaccgcgctgcgccgtcccattggccggggggcgtggcggccgcgcggctgcgcagtgacgcgcacgggccggccctgcccccgacccggcggcggcggcggcggcgctggcggaagggatgacgtcaccggctgggggggcgcgcgagcgggagctaggggagcgcgagccgcagtgagtgtcctcgcgccgcccgcccggcagcccggccggcgcgcgcacgccgcgagccgctggcgctcgggctccgctcggatcccatgcaacagccacgatgtgaagcggggcagagccgggggagcccagcccagccagcctccaggtaaagccaaaaaaaaaaataaaatcatggattagaggaaaaaaaaatgcaggcgctccaaggggggtctcggaggcagccgagtgggcagcgcgccggctttgtgccggggaagcctgcacggccattgtgctcggaggatgctcggctgcagccagttgcacgcccagccgctgcgccccggtagctgcgcccggacaatgccccgagggacagggccggggccgcgctgggggcgctcggcagggggtgctgggggggcttcgtccgcggcgtgggagggggctgggctggaagcgcccagagcgcggcattggaagctgcccagcgccgccggctgcaccaccccgggctgcgggcggggcagaggcgcggaggggggcgcgcgtgtgtgcggagccggtgccggccccggcggcgcccggcccgggtccccgggcgggtcctggaggcagggggcgctgtgccgggggatggggggcatgcgggcgccccggagcggagaggagccgggacgggtggctccaggcggggtggctccagggctgctgcgcccgccgccttccctctccgggtctccctcccctggagaccccctagtctacgccgtctcccctggaacactccgggccctgtcgttgccttatgggaggtcgcccctccggcactcgggcattgccccacccttctgcggcctcggcgcccccttccagcctccccacccaggggcgagcctcagcccccagccccaggggctctggcaggcagacgcgcacgcccagcaccccagtctcccctccgcgctgggggccccgtggggatcccgagagtggggaagccgcccctggaaccgccagccccgcgggttccgcacgccccgggagcccccgggggctgcggggggaggggaggtgacgtcataccgggggcggggcc

SEQ ID NO: 7868 - DNA, 6000 bp, Homo sapiens
aaacagtaaggtcaggtcgtttggatagaaaggctgcagggcacagtcttggctcttgtataagaattctgaccacacagcccagcacttcggctgtgtgtaaggaaaaagggttgggctaagtcagggagagctagtgtgggagcagtctctatagctgttttcaaggaacggaaagaggagtggggaaaggatttaggatctatgggatcagctagatttccctttgtgagtttatataatggttttgttaggatggcaaaaccaggtatccaaaggcaaaagtacccaaccatgcccaggaaggaaagagtttttgctttgtaggaggggttggggtttgagagatcagccggacatgatcggcagggagaacacgtgtgttttcatgaagaattatgctgaggtaggtaacggatgaggaagaaatcagggctttggagggggatacgcaatatccctttaagaatagatgttggaggagcaggagggtgtcctgttgggaagatttgcaggaggggctataaagtagaaggtcatcaaaatattgaataaggtgagaagcaaaggggtggaaagaaagtaaatcatgagaaagagcttggctgaagtaatgagggctgtctctgaagccttgtggcagtacagcccaggtaagctgctgggactgatgggtgtcagggtcagcccaggtaaaagcaaaaagaggctgggatgaggggtgcaggggaatggtgaaaaaagcatctttaagatcaagaactgaatagtgagttgtgtaggaaggtattgaggacaaaagagtgtacgggttggtccccacagggtggataggaaaaacaattttgttgataaggtgcagatcctgaactaacctgtaagacttgaccagtttttggacaggtaaaatgggggaattgtaaggagagtttataggctttagaagcccatgctgtagcaggcgagggataataggctttagttcccttaaagcctgttgtgggatgggatactggcattgagcggggtaagggtgattaggttttaatgggatagtaacgggcgtgtgattggttgccggggagggagtaggggtgtcccctccctgtgggtgaaggtgggagggatacaagaggaagacacgaaggacgctttggtttgggaagaagggcggcaatgagatgtggctatagtccaggaatggtcagggaagaagacaatttggttaaaatgtctcggcctaataacagaactgggcaggtggggataactaagaaagagtgcataaatgaatgttgtccaagttggcaccagagtgggggagttttaaggggttttgaatcttggctgtcaatacccacaacagttatgggggcaagggaaacaggcccttgaaagaaaggtaatgtgggctgggtgtggtatctcacgcctgtaatcccagcactttgggaggccgaggcgggcagatcacctgaggtcaggagttcgagaccagcctggccaacaaggtgaaaccccatctctactaaaaatacaaaaattagccgggtgtggtggcgggcatctgtaatcccagctactcgagaggctgaggcaggagaatcccttgaacccgggaggtggaggttgcagtgagccgagattgctccgttgcactccagcctgggtgacagagagagactctgtctcaaaaaaaaaagaaaggtaatgtggatgggtagctcccatatcaattaaacaggggatggccttaccctccactgtgagagttacccgaagctcggcgtccatgatggtccagggggcttccgaggcgaccaggcagcatcagtcttcagccgctaagctgagaagatctgaaaaggagtcagtcagagagcctggggccagagttccaggggctctgggagtggctgccaggctagttggacggtctgatttccagtggggtcctgcacagatgggacacggcttaggaggaatcccaggctgcgggcattccttggcccagtggccagatttccggcacttgaagcaagatcctggggcaggaggtcctggaggaatgcctggcagatgtggtttaggcgttttgaagttctcatgttctggagatgtggctggcgtttctctctcagcggaggcaagtaattacaactcagaaatacgttgccacttggctgtatcttttttattattgtataccttgaaggcaaggttaattaagtcctgttgtggggttcgagggctggaatctaatttttggagttttttctaatgttaggagcggattgagtgataaactgcatattgagaataagacggtcttctggtccctctgggtctagggtggtaaagcatctcagggttgttgccaaatgggccatgaactgggccgggtttttatatttgatggaaaagagcctaaatgctaactgatttgagagaggtcagctaaagaaaaaggagcattaaccttgcctatgccttcagctccagccacctctctaagaggaaattgttgggcaggtgggggagggctgtgtcacggaacgaaactgtaagccagaccgggtgtgaggaggggaggtgatagaaggattatagggtgggggagcggaggttgaggaagaattgggacctggctctgcctggcaaggagcagcctggggaggaggggagaggtcagatgggttcgtagaaaaggaggattcaaaggactcagagcttggggtgcagactgaaggaacagacaggagagaaagaagaaagatttgggacgagtcgcattgggagcagagactagggagggaccagtgtgtaaaagaatgcctggacgcggccgggcatggcggctcacacctgtaatcccagcactttgggaggccaaggtgggcggatcacaaggtcaggagatcgagaccatcctggctaacacagtgaaaccccgtctctactaaaaataaaaaaaattagctgggcatggtggcgggcgcctgtagtcccagctactcaggaggctgaggcaggagaatggcgtgaacccgggaggcggagcttgcagtgagccgagatcgcgccactgcactccagcctgggtgacagagcgagactccgtctcaaaaaaaaaaaaaagaatgcctggacgtcaggcacctcggaccatttgcccatgtttcaacaaaaatcatctaggtcttgtaaagtggagaaatcaaaagtgccgttttctggccatttggaaccgttgtcgagtttgtattggggcctagcagtattgcaaaataaggcagttaggtttttaggtcaggtgtgagttgaacaggttttaagttcttgagaacacaggctaagggagaagggggaatggagggcggaaggttgcccgtagaaaggtagagacacggagaagtggggctttggggggtgagcagccaaagcaggtgtccccgcaattgacttgccaccaagggaatgtgggtgatgagcaaggcaggcgtcccccgcggtgatcagacaccaatggaatgtgggtgaatgatcagggcaggcgtccctgcagtgattaaacaccaagggaagaccgtctttccaagtccgtgaccagcgccggagttttgggttcacggataaaatgtgtctcctttgtctctactacagaggaaaaataactggaattggaaggacagggagattgaagcgtagcgagagaggctggagaagagagtgaaaagactgcttaccccatttgaaattggtgagatgttccttcggctggttggtctgaggacctgaggttgcaggtggatctcctcacggagtgagggcgaggacaggagaccggtctcccaaaggagtcctcctgtcctgggtcttcggcaccaaatgtcacactcgcccgtgtgaagagagtctaccaaacaggcttcgtgtgagcaataaagctttttaatcacctgggtgcaggcgggctgagtccgaaaagagagttagcaaagggtggtgggattatcattagttcttataggtttgggataggcagtggagttaggagcaattttttgcgggcaggtggtagatcttacaaagtacattctcaagggtgaggagaatattacaaagtatcttcttaagggctggagggggagaatattacaaagtgccttcttaagggcagggaggaggatattacaaagcaccttctcaagggtgacgagggtatattgtacaaagtatgttcacaagggcgggggaatatcacaaagtacattattgcaagggggtggtgtattgtcacaaagtcaattgatcagttagggtgaggcaggaacaaatcgcaatggtggaatgtcatcagttaaggcaggaactggctattttcactttttttctggatcttcagttgcttcaggccatctggatgtacacgtgcaggtcacaggggagatggtggcttagcttgggctcagaggcctgaagaattgttcccttacaaaagtcatgtattgtctgattcacccacttgctccctgcactctccctgggtctggtatgcaataggtgcataagcaatgtttgttgattgactgactgaatgggtgggatggttaaaattctgctcacttctctccctttaccatctcccgagaaacccatggggcccccgtgggacccactttgagaatcaaagctttagaccagcgttttcactttatggatggaccagctgtgcacccaaagccaggcagccttcaggctacagatggagcccgggtcacgtcccgggcctccaagttcctgcacccttatccggtctcacaggcgagattaggacaccccggaaactggcttccagacaatatccctgctgcaggggagaacaccctaggtcacctggtgacaggtgtgtgctgcaatgtacacgtacttgttcctcctcttctctgttcccacttcctccccgccccaggaaacctgccatggcctcctggtgagctgtcctcatccactgctcgctgcctctccaggtaagttatcccattctaccttttccccccacccagaatgcctgggagacctcccaggaaaggcttcctggctccgtccctcctcccctcggcccccatcctatgggccctgattcatgatgtggctgggctggcacaaaatcccggtggagagtcaccaaactgtccatgacctggaatgtggccagcaccccctagtcacaggcaggggtctttctgggtgtggcatgcaccaccgttggggaggacatggaaggttctgggtgatttgccaaaccggaaggaaagagtgacgtttgtctctctctctggcagagctctggagtggagtcccctctgcaccccaaccccatcaacagcctccccccactcatcttttctggccttggattctctctggccctgccctgcctggggtggacttaagatgcattttttttttctttttctttgagacagaatcttggtctgttgcccaggctggagtgcagtgatgcaatcatggctcactgcagcctcagactcctgggctcgagtgaccctcctgcctcaggctctggagtagctgggactacaggtgtgtgccacctcacctggatactttttaatttttttttcttttgtagagatggggtctcactatgttgctcaggcaggacttttttttttttttttttttttttttttgagacagagtcttgctgtgtcgcccaggctggggtacagtggcatgatctcggcttattgcaacctctgcctccctcgttcaagcaattcttgtgcctcagcctcctgagtagctgggattaaggtgcctgccaccacacctggctaattttttatttttagtagagacaagatttcaccatgttgccaagggtggtctcaaactcttgacctcaggtgacctgcccacctcagcctccgcaagtactggcattacagccatgagccattgcacccggccaat

SEQ ID NO: 7869 - DNA, 6000 bp, Homo sapiens
ggacatcctctgtcaaagacatccttccacatcctttctcttctgcattccaggaaacttacctggctccttggacttctacactgccctgcaggagtgggcggggaaagggagtggctttgaggcacacagaagggcttggtgaggccaccagagtggggcctgtgcctagtgtgtcagaagagagcatctcaggacgggtgtgggggctcccgcctgtaatcccagcactttgggaggctgaggtgggctgatcacttgaggtcaggagttcgagaccagcctggccaacatggtgaatccccatctctagtaaaaatacaaaaattaggtgggcatggtggcgggtacttgtaatccctgctcctgaggctgagacaggtgaatctcttgaacccaggaggcagaggctacagtgagccaagatcatgccactgcacgccaacctgcactccagcctgggcaacagagcaaggctatctcaaaaaagaaaagagagcatctcaaaccacacatcaacatggtaacccctctgcttgaagcctccaatggctccctattgccctggtgctgaacaccccatggctgaccgtggcctggcctctgcgacagctctgcctcttctcccatggtgaagacccagcctgctgagactccccccagttcctccaacgtgcctggacctctgctccctcggggcctttgcataggttgttccctctacccagaatgcttttccctccccgttttgtttagaaggccacagttttaattgttagttcccttataaggctcgcgtattgtcggtgactcaccctccagctccttgcaggagtgcttggcctggcacttagtaagtgcttaggaaatatttgtggttctgtgttttttttgtgagacagagtcttgctctgttgcccaggctggagtgcagtggcttgatctcagctcactgcagcctttgcctcctgggttcaagtgattctcatgcctcagcctcctgagtacctgggattacaggcatgcaccaccatgcccggctaatttttttttttttttttttagtagacatggggtttcaccatgttgcccaggctggtcttgaactcctgacctcaggtgatccgcctgcctcggcctcccaaagtgctgggattacaggtgtgagccactgtgcctggccttcaggaaatatttgctgatgaactaagtgggaggtgggatctggtgggaaggaaggcgggaaggtggaaattctgctcacttccccattcccacctcccaaggaacccctggtgtccctatggaacccactttgggaaccagtggttcaggtcagccttttccctttgtgctcaaagccgcattgcattgaggccaccggtaggaccagggtcatgacctaggcctccaaatccctgcaccctttccaattctacagcagggattagaggagacacacaatttgctttcagaggatgtcccagctccaggacaggacacactgggtcacctgatggcaggtgcagtggttggacagagcctggcttcagctccaggtatacttcctccttcctgctgctacctggtctggcctcttccacgtcctgagaatccagctggtactctgtcctcagcctcctgggaggtgctctcatcctgggcatgctgcccccgccatccagggagagagtcttggggcacctttatccccaacccagaaatcacgggagacctcgtaggaaaggcgtcctggctccgtttgttcccacctcagcgccggtcctgtctgctgtgattcaggatgcagctggatgggcacagaatccccggagaagggtctgcaggctgtgcagtggcctggaatttggccagcaggccctagtcgcaggcaggggtctttctgggtgctgcatgtagtgggatggaggaggggatggaaggttctggctgattcgccaaaccaggaggaactgggcatgctttttttgggggggacggagtctcactctgtcacccaggttggagtacagtggcgccatcttggctcactgcaacctccacctccctgattcaagcaattctctggcctcagcttcctgagtagctgggattacaggtgcccaccaccatgcctggctaatttttttttttatttttagtaaagacggggtttcaccatgttggccaggctggtcttgaactcctgacctcaggtggtccacccgcctcagcctcccaaagtgctgggattacaggcatgagccactgtgtccagcccaggcattctttttctagaaaaaaatatcttgggttcaacttgggtgggacctcagccctgaccacccctgaattacccattttccccaatctacccttctttttttttttttttttttttttttttttaaaattgagatgtcgtctcgctctgttgcccaggctcctgtgcagtggtgtgatctcagctcactgcaacctccacctcccaagttcaagcaattctctgtccttggcctcccaaagtgctaggattacaggtgtgacccaccacacctggccccaatctacccttctatacctcgttaaaatatacttcactgtctcctaagaggggctgccatgaacccagggcccatgtaattccatcttaatatcaattactttataaaaattaacctgtgcctggctgggcgcagtggctcacacctgtaatcctagcactttgggaggccgaggcgggcggatcatgaggtcaggagatcaagagcatcctggctaacacggtgaaatcccgtctctactaaaatacaaaaaattagccgggccctgtagtcccagctactcgggaggctgaggcaggagaatggcgtgaacccaggaggcggagcttgcagtgagccaagatagtgccactgcactccagcctgggcaacagagcgagactccgtcttaaaaataaaaattaacctgtgcctgaggctctagagtccaatggtacaaagcagtaattggtcaaagttcaacctccctcccactctgggctcggactgtgccctgagggcttgtgttttgaatctctttccagaaccttggcatgagcttgggactgggtgtctggatcacttcatcacacccaggtcacctgctgcaaggttaagaccaacttggcccaacagagaaagctggcaaccctacatcattttaaaacagcttcatcggctgggcgtggtggcttatgcctgtaatcccagcactttgggaggccaaggcgggtggatcactttaggtcaggagttcgagaccagcctggctaacgtggtgaaaccccgtctctactaaaaatacaaaaattagctgggcattgtggtgtgtgtctgtaatcccagctacttgagaggctaaggcaggagaatcacttgaacgcagaggtggaggttgcagtgaactgagattgtgccactgcactccagcctgggcaacagagcaagactcagtctcaaaaataaataaacggtttcatcaggatgtaattcacataccatacagtgagccaacttaaggtgtacaagtaaataagtcaatggtttttggtgtgttacctttttttttttttgagacggagtctcactctgtcgcccaggctggagtgcagtggtgctatctcagctcactgcaagctccgcctcccgggttcacaccattctcctgcctcagcctctcaagtagctgggactacaggcgcccgccaccacgcctggctaatttctttttgtatttttagtagaggtggggtttcaccatgttagtcaggatggtctcaatctcctgacctggtgatccgcccgccttggcctcccaaagtgctgggattacaggtgtgagccaccgcgcccagccaccttatttttaaattgtaattccatatatccatacatatatgtataacataaacttcaccatttaggctttttttttttttttatgagagagagttttgctcttgttgctcactgcagcctctgcctcctgggttgaagtgagtcttctgcctcagcctcttgagtagctgggattacaggtgtgcaccaccatgcccagctaatttttatatttttagtagagacggggtttcaccatgttggccaggcttgtctcgaactcctgacctcaggtgatcctcccgcctcagcctcccaaagtgctgggatgacaggcgtgagccaccgcacctggcgcatttaggcatttttaagcatacaattcagtggcatcgcgtgcagtgttgtgcaaccatcactccagcatctttccaaaactttcatcaccccaaacagaaactctggacccgttaaacaaacattctcccctctccagcctccagtcacctctgttctacttcctgtctctgtggatcggctcgtcctggacatttcccagaaatgggatcacacactgtgtggcattttgtgtctggcttctgtcattgaatgtgatgtcctcagccttcatccacgctgtggcctgtgtgggagcctcgctccttttcttttttttgagacagagtcttgccctgttgcccaggctggagtgcagtggcgcaatcttggttcactataagctctgcctcccgggttcaagcaattctcctgcctcagcctcccaagtagctgggattacaggcatgtgccaccatgccggctcttttttttatatctttagtagagacaggttttctctttttttttgagacggagcctcactctgtcacccaggctggagtgcagtggcacaatctcggcccactgccagttccgcctcctgggttcacaccattctcctgcctcagcttcccaagtagctgggactactggcgcccaccaccatgcccagctaatttttttgtattttccatagagactgggtttcaccgtgttagccaggatggtcttgatctcctgacctcgtgatctacctgcctcggcctcccaaagtgctgggattacagacatgagccacctcgcccagccttttcatggctgagtgatattccattgtgtggatggatcacactaggtatatttgttcttctattgatggacatctgggtagtttctacctttgggctgtttgttctgttgtgagtcaggctgctgtgaccatgggtgtacaagtatctgtttgcgtccttttgttgttaattctttggggcttctacctaggagggagattgctggtgatgtgataagtatctctcaggcttttcaaggaagcaccaaactgttttctaccccgaatgtaatttacaatttcccagcaataggccaggcacagtggctcacggtgactccatctcaaaaaataataataattttaaaaagaaagaaagaaagaaaacttcccagcaaccacattaaaaaagaataccaggaaatttaatgtttttctttttctttttttttttttttttttttgagatggagtttagcttttgttgtccaagctggagtgcagtggcgcaatctcagctcactgcaacccccgcctcccgggttcaagcaattctgcctcagcctcccgagtagctgggattataggcatgtgccagcacctggctaattttttgtatttttagtagaaacagggtttcgccatgttagccaggctggcctcgaactcctgacctcaggtgatccacccaatattgctggtattacagacgtgaggcaccacatccggccaatttaattttaatgatatattttatttcacccaatacatccaaagcgttatttcaatatgtaattaatgtagaaaatcattaatgagctacttcacatcctttctttcatactaagaaataacaatcgtatggaaatttgacaccataagcacctctctttttaggcactaaattttgggtagcaatggtgacatggtttctaccaaaacaatactgttgtgtttggtgggaaaaaaaaatttatttaggccgggtgt

SEQ ID NO: 7870 - DNA, 6000 bp, Homo sapiens
caccactgcctcagggtcctccctggttatgaacagaatgtttctttgtttttattattattattatattttattttattattatttttttttgagacgaagtctagctctgtcgcccaggctggagtgcaatggtgcaatctcagctcactgcaacttccggctccagggttcaagcaattctcctgcctcagcctccctagtagctgggattacaggtgcccaccactatgcccggctagttttttgtatcttcagtagagatggggtttcaccatgctggccaggctggtctcgaactcctgaccacgtgatccacccgccatggcctctcaaagtgctgggattacaggcgtgagccaccacgcccagcctattattataatttctgagacagtctcgctctgttgcccaggctggagttcagtgcaacctctgcctcccaggttcaaactgtcctcctcaacctcccgagtagctgggtttacaggcatgcgccaccatgcctgactgatttttgtatttttagtagagacaaggttttgccatgttggccagactggtcttaaactcctgacctcaagtgatccacccgccttggcctcccaaagtactgggattacaggctgagccactgtacccagcctgaactgcatctttctgtctccccaaaattcatatgatgaagtcctaaccccaatgggaggtgtattagtccattctcacgatgctctaaggacatacctgatactgggtgatttataaagaggtgtaattgactcacatttccacatggctgggggtggcctcgggaaacttacaatcatgatggaaggaacctctttatagggcagcaggagagacagtgagagaccagcaaagggggaatcccttataaaaccatcagatctcccttattgattgagacggaatctagctctgtcatccaggctggagtgcagtggtgtgatctcggctcactgcaacctccgcctcccgagttcaagcaattctgcctcctcagcctccccagtagctgggactgcaggcgtgtgccaccatgcccagctaattttttttttttttttttttttttttagtagagacagggtttcaccatgttggccaggctggtctcaaattcttgacctcaggtgatctgaccgcttcggcctcccaaagtgctgagagtataggcgtgagccattgcgcccagccatcagatctcatgagaactcactcactatcatgagaatagcatgaaggggaaaccatcccccatgattcatttacctcccaccagttccttccacaccacgtgggcattatgggattacaattcaagctgacatttgggtggaaacacaaagtctaaccatagcagaagggtatttagagatggagctttttggaggtgattagggttagatgaggttgtcagggtgggggtctctatgatgggattagtgtgcttatatgaagagatacaaaagaactccctggctctctctgccctgtgaggacacagagagaagccagaaatctgcaagcccggaagagggccctcccataacctgaccatgctggcaccctgctctcggacgtccagcctccagaacgctgagaaacaaacctcttgtttaagccacttaatttatggcattttgtttttttgtttgtttgagacagagtctctctctgttgcccaggctggagtgcagtggcacaatttcggctcactgcaacttccgcctcctgggttcaagcgattctcgtgcctcaacctcccgagtagctgggactacaggcgtgtgccaccacacccagctaatttttttgtatttttagtagagacagggtttcgccatgttggccaggctggtctcgaactcctgacctcaggtgatctgcctgcctcagccttccaaagtgctgggattacaggcgtgagccaccacccagccagtttatggcattttcttatgagaaccctcatttcgtcccctcactcttcctgcagttcgttcctttccattatcttttcccacctattcttagtaggctcttcctctgggaagccttcactctgagatccctcagagccccatatgcccctccatcatggccgctggccaccaatgatgtaactgcccagtgacatgtctgtctctccactggactgtggatacccaatgggcaaggctaagtcttactgatgtgctccagtactcagcagaatgcctgacacacagtaggtgctcaatgaagacgaatgaatgagtgcctggcacagagcaggtgctcggtaaaaatgaatatgtccaattagctctgaagtaatagttcccacctgggacccagctcctcccacctccctgggtgcctgtctcatctctttcatcctcagctgtcagagggactcttcaacaatgctgatatgggccagcatggtggctcgtgcctataatcccagcacttcgggaggctgaggcaggaggatcacttgagcccaggagttcaaggccagcctaggcaacatagtctgaccccatttctaaaggatttttttttttaaatcagccaggtgtgctgtcgcacgcctgtaatcccagctacttgagaggctgaggagggagggtgagactgcagtgagtcgagatcgcaccactgcattccagcctgggcaacagagcaagaccctctctcaaaaataatagataggcatggtggcttagcctgtaatcccagcactttggaagggtgaggtgggaggactgcttgagcccaggagttcaagaccaaactgggcaacagggcaaaactgtctctacaaaaaaatacaaaaaataagccatgcgtggtggtggacgcctgtagtcccagctgcttgggagactgaggtgggagaatcacctgagctccggaggtcgaggtgcactccagcctgggcataggagtgaggccctgcctcaaaaataataaatttaggccgggtgcggtggctcacccctgtaatcccagcacttttaggaggctgaggcgggcggatcacctgaggtcaggagttagagaccagcctgcacaacgtgacgaaaaccagtctctactagaaatacaaaaaatcgaccgggcgtggtggcgggcgcctgtaatcccagctacacgggaggctgaggcaggagaatcgcttgaatctgggaggtggaggttgcagtgagctgagatcacgccactgcactccagcctaggcgacaagagcgaaactccgtctcaaaaaaataataataaattttaaaagttaaaatgctgatatgatcccctcctcccctgctgaagagcctgctatggctcccaatgcctacgctgggcggtctgtggtccctgcgtcgctcagcacctgtgggaaagtgggcctgtttgaagttagaggtccacacctgtgtcacttctcgcaactttacatactgattactaattcgagttttttggtgtttttatcaatccgatactcagtctagcgtctatacaagtgcacacggttccccctgcccttcctcgctttccagcctcggctctgcctccgcctaccgcctcggtgaagtccacctggccggccccgggcctcaccggtccttggcgcgacccagttcgtctagggcggcgcgcagctgctggtcgtggagggccaggcgctcggcttgggcgtgcaccgtgcgctccgccgcgtccagccgcgcctccagctccgctgcgcgccggtgcacggctgccaggtgtgcgtttgcctcccggatctgcagggccggcggcgccgacatggcccaggctgctgtacaggcccggccacgcccccaggcggcccggaactggcacaggccccgcccccgggagggccccgccccactagacctcggcgcgattggtcgctgaccccgctagaccccaccccagagggctgggtcgtgctctcctcaaacccaaacactaccaccggttccgggatcatgaaactccgcccctgagtttgggctcactctaggattggacaagatcttgacagccacgcccccaggctggccacatcctttggcggctcgcgcaactcaggctctggaaacaagattggtcacaccttcgatactgtcccctccctacttggaagctaacaccaggattggcccggactccgcgaaacagcaagcctgaccacgccccccgaacctgtggcctgtcaggggtagatccaggcacggcctcgccccttcatcccttatacagtctcagattggtcaagtcccttttaggttatgcctccaattctagccacgcccccaagtcaagcgcctgtgtacttcatccggcctagggcgtgggacagccgcggggtgaacagaggccacgtcccgctgagcttctcgtattgtcattggtcactttcccgataatccccgcccctgatcctgtccacggcccaaaacagtagcacgctgctcagactccagcttggtgactgaccacagggcatgaccactcgctatgcagattctgacactgggtgtggccacatccccgccatgccccgccccccagtcattgtttcgtcatgtcttgctcctatcaactggagtcccgcccgtcccagtctgagcccggcccctcccctagtagatagtccccgcctctagtagtccctaacctaggactccctgagctgggactagcgaaatctgtctgcactgatcgcagtcgtcctcagtttcaccctctaggaatcggcctggggatgcacgtgctactctcttcctccaggccggtccccggcgcgtgcgcgcgatccatgtccatgtccgcgcctatcaataaagttgctcacttgttgccggcccgctagcccgaaaggttgcgcgcgcagcccgagaagtctcgcgatagccagccgcggctgcccttgcgcttcccgagctggcggggtccgtggtgcgggatcgagattgcgggctatggcgccgaaggtttttcgtcagtactgggatatccccgatggcaccgattgccaccgcaaagcctacagcaccaccagtattgccagcgtcgctggtgagcgccggccgggccccgagggtggagggccgaggccgcagggaggtcgtggggttactgggggctgtttggatcgaacgggtctgggagtctcgcgggtacgcacgtggttgtcatcggggtgtcttgggcggtcgtagggggggatcttgtgtgaaatggatgttggtagggggtccagcagggttggggagcactgggaggtcgtgacatgcgacaagctagtccctggggtcatctgaggcggtcccaagctatcgccaggctcggggaaattgtggagtgagacagggctattatcaggtccaaggagctaagggaccacgagactttccaacggggtagagattgttagaggggatcatgagtcatgattggggcatctgagggcggtacagatgtttgagaaagttttggggtgggatgaggtctttctgtggtcagggggtgctgggtggttagggacacctgaagcttttactgggaccgccagagaggtcctaggtgaggtggatcaggagctactatgagggtagccttgcaggggaatgaaggggacccgcaagccctggcattctccttttttttttttttttttgagacagagccttgctctgtcgcccgggctggactgcagtggcgagatctcggctcactgcaaccttcacgtccctggttcgagcaattcccttgcctcagcctcccaagtagctgggattacgggctcacgccaccgcgcctggctaattattttgtatttttagtagagacggggtttcaccgtgttggccagactgatctggaactcctggtctcaggccatccgcccatctcgggctcccaaagtgctgggattacaggcgtgagccaccatgcccggccggccctggcattctctta

SEQ ID NO: 7871 - DNA, 6000 bp, Homo sapiens
attctcctgcctcagcctccagagtagctggtattacaggtgcgcaccaccacacccggctaatttttgtatttttagtagagaccaggtattcccgtgttggccaggctggtctcgaactcctgacctcaggtgatttgcctacctcagcctcccaaagtgctgggattacaggtgtgagccaccgtgcctggcctaattattattacttcttttttgtggaaataggatttcatcatgttgcccaggctcatctcgaactcgtggggtcaaggaattcgccagccttcagcctcccaacgtgctgggattacaggtgtgagccacatggtccttggtgttccttggtttatgatagactcatcactccactgcctgcctatcttcatactgtatgctcccttatgtgtgtctgtgtctctctgcccaaatttccatcctttttttcagatgcagtttcgctctgtttcccaggctggagtgcaatgacgtgatctcagctcactgcaacctccgcttcccgggttcaagtgatcctcctgcctcagcctccagaatagctgggattacaggtgcacaccaccacaactggctaatttttgcatttttagtagagacggggtttcactatgctggtcttgaactcctgacctcaagtgatccacccgcctcggcctcccaaagtgcaaattccaagtttgtttttttttttttttttggagtgcagtggcacgatctcggctcactgcaagctccgcctcccgggttcatgccattctcttgcctcagcctcccaagtagctgggactacaggcacccgccaccacagccagctaatttttttttttttttgtatttttagtagagatggggtttcaccatgttagccaggatgcctcccaaagtgctgggattataggcatgagccaccgcgcccggcctttttttttttctgagatggagtcttgctctgtcgcctaggctggagtgcactggcgcgatcttggctcactgcaagctccgcctcctgggttcatgccattctcctgcctcagcctcccaagtagctgggactacaggcacccgccaccatgcccagctaattttttgtatttttagtagagacggggtttcaccatgttagccaggatggtcttgaactcctgacctcgtgatccgcctgcctcagcctcccaaagtgttgggattacaggcgtgagccactgcgcctggccgattccatgtcttgtaaggacagcagtcatcggattagggcaaccccccccaatccagtgtaacctcattttaatttgattatatctacaaagaccgtatttccaaataaggtcacatttgcaggttactggggttagggcttgaacacatctttttgggggacaaagttcaacccacaatgagtaattcaaatttattgtggaaaaaatagaaaattcagggtgggtggggtagctcatatctgtaaacccagcactttgggaggtcggggtgggaggatcgcttgaggccaggagtttgagaccagcctgggcaacacagtgagaccccatttctacaaaaaatttttcaattagctgggcatgatggcatatacctgtagttccagctgctcaggaggctgagatgggaggatgacttgagctcaggagttcaaggtcacttgagcccaggagtttgagaccagcctggccaacatggtgaaaccccgtctctactaaaaatacaaaaattagccgggcatggtgtcacatgcctgtgatcccagctactcggaaggctgaggcaggacaatcacttgaacccaggaggtggaggttgcagtgagccaagattggtccattgcactccagcctgggtaacagagcaagactccatctcaaaaaataaaaaaataaaagattgggtgcagtggctcacgtctataatcctagcattttgggaggccgaggcgggtgaatcacctgaggtcaggagttcgagaccagcctggccaacatggcaaccccgtctctactagaagtacaaaaattagccggacgtggtggcgggcacctataatcccagctactcaggaggctgaggcaggagaattgcttgaacctgggtggcagaggttgcagtgagtcgagattgtgccactgcactccagcctgggcaacaagagcaaaactatgtctcaaagaaaaaaaaaaaaagacactgtcgctgccatcctggttattggttacatgctctctctctctctctccccctttctcataacatttgctctggaggaagccggtggtcatgccatgagcagccttatggagaggaccatgtggtaaggaactcagccaatagccatgtaactgagcttggaagaggatcttgctgtcctggccaacatctcactgcaattctatcagttgaattccctggatagtccaagctttgtggatccctccaccgaaacaactggatcccagtacctgaatcctgaatcttagactcttatacttcaaacactgatcacgggaacagccggctcagcggctcctgagttcctaatgctcagaatatgggtgagatgataaatgtttgttgtgttaagctgccaacctttggcgggggggtaattcgtcacatggcaacagctggctaatacatatatacctacatgtatatgattttgtcaggttttttgtttgtttgtttgtttggtttcggttttggtttttgaaacagggtttcactctgtcccctccccaggctggaatgcaggggtgcaatcatggctcactgcagcttcaaactcccaggctcaggtgatgctcccatctcagcctccggagtagctgggaccacaggcacacaccaccatgcctgactactttttttgttttttagagactgggtcttactctgtcacccaggctggagtgcagtggcacaatcatagctcactgcagcctctaattcctgtgctcaagggagcctcccccttcagcctcccaagtagctgggactacaggtgcacatgaccacacctggctaattttaaaaaatttttgtagaaaaatttcttgctttgctgcccaggctggtcttgaactcctggactcaagtgatcctcccgcctcagcctcctgagtagctgggattacaggtatgcaccaccacacccagctaattttcgttatttttagtagacacggggttttatcatgttggccaggctggtctcaaactcctgacctcaggtgatccacctgccttggcctcccaaagtgctagaattacaggtgtgagccaccacgcccagccaaaaataatttttaaaacttagccgggcgtggtgtccgcacctgtgttcctagccactcgggtggctgaagtgggagaaccacctgaacagagaggtcaaggggattgaccttaagtgtgccactatactccagcctgggtgacagagtgagaccatttcccatcagctgtttagcaaccttaattctttttttttttttcttttttttttttttgagacagggtctcgctctgtcacccaggctggagttcagtggcaagatctcagctcactgcagcctccacctcccaagctcaagcaaccctcccacctcagcctcctgtgtagctgggaccacaggcatggaccaccatgcccagctaatttttgtattttttatagagacaggggtctggccatgttgcccagggtggtcttgaactcctgggctcaagtgatccacctgccttgacctcccaaagtgctgctattataggaatgagccacggcgcccagcctagcaaagttttgttgttgttgttgtttgtttgagatggagtctcgctctgttgcccaggctgcagtgcaatggctcaatctcggcccactgcaacctctgtctcctgggttcaagcaattctcctgtctcagcctccagagtagctgagattacaggggcacaccaccaaacctggctaatttttgtatttttaggagagactgggtttcactatgttagtcaggctggtctcgaactcctgacctcagatgatctgccaacctcggcctcccaaagtgctgggattacaggcgtcagccaccacatcaggcctagcaaccttatttgtatctgcaaacttaattcccctttgccatgtaacaaatgtaagtcagcccaggctgctataaggaaacactaaagagcggggtcttaaactgcagacatttatttctggaggctgggaaatccaaggttaaggtggctggctagctcagttcctgctgagggatttcttcctgccatgccttcttgctgcgtcctcccatggcagacagagagagagaaagagctctggtttgtcttttccttatagggaactaattccatcttgcaggggccatcctcatgagttcatctaaccctgaggacctcccaaaggccctgtctccaaattccaacccactgggaaatagggcttcaacataagaattttgcggccggaagcagtggctcacgcctgtaatcccagcactttgggaggctgaggtgggcagatcatgaggtcaggagatcgagaccatcctggctaacacggtgaaaccccgtctctactaaaaaataaaaaaattagctgggcgtggtggcggatgcctgtagtcccagctactcgggaggctgaggcaggagaatggtgtgaaccccagaggcggagcttgcagtgagccaagatagcgccactgcactccagcctgggagactgagcgagactccgtctcaaaaaaaacgataataataataattttgacaggacacaattcaatttataacgataacatatttattggtttgggggatcaggaggtggatacttgggggaagggggccatcacgctgcccaccacacctaggaaggtcacaggggcgtttgtgacttcatcctcctcttggtcccccacacaatcctcccactagacactcccgcatggtagctggagcagcaaacaactgcttagggatttgaagccaggtgtcctaacttcctccatgggcgctcagcctggggaacctcagaacacttgctctaggatccagacactgtttaggagggtcaagaccttactcatcaaagccccgcctcccccccaacctccgcctccacccccatcctggaaccctggctgtacacacgtgtatgggtacgcgtttggccacatgcatgacaacaaccttgaacatctcccgtcacagcaggtgagtttaggaaacaccagtgtcccggcacctctggtcaggactacagggagaggccaggctacccacgccctctacaggcccactcccctgctagcggacctagaattccaccttgaagcagggtggggcagggaggcagggcgcgatggctccacacatgtaatcccagcactttgggaggttgaggtggatgggtcacttgaggacaggagttcaagaccaacctggccaacatgccgaaaccctatctctactaaaattacaaaacttagccaggcatggtggttggcgcctgtagtaccagctactcaggaggctgaggcaggagaatcgcttgaactcaggaggtagaggttgcagtgagcccagatctcatcactgcactcaagccagagcaacacagcgagattctgtctcaaaaaataagaataaattaagagtctagatatagtcctaattacatttgtattcctccttggatcctccatgagtaacttagagagtctatattacattggctgggtgtggtggctcacacctgtaatcccagcactttgggaggctgaggcaggtggatcacctgaggtcaggagttcaagaccagcctggccaacatggtgaaaccctgcctctattaaaataatacaaaaatttgctcggcacgttggcactgtaatcccagctactggggaggctgaggcaagagaatcacttgaaccca

SEQ ID NO: 7872 - DNA, 6000 bp, Homo sapiens
gcgggttggcagcgccgaggaaggggcttctcgcgctcgcccctcctaccgcatctccggccaggggcacctgcgacggggcacctggggacaggagaaggagaggcccaggcgttgggatcggggtggggaccccggcgcaggcccacaggagagacaactggcgccagggcacccatgagtcccgccccgccccagccgccagaggtcagcgattaaagattaactcccaggagcgcgttcctgggctggggaaaggaaggggacgggacgggacgggacgggacgggcagggtggacgggcgagggggcaggcctagcggtgcgtcctgccttcctacctggcccgggcgtctttgacctagctcaggttcctggtccgtgtccctccctcgaaccctcggtccgtcggtcgttctgtgggtccgaccccaccggctccgccctgtcacgtgacccggaaagtttagtcactcacctgggagagcgcacttccggcttgtgcacctgagcctcgctgagagggcggagtcaagaagggggcggggccgcgctgtgggcgcacctgtaacgggaccccagtcccttaatggggatgcggggagggagaccgcggaagcgcgcaggtgtgagggggaccttacacctgcattgcgagcatatctgtgggagcgcacaggtgtggagacgcacggggtatgtatgtacccgtgcactaggcactcctgcctagggcagacttggatggggagcgcttaatgagaaaaaatacctgcccaggcgcaatggctcacgcctgtaatcccaacactttgagaggccgaggcaagaggattgcttgaggccaggagtccgagaccagcctgggcaacacagcgaggcctcattctctacaaaaaataaataaataaataaacaaataaataaaaagaagaaaataagccgggggcggtggcgtgatcctgtaatcccagcgctttgaaaggccgaagtaagagaatcacttgaggccaggagttcgagatcagcctggcccacagacggaggccccatatttacaaaaaataagaaaattagccagatgtgatggcacgcacctgtagccccagctacttgggaggctgaggtgggaggatcgattgggcccaggagtggaggtaacagtgagtgagctatgattgtaccactgtactccagcctgggtgacaaagtgagaccctgtctctaaaaaaattttaaaaacaaaaaaacagctgtatggtaaacacctgtgtggaaccaaacctgtacagaagacaactgcacaggtgttcacatataagaacatacagaaaacagatggccgggtgcggcggctcacgcctgtaatcccagtactttgggaggcctaggcaggaggatcacctgacgtcaggagttcgaaaccagaccagcctgcccaacatggtgaaaccttgtctctactaaaaatacaaaaattagccgggtgtggtggcaggtgcctgtaatctcagctactcggggggcgctgaggcaggagaattgcttgaactcaggagacagagattgcagtgagccgagattgcaccattgcactccaccctgggtgacaagagtgaaactccatctcataaaaaaaaaaaaaaatctgcattgaatcacagctatacgaaatatagccaaggctgggcatggtggcccacgcctgtaatcctagcactttgggaggccgaggcaggtggatcacgaggtcacgagttcgagaccagcctagccaagatggtgaaatccccgtctctactaaaaaataatcaaaaattagctagcgtagtggtgggcgcctgtaatcctagctacttgggaggctgaggcaggagaatcgcttgaaccctggaggcggaggttgcagtgagccgagatcacgccactgcactctagcctgggtgacagagcaagactgtcaaaaaaagaaaagaaatataaccaaatggatacataccaccagggtggacagtatctctatagaacacgcctgcattatcatcacaaacagctaactaaggcactctgatgtggaatagacctgttttaggaacatatctgcatggctcacctatgaaatgtacggcacttgcattgggggaattcctgggtgtcagtgtcttgtaaatacctgtatgagacacacctgcatttacgtaaacctgtatgggactcggttgtatggaaacatacccagatgggtgtatacttaactgaaacacacctacggggcgggagactgtagaatgcattcatgggtggagggaaacctgctcagaaacatacctgtgaggtaagagaaagcaccttgtaggaggaacacctgtatggaattgagctcaagtgaggggaagaacttggaacatctgcacggggcacactcacattgacacacatctgtgggtaaaaccatcagggcaggggctcacatacactgaggcccacctgtcaagaatgtatctgtgagaaaacacctatttaggggcacttacatggaaaaaaacctctgtatcactccatgctgtatggcacctgcaaggaacaactgtaaatgaaaacctctgctggggagcctcttagaagagactcatttgtctggggcacacctgttccagcacacctgtctaggcagaggctgggcgtgaactaaatatgccctcacgactgtatctttgttttctttcctttttaaaaaaaataataataattattattattatttgtagagttgggtgtcttgctatattgcccaggccggtctcaaactcctgaccccaagcgatcctcccatctcggcctctcaaattgctagaattagaggcctaagccaccgagaccggccaatgctgtatctttggataaaggatgatgataataacaagaccccctcctgaggacccttgggtgacaagtgatgattaaagaataattaggccaggccgggcgcggtgactcacgcctgtaatcccagcactttgggaggctgaagcgggaggataatctgaggtcaggtgttcgagaccagcctggtccacaggtgaaaccccccccccccgtctctaataaaaatacaaaactcacggctgcggtcgggcatggtggctcatgcctgtaatcccagcactttgggaggccgaggcgggcggatcacgaggtcaggagtttgagaccagcctaaccaacatggtgaaaccccgtctctactaaaaatacaaaaattagccgggcgtggtggtgtgcgcctgtaatctcagctacttgggaggctgaggcgggagcattgcttgaacccgggaggcggaggttgtggtgagctgagatcgtgccattgcactccagcctgggcaataagagcgaaactccatctcaaaaaaaaaaaaaaaaaaaaaaaaaaaaaaaaaaaaaaaaaaaaaaaactcactgctgcgtgcgatggctcacgcctataatcccagcactttgggaggctgaggcgggcggatcacgaggtcaggagttcgagaccagcctggccaacatggtgaaaccccgtctccactaaaaatacaaaaattagctgggtttggtggcgggcgcctgtaatcccagctactcgggaggctgaggcaaaagaatcgtttgaatccgggaggcggaggttgcagtgagccgagatcgcgccattgcactccagcctgagcaacaacagcgaaactccgtttcaaaaaaaaaaaaaaaaaaaagataattaattctttctagggtatagagtgatggttaaggatcccagatctctttaaaccctgttttgccccttagtggtcatcaggactggggagaatgacttaacctccgcttccttatctgcaaagtgcgaacgccagtaccacctaccttatagggttttggcaaagacgactcgagaggtgagtaaaagccctggcatgtgcaaagcactgaatcaaagtgagatttgttatcgagtattcgctgtcaagtggtctgggctcccttccccctaatggtggatcgagaaactgcgcccgaaactagcagtagggacattccgcaggtgcagcgagtgcgacaggctggggccctgcctccagcgctcgaccactgggatcctcaaccccgcgcccgggtcactgagccaccccctccccacgccgctcagcgtctgattgcggccgcggcccctttaagatctcctggcaggcggtgggactgcgggctggaggcagtcgggggtctgcggggaggccccgcctaggtgggagaagaggcggggcgggcgggctcagcccaggaggcgctgaccaataggaaaccgactttgcagccgcgccgcgcgttgattttctgtttcccagtcagagtgggaaccgagaaaggaagcgcgcgggcgggaagaagggacagtgggagagcatcgctcctggatcttctgtttctgcggccgagcggggaaggtgtaaggcgcgggcgggcagagagcgagcgagatggtgcacggttcttgcgtgcgtctgggaaaagcgagaacttgagttcctgaagattagtgggtgtggcggggaggtcaagtggaaggggattatgaaacccaatccccgacagcgctctaccttgcccccttgggcaaagggggaaagggtaaactgaggcacgcagaggcggaactctgaaaccagacctgagaccactgagctccctagcccgtcttcccagaaggaactctggtgttcctcggctgtgcaataccagaccatcccagacattccctccccacgcccccagctccgccctcggtcccctccccccaatgcaggtcgggggaggagacgcaagttctggcgcgggcggcgacggctagccgtcaccacctcccgcaagtgccagagccgagcggactgcgcggaggctgcggagccggcggccgcgggagctgaccctgcggggtcccggggggggagggggagccgcgaagcccccactgaggccgccgctgccgggcctcccctcccccccgggcgggcgccatgcgggggagcccgggcgacgcggagcggcggcagcgctggggtcgcctgttcgaggagctggacagtaacaaggatggccgcgtggacgtgcacgagttgcgccaggggctggccaggctgggcgggggcaacccagaccccggcgcccaacaggtacccccacccccagggacctcctcccctcccggccccgcccgctcccggttacccaagcccctgaactgggcggccggagccaccagggactacctgtggctggactccagaacctgtgtctctgtctcgttccccctacccactcgtgtttggcctaacgggatcgctcaagacagggacgccgaggccccaagcctgcagttccgcggccaacacccgatccccctgctgcggggcagggggcgtctgcctgggaagagatgggggcgctttcctgcccactgcccgggacacaccctcctccagactgcacagcccatgacgtgccctgctctcacctccaggagacacaccctccatcctctgggcacctactgccctggcctgcagctgccccgatccctgtgtttacattccctggcctgccctttcatgggccgttcacgggcctggctcactgtcccgggctgccccagccagggacccaatcctgtctgcggtcacccgcagctgggaatgcacctataacaagactttcctcccgctgcccccacctccactttgcaggtccttcccacacctgtagccccagatcgctctaagagaaccacagcaaccctgagagcagtccaacctcccacttcccaaatgggaaaaaccaaggcctcagccactccgcttggttctctcctgccccacatcgcccagggcttcctccaaagggaacccctgggtcccccatgtggacagggttttttaagaggcagctgggttcaac

SEQ ID NO: 7873 - DNA, 6000 bp, Homo sapiens
acataaacagccgattaacaggcattttgtatgttacaagtattacatactgtatttctttctttcttactttattattattattattttgagatagagtcttactgcatcacctaggctggagtgcgctagtggcatgatcttggctcactgcaacctccgcctgttaggttcaagtaattctcatgcctcagccctccagagtagctggaattacaagcacaccacgcctggctaatttttgtatttttagtaaatatggggttttgtaatgttggccaggctggtctcgaactcctgacctcaagtgatccgcctccctctgtcttgcaaagtgctgggattacaggagtgaaccactgtgcccagcctctacacactacagtcttagaataaagcaagttagagaagagaaaatgttatttaaaaaatcacagctgggcatggtgtcatgtggctgtaatcccagctccctgggaggctgaggcaggaggatcacccgagatcaggaggtagaggctgcagtgagccctgatggtgccactgcactccagtctgggcagcagagtgaaaccctgtctccaaaaagaagaaaaaaagaaaaagaaaaagaaaatcacaaggaagagaaaatacatttacagttacagaacgctacaatatttatcaatgccataaatttgtttacaagatgaattgtctgtctgaagcagacaaccgcagctgtagagctccatttatgttacgtagcaagcaattcaactttttcttgtcctgtcctgacttttctctgcttctcgggagcatttccagcatcactagtggcactttacatgggtctcaggatgttattcaatgtttgcggtattgcactaaacacagtgaaaaatacgcgggaaccgccaagagatccctttttaccggggcacaaattcctggagaggtgaactgcccacagggagataattaatgtaacatggcatttaaagcggatacttgcaacacttgcactcactccagtagcaacaggaggtggctatgaaattgttacaataacacaatatattctatagttaattttatgcagttatgattgaatgctgcatctttacatttatttacatttctcttgacttggaataacaccatgtatggtttgtaagtgtgtgtgtacgttttaatacattttaactttttgtaacagatttgtgtatattttatgttagcaaattataaaatagggctggacatggtggcttatacctgtaatctcggcactgtgggaggtagaggcaggaggatcacttgagttcaggagttagagaccagcctgggcaacatggtgagacctcgtctctataaaaagtaaaaaaattagccgggcgtgttggtgcttgccaggaagatcgcttgaacccaggagttggaggttacagtgagccatgattgggccactgctctccagcctgggcaacagagcaagaccctgtctctaaaagaaaataataacaaaaataataaaacagactagtatctacatatattttatgcattcatgacatacctaatttttttttaatatttcttggctaccaagttcatctgcaagtcttttcaaactattgcaaatctctaaaaatgtttccaatatatttattgaaaaacattctgtttaaagatgacctcactttgggaggctgatcagatcagctgaggtcaggagttcgataccagcctggccaacatggtaaaatcccgtctgtactaaaaatacaaaaattaaccgggtgaggtggcgtgtgcctgtagtcccagatacttgggaagctgaggcaggagaatagcttgaaccctggaggtggagattgcagtgagctgagattgctccactgcactccagccagggtgacagagcgagactctgcctcaaaaaaaaaaaaaaaaaagatgtgcacggttcaaactcatgttcaagggcccactgcagttctcacccatggcttcactttctcctctttcttttctgcagctacagtgaatgcctggttcagttgcaagaatgccttgcccactctcctctgggcctttgctcatgccttcccccacctgaaacacatccctatggcttccctaggatggctcctcttcattttcagacttaagctcaaaatcacatcctcagtcaggtgcagtggctcacgcgtctgtaatcccagcaattagggagaccgagacaggcagatctcttgaggtcaggagttcaagaccagcctgtccaatatggtgaaaccctgcctctactaaaaatacaaaaattaggcaggcgtggtggcatgcacctgtaatcccagctactctggaggctgaggcaggagaattgcttgaacctgggaggcggaggttgcagtgagccaagatcgtgccactgcactccagcctgggcaacagagtaagatccatcaaaaaacaaacaaacaaaaaaccccatgtcctcagcaaacccctccctatgcacctcccatttccctcagctcattacacactcaattattttaagggctctctccctggctcagttgtgaactccataaggaaatgggtcatgtttattttgctcactgaaaaatcccctattacttattgcttgttgattctcccactcaacaaatatttattaagcaacagatttgtcaggcactgggtttaagcagtgaaacaagaccgaaaagatttccgccttcacgggaaggggagaagacacagaaaacgaataagaatttcaaggccaatcatggtggcgcatgcctgtaatcctagcaccttgggaggccaaggcaggaggattgcttgaggccaggagttcaaggctgcagtaagctaggattgcaccactgcattcctgcctgggtgacagcaagattctgtcaaaaggaaaaaaaaagaaagaaaagaaaaaaaaaaaacaaacaattgcaggtagtggggtaaacatgctatgaaaatgagagagaaggggccaggcgcagtggctcaggcctgtaatcccagcactttgggaggccaaggccggtggatcacctgaggtcaggagtttgagaccggccaggccaacatggtgaaatcctgtctctactaaaaatacagaaaattagctgggtgtgctggcgcatgcctgtaatccaagttacttgggaggttgaggcaggagaatcacttgaacccaggcaggtgatgttgcagtgaactgagatctggccattgcactccagcctgggcaacagagaaaaactccatctaaaaaaaaaaaaaaaaaaaaaaaaaaaaaaaaaaaaaaaaaaacagagagagagagagagagaaggaaacggaactggggggaggatttgcaaaaatatggttagggatggcacttcagagatgaagccatcctggagtgttacgggcaagggaaatgctggggcaaaggcccagaggcaggaataggtttggcctgttgcatgaacagtgggtccagctcctagcaaactgtttattgaatgaaagaagaatgaatgccttgggtctagggttgtgctgggcgctttcttaagttttctttcccgggtacctccccagaactggcatgcaggtattattaaacccattacacaagtgaaactggcccagagacagaaaagtccctggtccaagaccacacaggagtgaggggtggaggaaccctcctcccattgagttctggctttcctatactgaaagccccttcctctcctgcagtaaggtaggtggaaccgctgtcccgccttgttggtgaatgtcgttgctagacttcagacacatacaggctggtctgctgaaaatcagagatgtccacctgcgccctattcgaggtctccggcgtcttctttggcgtcgtctttgccctttcagaagcgtctgcacatttttccaggtgtcatttctccaacttgaacacagggagcgcactgggcacgcgggcacgtggctgtccccaggggcctggcttgggtctcgcccctgggccggggcgcactcgcgggcgggacatctgggggcgcccacgcgctctgggacgagtgtcgctggccaggcccggactgaggaaaggcgagtgagacactactcgcctggggtgcaaaatttaagggagtgaaaaaaaaaaaaaaagaaagaaaccaaaaccacctcgagtcaccaaaataaacattttaatgcagtattttttaaaaaatcaacaggaatcctccaaagcccactatgaacaaaatagcaaaatggtagagaaaggatctgtgccgctgcgtcgggcctgtggggcgcctccgggggtctgaaactggaggagactcggggctgtagggcgcgcggatctggggcgcgccctcggtcccggcgcgcccagggcctcccgcgcggggcccggcacagggaggcggggaggcgggcggggcggggcggggccgggcggcacctccctcccctgcaagctttccctccctctcctgggcctctcccgggcgcagagtcccttcctaggccagatccgcgccgccttttcccgcggcccgcacggggcccagctgacgggccgcgttgtttacgggcccgagcagccctctctcccgccgcccgcccgccacccgccagcccaggtgcccgcccgccagtcagctagtccgtcggtccgcgcgtccctctgtcccggagcccgcagatcgcgacccagagcgcgcggggccgagagccgagagacagtcccgggcgcagcgcggagctccgggccccgagatcctgggacggggcccgggccgcagcggccggggggtcggggccaccaccgcaagggcctccgctcagtatttgtagctggcgaagccgcgcgcgcccttcccggggctgcctctgggccctccccggcaggggggctgcggcccgcgggtcgcgggcgtggaagagaaggacgcgcggcccccagcgcctcttgggtggccgcctcggagcatgacccccgcgggccagcgccgcgcgctctgatccgaggagaccccgcgctcccgcagccatggccaccgggggccggcggggggcggcggccgcgccgctgctggtggcggtggccgcgctgctactgggcgccgcgggccacctgtaccccggagagggtgagtctgggggcgcgggcgtgggcggggagcgccgcgatggggagaggaccccacccaagccaaaatcgagcccccgcttgtggactgagaaccctccccaggggcggggggcggtggccaggacggtagctcctgcatcgcgtagggggagcgggaagcctctgaccttggcctttgcccgcccgggctcgcgcctccgcgccctgcgtgcccgacctgagcccgaggaaccttgccccggtgcccgccccgccgcgggctcctctctggagcgcgcctccgacccgtgccccggcccctccgagcccaagtcgctccggagacacgacacgcgtcatctttgggtcgcggccgggaagtggggtcactgggtctggacagccccgaacagccaagtcccccgagcgcatatggtgtaggtagagccaagcgccctgagtgcctcaccggtgggtgacgctgcctggggtcagggactgcagagcccccctctacccaactaccttggatctaggcccgtggccaccccggactctaggtccatgtttacccttttgggttctgtttccagatgtccggaggcaaattctaaagccttagcaacagcagcaattgtagcagaagtagtggcggttttttaccctatttattgtaattggtatcaccgcacgccacagcctagtctatcttatctctctggactgtcacagtggcccccggaggcagatacagttatgcacccatttcacagaggagtaaactgaggctcatgtaggacgcataactcccttgccctaaagtcagtgccagagccagg

SEQ ID NO: 7874 - DNA, 6000 bp, Homo sapiens
gagaatcacttgaacccagaggcagaggttgcagtgagctaagatcataccactgtattccagcctgggtgacagagcgagactctgactctaaaaaaaaaaaaaaagagtgacccccccactgggggagaggggagtgcacaaagacccgtggacccaagtcttttttttttttttgagacggggtttcaccatattggccaggctggtctccaactcctgacctcaagtgatccacctgccttggcctcccaaagtattgggattacaggtgtgagtcactgagctcagccagtggacccaagtcttaaaaggagctggatgtggaagttaaagagtctcttggggccaggtgtggtggcacacacctgtaatcccagtgctatgggaggctgaggatggaggatcacttgaacccaggagttcaatgcagcagtggtgctatgatcatgccactgcactccagcctgggcaacagagcgagaccctgtctcaaaaacaaacaagaagaaaaaaaaaagaggctgggcatggtggcccatgcctgtaatcccagcagtttgggaggccgaagtgggtggatcacttgagcccaggagtttgagaccagcctggccaacatggtgagaccctatttctattaaaaactccaaaaattagtgggggcgtggtagcaggtgcctgtaatcccagctggttgggaggctgaggcaggagaattgcttgaacccgggaggtggagatggcagtgagccgaaatcatgccactgcactccagcctgggcaaccgagtgagactctgtttaaaaacaaaaacagaaagagagagagacagagaggaagaaaatcacaggagtggacaaggcctttcttgtgcccccttgtgttccatgctcccttggagcacaagaagagatctttggacagggcagtgaaacttacaaaacagattctctgttttctgccaggctgtgcggatatagccatgaacaagacaggtcaccagcaggtaacatgggtaggaagtgtccaggagggtgtgatcgggtgggtcccgtgagaggatgacattcgagtaaaggaagttagggaaggagggagccacgttggtatctggctcaagaacatttctgcagaggaaacagaacatgcaaagttcctgaggcaggaatctgctgtaactttaaacaacaggaggaaagcaatgcaggagaagagtaacaagagttgaaatcaagaggaaatattctgtgaaagaaaactggttaacatcgaggccagacgcggtgactcacgcctataatcccagcactttgggaggccgaggtgggcagatttcttgagatcaggagttggagaccagcctggccaacatggcgaaaccccgtctctactaaaagtctaaaattagccgggcacagtggcgggtgtgctgtaatcccagctatttgggaggctgaggcatgagaatcgcttgaacctgggaggtggaggttgcagtgagctgagatcagcactgcactccagcctaggcaatagagtgacactctgtctcaaaaaaaaaaattcaaacaaaccaacaaacagactcgttgacatcattagtcatcaggaaaaggcaaaacaaaaccacaatggggtggcacgtcacacctactacgatggctatcataatcaaaaaaggatgttgcaaggaagtggcgaaattggaacctttgtgtaatgctggtggggatggaaaatggtactgctactgtgggaaacagttgggcaattactcaaaaagttcaacatagagttacaaaatgacccagcaaccccacttctaggtatagacccaaaggaatggaatccagggactccaactacatattcacaaatgtttatagctgtacttattcacgatcgctaaaaggcagaaacagcccaaatgaccatcagctgatacgtggataaacaaaatgtggtccatccatatggcgcaatgttatatagctgcaagtggaatgaatttctgatacatgctgcaacttagacaaacctcaacaccattatgctcagctgcacgcagtggctcacacctgtaatcccagcactttgggaggccaaggcaggaggatcccttgagtccaggaggtcgaaaccagcctggtgaacatagcgagaccgcatctctacaaaagaaaaattttaaaaattggccagatgtggtggcgtgcacctgtagtcccaggcaatgtggaggctgaggcaggaggatctctcaggcccaggagttcaaggctgcagtgagctatgatcacaccaccgcactccagcctggtgacacagcaagaccctgtctcaaaaacaaaaagcaaaaaccaaaacaacctattatgcttggtggaagaggccgacacaaatggtcacatattgtatgattccatttgtatgaaatatcaaggaggtcgggcatggtggctcatgcctgtaatcccagcactttgggaggtcgaggcaggcagatcccttgaggtcaagagttcaagaccagcctggccaacatggtaaaatccatctctactacaaatacaaaaattagccgggtgtggtggtgcgcacctgtactctcagccacttgggaggccgaggcaggagaattgcttgaacttgggaggcggaggctgccgtgagctgagatcatgccactgcactccagtctgggtgacagagtgagactctgtctcaaaaaaaaaaaaaaaaaaaaaaaatcaagaagtggtaaaaatacagagagacagcagagaatgcagattagtggttgccaggggctgggaggagggaggaattgagtgattgctttatgggaacagggtgtaggggaggaaacatactttttcctttattcttagttcttagctgtgatggatccttgcaatgaaagaattaagaagggcgggtgcggtggttcacgcctgtaattccagcactttggaaggtcgacgtgggaagattgcttaagcccagggctcaaggccagcctgggtaacatggtaagactccatttctacaaaaaataaaaaataaaaagaaattagccaattgtggtggcaggcacctgtggtcccacctactcaggatgctgaggtggcaggatggcttgatcccaggagttcaaggctgcagtgagttaagatcgtgccgctgcactctaccccttttttgtgggtagttggtcaagctaccatggggcagaatgtagcaagctctgggcatcatcctgggtcctcaggcccagagagcacacaagtggcggcttcacatctacaaatttggttcctcccagagcgaggccctgtctcaaaaaaaaaaaaaaaaaaaaaaaaaaaaaatagaggccaggcgcggtggctcacgcctgtaatcctagcactttgggaggcagagacgggcggatcacgaggtcaggagatcaagaccatcctggctaacacggtgaaaccccgtctctactaaaaatacaaaaaaaaaaaaaaaaaaaaaattacccaggcgtggtggcgggcgcctgtagtagtgccagctactcgggaggctgaggcagaagaatggcgtgaacccgcgaggcggagcttgcagtgagccgagatcgtgccactgcactccagcctgggcgacagagcgaggctccgtctaaaaaaaaaaaattaacaagggaaaaacaaatttattaacatgtgtaccttatgtgtacatgggagatgccaagagaaatgaggtggcttatatagcttatataactcctgcttatatagcaccttcaacatatagcagcaaatttttggagaagtgacaagacgaaggaaaaggacattgaggccgggtgcggtggctcacgcttgtaatcccagcactttgggaggccgaggcgggcggatcacttgaggccaggaatttgagaacagcctggccaacgtggtgaaaccccgactctaccaaaaatacaaaaattagccgggcacagtggtgcacagctgtgatcccagctacttgggaagctgaggcacgagaatcgcttgaaccagggaagcggaggacgcagtgagcagagatggcgctactgcactctagctttggggacagagcaagactccgtctcaaaaaaaaagaaaaaaaaaaaaaagacgtctccagacaagagtctaaaggtgtccctggtgatcaacctttgtccttcctggtagagaggggaggagggcacctttgtacctttaggtcctgctttgaggcaaatcagggaagaacagagagcttttccggtatcagcttcattgatctcagctcaaaataatcctacaccaaggtcgcatatttcagaggggcatatgctggtctcctacgggggtctctcttgggggtgataaaaataccccgaaactagcaaggggtgatggttgtccaacatgtgcatgtactaatgtcactgaattgtgcatttttattttttatttatgtattctagaacaattcttaacgtccaaagataacgtctttccttaacgtcgaaagatgccttgttgtgatattacagcagtcattcctgctcactacgggcaggcagacagtgcagaaaaggtgaagcacaaaaactaaaaaggaaaatctctccttgaaccactgcgaacaggttggtggttttgcttggaatatttttggagcgtgtgggtagttggttaaacttagaaatatatttttttgtgcgtgggtagttggccaaaccgccgtggggcagaatgcagcaaactccgaggatgatccagggtctgcaggcctggagagcacacacgtgtcggccccacctctgcaaactctgtccctcccctacagcggacaaaaagccggtcagggggacaaaggcctgcggccgcgcctgcgcgcaagcctttggggcgctcccggtaccccggcctggccccgccccctggcgcggcgcgccgacgtcgcggtgacgtcacggagttgccatggcgtcgctgagcggcctggcgtcggcgctggagtcgtacaggggccgggaccgcctggtgaggcaggggcggaccggggccggaggtcctagagtttggcccaagctcagagactgggaaacgggccagagaggggacggggtcgcccaggatactccgtcgcagaggccccgtccgagctaggctcaaatgcggtgccctagcattggacatttatgtatttatttattttggctggagtgcagtggtgcgatctctgctcactgcagcctccgcttcccgggttcaagcgattctcctgcctcagcactcccgagtagctgggactacaggcgcccgccaccactccctgctatttttttgtatttttagtagagacggagtttcatcgtgttagccaggatggtctcgatctcctggcctcaagcgatccacctgcctcggcctcccaaagtgctgggattacaggcgtgagccaccgcgtctggccagcgttggacatttagatagtttctgccaacccaacctgtctggacattgacacactggccagattcccgtgtttggacgttttggatccgaccaggccactgaagttgtcctgaacaatctcgtgttgggatttgggatgttgcagggctcccctgtggctggacattcacttccaaccagattccctatagttgggcatttaggttgtttcagccaacctagaccaaagaacacgccatggcctgggccctgccatgcctaagcagcgatgggttccaacaaaaccccagttggtcatttagatcgtctctgccaacccagcctggctggacgtttacataccaaacagattcccatgtttggacatttaggatctgaccgggccactgtagttggtccctgggttgtcccaaacaatctcatgtggggatttaggatattgcaagactctccctatggctggacagtttttagttccaatcaagtcccatatggttga

SEQ ID NO: 7875 - DNA, 6000 bp, Homo sapiens
tgtttcagaactgtgtgaagttaaggcactctgtggagtcttggaggaagaggtatgggcgtggctggagagaccagctgccaggcctgagcaggcaggacccttgaactccaggacatgggaagctggagctttgggcccagggcagaagggagccatggatggttgtaggcagagagaagatatgggcaggtggttgccgttcagggaagacacagaggaggggtttcagggagaccctaaaggaggctgtcatgaaggtctggtgggggtgaggaccctaaggggagctctcatgggggctggagttgggtaaatagggagtgagtgtttcatggggacacggtttcagtttgggaagatgagaaagttccggagacggatggtggtaatggttgcacaacagtgtgaatgtgtttcatgctcctgaatggtgcacttagaaatggctacgatggtaaattttatgttatgtatattttgccacaatgaaaacaaaataaagcgtgatctaggaatcatgttttcaaagcagcgcttctcaaccacggtgactctttcggcgactagtggccagagatgcttctaaacatccaacaatgcacaggacagcatcccagcgaggaatcatcagtcccaaagtcaacagtgcagggtgggagagacccagctttgaacacacctcctcctggaagcccccctggatttgacacacctactgcccttcctccccacccctgcaccctttccttctccccttcgtaaccccaggagaggttaaacaggtaggaaagcccagggctgtgtcgggatggggttagagtcagggtcgccaggctccatctcgttgggacacagcgccaggccctgtcccaggtgtgggggttctgtgattagagccgcggacgtgcctccgtcctgtgcagagcagaggttagggctgggatcagagcatcgtggggtgaggggatcaagttgtagttgagctggggttacggtcagggccggggctgggatgagagctcagctggagatggttgagggttgttgttgctggacaccctaaactccttcctgttgaattctgacctaggtcaaacgaggagcgagacgcggcctcccccaacatgcagaggatcccaaatctgaaagaagaaccgacacccacagatctggggcccacatccgcacaattttctgtttttcccccgaagtgagcaagaggcgtattaataccgcagaggggaagcgggtggggcagtcccgtgactgggtccttggggccccaaagcatcctagtgtttgagctgagtcttggcaggaacccagcaggcagggggctttcacccctgggaaggacatgatggggccggtggggttgggctggggcacctgggcttgtagaactcagaaacaccaaattccagctgggcacagtgactcatgcctgtaatcccagcactttgggaggctgaggcaggaggatcacttgagcccaggagtttgagaccagcctgggcaacatagtgagaccccatcgctaccaaaaatttaaaaaattaaccaggcgtggtggtgcgtgcctgtggtcccagctactcaggaggagaaagtaggaggatctcttgaacctcaggaggttgaggctgcagtgagccgagatcgcaccactgcactccagcctgggagacagagcgagaccctgtctctaaaaaaaaatatggacaattttgttgtatagtttaatttagtagcaatggttgctgggcacaggaatttgtttgtttgtttgttttttgggatcgcccaggctggagtgcaatggcgcaatctcagctcactgcaacttccgcctcccaggttcaagcaattctcctgcctcagcctcccgagtagctgggattacaggcacctggaaccacttctggctaatttttgcacttttcggtagagacggggtttcactgtgttggccaggctggtctcaaactcctgacctcaggtgatctactcgcctcagcctcccaaagtgttgggatgacaggtatgagccaccacgcccagccggacacagttcttagtgacttgtgtgcatattaacacatctaattttcaccaccaccctaggaattagatgctttggtgatcaatgctgccttatgtgaagcacagagaggttaggtgacttgccaaaggtcacacagcacttcaatggaagaaccaggaatttgaacacaggtagtgtgggtcaggcatctgcagccctagccactatgccacctagacttctatatactaagaccccttggcactttgcccaccctcctcatccttcccaaaatgtgtcccctgatccttaacaccctccccactctcaactggggaactccaaatccccactcctgggtgggctacctcccatgtctctcactccagaagacacccccctgtgcccctacaacccacctcccaaccaggagggggctgggctgggccatccactagggctggacgttcccactgtgtcagggaggggcctggctgaaatgtcccctggaccctgcactccagaacagctgggaccatgctgccttgtctgtcaccctggaccgagtgacccttggtgcatgcctgttgagtgaatgactgactctggtggtctgaggctgttcattttgggtcccaaaatgtcccctccaccttgatctggggtaatggccgaggaccaagatggtaaagaagtgagggagggtccgggtgcggtggctcatgcctgtaatcccaacacttcgggaagccgacgtgggtggatcacttgagaccaggagttcaagaccagcctggtcaacttggtgaaaccccatctctactacaaatacaaaaaattagccaggtgtagtggcgcgtgcctgtaatcccaggtacttgggaggctgaggcaggagaatcacttgaatccggggaggcagaggttatggggagctgagatcatgccactgtactccagcctggatgacacagcaagactctgtctcaaaaaaagaaaaaaaatcaaaaaggaagggaaagagttggccgctgagcattggagaggtggctgggggctgctgagtggacatagggacagcatttgaggccaagccagggtggggtcactgggggattagtcttgagggcaggtcgggttggggatcctaagggggggtctgccgtggtggccaggtgggagtgaggaccctggagggtctgttttggggggcaagacaggaggtagagccccagggaaggctgtcatgggggcaggatgagagtggggaggccatggaggaggcagtcccagggacaaggcaaaccaggcagggggaaccctaagagggggatgtcacctggtccagggggaagagggagcagctgtggggatggggagaagcaggttatttttttgagacgagccaggcgcgggtgctgggtgagcggtggggtggaagatcgggaagtgcttggacaaggcctggacctgggccggggtgtctgggtggatggacggactgtcccaccaatggggacacacgaggagaaggaggaggaagcttgggaataagtccagctgggccatgttgtgaggacatggggatgaagtcttagttccaggatggggctgggatggagtttggtgtttcttttctgtttttctttcttttttcttttcttttttttttttgtgagacagagtttagcttttgttgcccaggctggaatgcaatggcgcgatctcggctcaccgcaacctctgcctcccggattcaagcgattctcctgcctcagcctcccgagtagctaggattacaggtgcccaccaccatgcccagctaatttttttttttttttttttttttttgtattttcagtagatacagggtttcaccatgttggccttgaactcctgacctcagatgatccacctgcctcggcctcccaaagtgctgggattacaggcgtgagccactgtgcccggtctctctctctctctttctctctctctttctttctttcatctcactgtgttgcccaggctgatcttgaactcctgggctcaagtgatccactcacctctgcctccccagtagctgggatcacaggcatgcaccaccatgccctgctagtttttatagtttttgtagagacaacggcttgctatgttgtccaggctggtcttgaactcccaggcttaagtgatcctcccacctcagcctcccaaagtgctgggattacaggcgtgagccaccgtgcccagccaaaactgtccatatttgacctgaatattatctcacgtatctttctttccccccgcttccctccttccctcctactcctccttctccctctccttccttctgtcttttttttccccttcctctgcctctctctcctcttcccttttttcttgctgggactcaaacctgggacatttgacctgggagcctatttgctcaatcatcaagagacataatctcatggtggggtgtctgctggtaagtgccgggtggcaggatcccaactccaggccgtccttctaacccaagaggccctgcctctgcctagagccttccgtggctccccagggccctctgtgatcggccatagtggtatgattcagtgtgcagtaacagtggttcacatcttgacgctaccactcacctccttcagccctgtgggaacttgctgcttaacatctctagttctcacccaattctcttacctgagaaatggagataataataacacggacttcacccgggtgtggggagcaccaggagaggccatgcgtgtaatgttatccgggtggcaagcccatatttaggtctatgaaaatagaagctgtcagtggctctactttcagaagaaagtgtctctcttcctgcttaaacctctgtctctgacggtccctgccaatcgctctggtcgaccccaacacactaggaggacagacacaggctccaaactccactaagtgagtacgtatctggtgtgttgggggttggccatgggaagtggagatcaaagcgcccttggaagaaacgaccttgggctgagcctcaagggatgaccagcaggaggtcacaaccagagaagggaggtggtgggtggtgagggggcgggggtgggggccgcagtgtggacagaatctcgaggcattcgagtccctgatttggggaagtgaaagcaggccatctggtctgagatgagcttggtgagtgcgctgggccgatcatagagggccctggggagccatggaagactctaggcagaggcaggacctcttgggttagaaggacggcctggagttgggatcctgccacccagcacttaccagtagacaccccaccatgagattatgtctccagatgattgagcaaatgggctcccagctcaagggtcccgggtttgagttccagtcccaccactgcgtgatggggacaaatgacttaccctcttggaacctcagttccactgagagaggccccacagaatgaggacagtcccccagcatcctgccagtaggtttactgagcacctactgtgtgctggtgctttgaatactcccaatttacagatgagcaaactgagctgctcatccaggaagaagccaggactcggactcaggtctgtccagctgcctccctggacagttccagtcccaggatggtctctgggttcctctcacaatgtcaaaagggccagcttgagctgccgctaatcagagcctggccgcgccacaccccacctccctgaggctccgagagaagggacttacctatagtcaagcagcgaaagaaggtagcccgtgacctccaggcctgaaggaccccaagtcccatgctcctcagcacatagtagatgctttaaagtcagaggacttggtcgggcgcagtggctcacgcctgtaatcctagcactttgggaggctgaggagggcagatcacctgtggtcaggagttc

SEQ ID NO: 7876 - DNA, 6000 bp, Homo sapiens
gaggcagaggtaggaggatctatttgaggccaggagttcgagaccagcctaggcagcaaagtgagatcaaatctttacaaaaaaaaaaaaaaaaaaaaaaaaatagaaaaactggctgggtgctgtggctcacatctgtaatcccagcactttgggaggtcgaggcggggggatcacctgagatgaggagttcaagaccagcctggccaacatggtgaaaccccatctgtactaaattcaaaaaatcagccaggagtggtggcatgcgcctgtaaccccagctacttgggaggccgaggcaggagaattgcttgaactcaggaggcggaggttgcagtgagccaagattgcaccattgcactccagcctgggcaacaagaacaaaactctgtcaaaaaaaaaaaagaaagagagagagagagaagaaaggaaggaaggaaggaagaataaaaagaaagaagagagagagagaaagaaagaaagaaggaaagaagagagaaagaagagagaaagaagggaaagaaagaaagagagaaataaagaaaaagaaaggaaggaaggaagaaaaagaaagaaaagaaagaaagaaagaaagaaaaaggaaggaggaaagaaagaaagaaaaaggaaggaaggaaggaaggaaggaaggaaggaaggaaagaaagagttgggcatggtggtgctcccctgcagttgcagctacctggaaggctcaggcaagaggatcacttgtgctctggaggtcaaggctgcagtgagctgtgattctgccactgggcaaaccgagtgagaccctgtctcaaaaaaaaaaaaaaggggatcttgctctgttgcccaggctggagtgtagtgacatgagattgccctgcctcagcctcctgagtagctgggactacaaacatgtgccaccacacacagctaaatttttctgtagaggtggggtcttcttgtgttgtccaggttggtctccaactcctggcctcaagcacttcttcagcctagtgctgggattacaggtgtaagccaccacagttagccccagcattgcttttgggggacactgttcaatcccctacaccgtggacattttgaatttcttctggatcttaccaaaaatggttctcatgtttcactattaaggaagacatttctgtaagatcctggaaattgccacttctcaaattaaggaagctttatcctgttctgtgtttactaagcatttattttttgtgcttatcttcattttaaatgcagaatgaatgttgaatagacatatctcataattgtaatgtggagaggacaaaaacaagttccggaaggatatagaccatgtgatgacattttaataaagctcccagatgtgcaaaacagcccaatatattcaccattgaaagatttgtaattaaagcattttaagataggataaacaccaagtttgggagagcagtggccttggggaggggaataagaggagggtggggtacaagagacctccactctatttgctatgatttgttatgtgacgatgttatgttatttgttatgtgatgttatttgttatgttatcatgtttgttatacgatgttatttgctacattttgttatttgttacgtgatgatttttaagaatatctgaaatatgtgaagatatcaaaacttgataaagctgagtggaaggcataagcgttttcattttttttcctgcatacctctttgcatactttataataaaaaataaaagcaaagccaaaattcagagcgacaaccagtacaccatatgccctttgcagtgggctggcttccctggttacagcaaccctctcatctctgcagagaatggaaaccagagtggtcatggccttggggctgaatcctgtgattttcaccttcttcccacattcgcccaaacctcttgtccctgctcttcaggtccttgtatgatgtgaccccagctgacaccctagccccagatgactgcccctgaattactctcagcttctccaacaagtcctgttcccttactctcccaatctttgcatgtgctgataaccatgttggggccattctttaatgtatccatctcctctggaataattctgactccttccccaggcatcacctcctccaggaagccctcccggctcagccagtgtctccagtggtcctcacagtctcctatacttcccagactcatcatattgccttcaaattgcctggttacatgttccctgcccccctccccgagaaacaggcctcccttccctgtcctaggccaggggtagagagtggaggtctgctgcctccttctaggacctctcttcccctctcagttatcccacagcgaggtctgggcacgggacatggatgggcagccttctggcttcctcgctaaactggacagctccgccctggctcgccaaggcagcttcagccacaggtgtatccagctgagccccactttcctgcccccttgcctttgtcttggctgtgccctgtgcctggtgtgtccttcctttctctgtccacaatacacatgtcgtcaaagccacacgtctcatgctatctcttccagaaaacctccgatttcccaaatgaactaattctatctcctccataagggctgatgaaacacttccatgtaaatcctttccccagaacacattacgatggttgctttggacagagattgtgcaattcttgtggggtttcatttccactccctgaaccaggaagccatctactctctgctcagtgacagccaattgctactgcatttatggaaactttcatgaggacttaattctacacatccccctctcccaccccaccccaaaatattactccggaagagtcagttgcccattgctgggtgtctgaccctattccctgcctcaacaaaaccaggagatgctggtatgaagcctgacaccctggtctgagttttgtgtacaaggcttgtctttttagatgtgtggttttttcttcaccttcctttcccttccatctttcttttacaaaatcctcttgttttttttatttcattttattgtgaatgtctctcattcctggaagaagaaagggggaaatagacaataagtacaatttatttatttatttattgttgagacagggtctcactctgtcacaggctggagtgcagcgggcacaattacagctcactgcagcctcaaactcctgggctgaagcaatcctccagcctcagcctcctgagtagctgggactaccgatacacatcaccatgcccaggtaatttaaaatttttttttaattttgtaaagatggggtcttgctacattgcccaggctggtctcgcgatccccctgccttggctccccaaggtgttgaaattgcagagctgagccaccgcgcctcggctcaaataaaatttttaaatgaaaaaatggataagggtttttgagaggctcaagaagatgaagtgtgtttacatatctacaagaggggctggaacattctattaagtgctcaacatttcaccttgtcagtgaggctggccctggccaccctagccactgcccactgcctagtgcccatcccagtcctgccaagtacttatcctactggattttttcttcccttaatgttttttcatagcatttatgacttttgaatagagtatactacggttcccaccttttgcactatggacattaggagtcagatcattctttgctatgggggatgtcttaggcattgtagggctttgcgcagcatccctggcctctacccactagatgcctggagcacacacacacacacacacacacacacacacacattctgtgacaaccaaaagtgtctccagacatagccaaatgtcccctggtgggcgtaattgcccccagctgggaactactatgctatacaacttatgttttcaattatgtttattacgttgagtatggagtctgtctccccacacttctagaatattagctccaagaagagaggaatttgcttattttactctctgatgtggccccagttccaagatcaatgcctggcatatggcaggtgctcaatgtttgttgaaagaatgcatgaacactgagtgtttttgatatgcctgaaatggtgctaggtagacatgtataacctcattgtctttatttttttattttttcaatttttgttttcatatatatatatatatatatatttttttttttttttcagaaatgagggtcttgttatattgcccaggctggtctggtctggaactcctgggctcagtgatccttccatgtcggcctcccaaagtgctgggattacaggtgtgagccagcaagactgtcttgtttctttatcatagcatctttgtgagagaggcccatcgctatctcctttacagtggggaaaactaaggcttctagaagctacctagaacccatacagtggtagagtcctgcagctccgccggctacctccctaacaaaactgtttgttcccttctggtacagagggactggatcaaggtcaggttcaaacccagcctctgcaggcacctgcaggggagttgagaagggacctgaactggcctggggggctatgcctgagggggctttctcaggagccagcaggggttacaatttggtcgggttcagtgtgtccctcgcgggataaaacccagccccaggcccataagagatggtgactaagctccaaagagaagcctccagccccaggcccataagagatggtgactaagctccaaagagaagcctccagcaccagcctggggatggagctgcagtggccagaaccaggaggctggaaccgcccggcctcactccagcccagcccagcccagccttgaaagggcccaatcctgtgattggtccatgggttcccgttgccaggaattaaggccaagaaaatgggaaggaaggaagggagtgcgtaggtccagtgagaacaggcgtgaaatttatatctctgcccaggactgggtgcctgcatcgccatggacaccaccaggtacagcaagtggggcggcagctccgaggaggtccccggaggtatgagcaaggagactgccccatccctgccccagtgtctggggtttgatgggggaggggagggaagagtcgagacaggccagggttgtgggtgcaggagagacaccacaggccatagagccagttggaccagggtccaattccaactctgccgcttagaagctgtgtgaccataggcaagttacttaacttctctgaatctcagtttcctgggagtaactcaggcctccagggctcagttctgggggacccagcatgccgtccttgttatgccagggccctggggacgctgggtgcactggagcaggagacccctcttcttggccctggctgtcctggtcaccacagtcctttgggctgtgattctgagtatcctattgtccaagggtgagtgactctcaatggggaggtgttgcatccggcccccctggggacagaaaacccccactgcatggcgcaccagctgcatcctggggtcctgttcgcgtctgagtgtgagcagagtgtgtgtacatctttgggccgtgtgcactcacgcgtgtgcacatggcgtgctcgtatgtgcgcgagtccccgcgcgtttgtctcccatcggcgtgtgtgcacatcgtgtgagctgtatgcctgcccgcccgctccgtgctcccgagttgggggacgctgcaccccccgggcgaggggaggattcccgagttcccggcctcgcctgcaggagcctctctcctcagcctccacggagcgcgcggcgctgcttgacggccacgacctgctgaggacaaacggtgtgtgcagagccgggcgcctgggcccccggggcgtgaggggcgggagtttctgagaccccggagatggagtctcgagtgcgtgggggccctatggtccctgaggctggaagggggtcccctgagtcctcccaagtgacccgaggggcatgcatttt

SEQ ID NO: 7877 - DNA, 6000 bp, Homo sapiens
tatcaagcttggctgatgataagtaataagtaatatccatgataagtaatatcatatgataaacaaaaacaaaaaaactaaaactgtaaacaaaacatacatttcaagatgaaataaaataaacggctgatggaaaaataaaatgacattagaggaggaaggaccaagaaaaggggtaataagaatgtagttgggctgggcgcagtggctcacgcctgtaatcccagcactttgggaggccgaggccggtggatcaccaggtcaggagatcgagaccatcctggctaacacggtgaaaccccgtctctactgaaaatacaaaaaattagccaggcgtggtggcaggcgcctgtagtcctagttactggggaggctgaggcaggagaatggtgtgaacccgggaggcggagcttgcagtgagccgagatcgcgccactgcactccagcctgggcgacagagcaagactccgcctcaaaaaaagaaaaaaaaaaaagaacgtagttggtcagatgtgctacaggggactttgaattgactatctagccaaaagtcttatttcctggctcacacaatactgtggaggcgggggcagaggggacactcacctgtccccaggagccaaaatggcactgactggtctccaacttagggcctgggtgaaggtcttctccaccaaggccaggtgcccaggtttcccagcttgggccagctcagctgtcacaggggaccagtagcctattggcctgctggtcagagtggctggtcccacatcacatggcactacagccgaatgttcatctgctcagctccattgcctgctagggaagatgatggttcttcaaagagtccttggttagtgttacagctctgcagctttgattaccgtagtgctgatggctgtcttgctgtctctcgtcaactgctgcctctccgtctcaccaatcatcatcctgctgaccgctgatcaccatctgatatcgtttgggtgtgtccctacccaaatctcaccttgaatcgtagctcccataattccctcgtgttgtgggaggaacccagtgggagataattgaatcatgggtgcagtttcctccacactgttttcgtggtagtgagtcagtctcatgagacccgatggttttataaggggaaaccccttttgcttggctgtctcattcgctctggtctgctgccatgtaagacttaccttttgccttccacctgattgtgaggcctccctagccatgtggaaccgcccattaaacctctttttctttctttctttcttttcttttcttttcttttttttttttttttcacaatccagaggtcttttatttttttaacacctctgatgccatgaattcatagggaagagtttccagcagctcagcctccttcccattggttctcacaaagcatgcttctctgggtggagcaggctggtgcttcagttgaacccaggtacctttctctttggcttctttctgtttctgattattttccttcacacatttcaggaagctatctcagctcttagcatgcttaatgcgctcaatgcacacattaattctctcggcatgaatcttgcccttgtttgtttacaacaatgccaacagcatgctgggtaacattgtagactcttccagttttgccacggtaacccttgtggtccattcctttttgaacagtacccattcccttgatgtctacaatatcacctttcttacaaattcgcatatacgtggccaaaggaacaactccatgctttctaaaaggcctagagaacatatattgggtgcctctcctcttcccctttgcgttcatcattttggcaaattactggaagatggcagttacggccaaaaggcacctctttttcttacaaattgcccagtttcaggtacgtcttcatcaagcagcgtgaaaacagactaatataccacctctctgtctttctttctttgccaccactccaccactctctgatcaccacctctctgtctcactgacctatcaccgacgggcgcctcttgccaccttaccagttgccgtcttgctgtcttgccatcccttgctgtttcacctctctgccaatcaccaattgccactgtctctgctgtcttactaattcttcagtgatccccactgtctcactgtctcactggcgatcaccatcggcagatcggcagtgctgcaccagtcactgccgcttgctcactgtctttgttccttcaaggtcaccaaatgttgcaggacaggtgaaccccaaaattggggcttagctggggagggttcttggcttcgctctggaaagaattcaagggtgagccagtgatgtcagacagagattttttttttttttgagacagagtttcactcttgttgcccaggctggaaggcaatggcacgatcttagctcaccgcaacctctgcctcccaggttcaagcgattctcctgcctcagcctcctgagtagctgggattatgggcatcagccaccatgcctggctaattttgtatttttagtagagacagggtttctccatgttggtcagactggtcttgaactcccaacctcaggtgatctgcctgccttggcctcccaaagtgctgggattacaagcgtgagccaccttttgtttgtttgtttgtttgtttttgacatggagtctcactctgtcgcccaggctggagtgcagtattgcagtctcggctcactgcaacctctgccttccaggttcaagtgattctcctgcctcagcctcccgagtagctgggattacaggcatcagccaccatgcctggctaattttgtatttttagtagagacagggttttaccatgttgctcaggctggtctcgaactcctgacctcaggtgatctgcccgcctcagcctcccaaagtgctgggattacaggcgtgagccaccggttttgtttgtttgtttttgagatggagtctcactctctcgcccaagctggagtgcattgtcacagtctcagctcactgcaacctctgcctcccaggttcaagcaattcttccgcctcagccccctgagtagttgggactacagacacgtgccatgcctggctaattttttttgtatttttaaaagagatggggtttcaccatgtagccaggagggtctcgaactcctgaccctgtgatccgcccacctcagcctcccaaagtgttaggattacaggcgtgagccaccatacctggccttagacagatattttttatgtaatgatactgctccttgtgaagcagggctaactcataggcagtgcacccagagtcaacaacatacaagctcttggcagctgtagttatactcatgtcaactcactttcagttatacgtcagttaaggggtgggtcaatgcaaattgaggagcaggttctttagaagttttaaggaaaagggcgaagatgtccaggttgtttccatggaaacaggtgggaacttctaggtcattgccatggcatcggtaaacagtcatggcactggagggagtatcttatgcccacgagcaatgaggcagccagggattgcttttgttgccatctgctggttcctgctggtttcttcacatcatctcatctggaccagattctgtatgggtctgcagggttgtggccagaaaacaagttcttccagtttcctacctcattaccatgtgaaatgttaccattaggagaaactgggttcacattagggatccctaggtgagggatttacatatgggaaatctctttcctacatttgcaactttgctataaacccaaaattattctaaaattaaaacattttaaaaaagaatacaaagtaaagatcaggtcgaaaaccactatttgattatgatacatgtatgtattttccatctttaaactgagatttaacacacatgtggtaaatgcacatctctatgatcaaaatatagaacatttccagcatacagaaaccccgttgtcaatctccacctgctccttcctgataattcccattctgagtctccttcaaaggttagttctgcctgttctcaaaattcacacaaaatcaaatcttacagtgtgtactcactctgtctgggtccttttactgttttgtgagatttatctatgttattaaatgtactagtactttgctttttcattgctgtatagtattccaatctttgaatatgccattatattttttatcattcacctgctggtggacacggggttgttccaatttcagatcattctaaataaagctgctatggatcttttctttcctctttgatactatttcactctttggttaacagcatgcactgtggaggcagactgggttcaagtctcagccccaccatctaccagctgtgtgaccttgggccagttagctaaacttgcagtgcctcctcagtttcctcatctgtataatggaggtcatatgatctactgaagggtaggaacattaaatgaatgagtttataaagctgttggaaaagtacctgactaccctaggcattaaataaacaagcaattatgattctgccccaactcccaaagtcagcaggaattcccaaaaatgaggacagcagcagctcaaagcaggaaagccaggaggtcacaggggacagtgcttccaggaactgggggtgctacctgcctacccttgccctagtggagggggtgtaacacagtagctttctcttacaatttatcagatttcattaaaagcatcccactgctcagccatccatgagtggatgagtccttctccctgtcaaccccagaccatcccccactgcctccctgaaattcttgaaagatccggcccatctcatgctctgatgctttccactagtcttttggatgacagatccctacccaacttcctgtttctctttctgtgggagactagatttaggaagtaaagatcacagggtgggaaataaaagctgtggcccccaggagttctggacactgggggagagtggggtgacatgagtgactccaaggaaccaagactgcagcagctgggcctcctgggtgaggctgggttgggacgctgggattctgggaagggggaagggatggccagccatggcctcagcctgcccaggctctgatttcacgtctatccattcagaggaggaacagctgagaggccttggattccgacagactcgaggatacaagagcttagcaggtagagaggacttagcagtttgggaggagagacgagagactcctggactcctgggtcctgaggagctggacgctggggcctggactcttgggtcctggggatgtggggctaggggcctggactcctgggacctgaggaggttgagtttggggcctgaattcctggttcctgggaaggtggaggctggggccaagactcctgggttctggggaggtagaagttgaagcctgggttcctgggtcctggggaggtggggtcaggggcctagactcctgggtcctggagaggtgggggcctgggcctggactcctgggtcatggggaggtggggacttgggcctgggttcctgggacctggggatgtaggggctgggacccagattcttgggtcttggggaggtgggagcaggtacctgggttactgggacctggggaaggggaggctgggtcctgggtccctgggtcctggggaggtgggagctgggggcctgggttccagggacctgggaatgtagaggctggggcctggattcctgggtcctggggaggtggaagcaggtacctggttcctgggacctggggaaggggaggctggggacggggtccctgggtcctggggaggttagagctagggcctggattcccaggtgttggagtggagggggctggggctggggttcctgggtcctggggtgctgagggatttagaccaggctctccctgggccaggctccggtggggacactggcaggctgacgcatgtatcctctctcagggtgtcttggccatggtccc

SEQ ID NO: 7878 - DNA, 6000 bp, Homo sapiens
tttttaaggcctaaaaaatcaccatggagaagttccacttcggtggctccgttggggtagctcccaacaggcaggacctgggctcccggtgggggaatcctcacgtctcaccctccgagagcctgacatccccccctgcccctttccattcctcagcatgtgacacatctgggctctcaggctggacaccgggtcacccgccagtcctttgctcccagactgtaaactttgttagggagaatccttctctgggctggtgtctaagagatggctggttgggggtgtcccctgggcctgtgagagatcacaaagctgccaattttactgggccttttttttccctccaatcttaaaataattttggttaggtctgggcacggtggcctatgctttcaatcccagcagcccaaggcgggagattgcttgagcccaagcattcaagactagcctgggaaacatagcaagatcccgtctctacaaaaacatttaaaatgagccaagtggcagggtgcggtggctcatgcctgtaatcccagcactttgggatgccaaggcaggcgattgcctgagctcaagagttcgagaccagcctgggcaacatggtgaaaccccatctctactaaaataaaaagttagccaggcatgctggtgcatgtctgtaatcccagctactggggaggctgaggcagtagaattgcttaaatccgggaggtggaggttacagtgagctgaggtcgcgccactgcacttcagcctgggcaacagagcaagattctgtctccaaaaaaaaaaaaaaaaaaaaaagagccaagcatggaggcaggcacctgttgtcccagctattagggaggctgaggtgggaggatcacttgagctcacgaggtcaaggctgcagtgagtcatcgcagcacagcactccagcctgggtgacagatcaagacactgtcactaaggaaataggtcgggcacggtggctaacgcctgtcatcccagcaccttgggaggctgaggcgggcggatcacctgaggtcaggagttcgagaccagtctggccaacatggtgaaaccctgtctctactaaaaatacaaaaattagccaggcctggtggtgggcgcctgtaatcccagctactcgggaggctgaggcaggagaatcgctagaacccaggaggcggaggctgcagtgagccgagattgcaccactgcactccagcctgggcaacagagcgagactgtcttaaaaaaaaagaaataataatttagggaaggagagtcccaggagaggtggttgcagccatgaagtaaaatgaggtgtctgggggccgactgccctatttcaggtggctgcagtggcctggggtgcaggctggggccgggggtcagggacagtgtgggtctcccacatgactgggggggggctgggagtcaagtggggtttgaaggtgtcacccatcccacttcccaggccagagcagagtccctgtgctcacctcccacgggtcgtgagaatgaagtgtgatcacagaaaccagggcagtgctggccccgggccagagggaacccacagaggtaaccctggtaaccaaacagcccctggaagagttgggggagctttcatcggtgacccggggccgccacctatggggcacggatggggttgcggcagtgggtgcccctccccaggccctgggagcctctagctgtcctcacgacatgatcctgaaacatagatccaaacaaaacatcgatagtcttcccacaccaggaaggagctgtgtcctgatgaggcctcagctgcttctcagagtcaaagcttggggttcgggggccaccagcagcaccgcgtacctggggtctggtctagctgtctgccccatccctggcagcctccctgtccctgcccgagtccatccctgtggggctcccagctctcatctcctcaggccacctcatctcaccctattcgctccccgacctgtgtgtttctttcccctggcttcttcgtattaagcgatccagaatcgttcttggctaattctattctgcacccagctcataaacaacttggaaaaagcagaggagaagatgtcagattttctttttaaatactcccctgcatggtgactaatccagcaggcatttatgagtttcgatgtggatttttttttttttttttttttttttggttttttgttttgtttttaccttgggaccattacgccacagctgactcgctttgccagggagctgctggtgccctggaaacacagctgaagttccagccacgtccacagaagtgtttttaaaatgtcacctttaagaaaccgaacaagtaggattggctctgttttttttttctctcccctccgcggatcagtcatttccataaaaagtagatgctatcagaacatcttttctctcatggtttcatgccaagcccagagaaacctccagcgaaaacgtgtctcgggggctgcttcctgtgcctggcacaggcgcagggggttgagggtgacactgggggctggtcagtgacagaggcagcctcaggctgaggacagatcctagaagaggcgtttgatctcaggccaagattcagagtgcggcgaatatggaagtattaaagatcagccaaggggccgccagcttagccctgggagtagatttgggattttgttccaagagaatcacccactttgctgattaatcctgttttcattgggtcatctggatagagtgttgttcccaggagtgggaagcgtgtgatctgggccagtaagtgggtggcacctgcctccccacttggacctgggttcttggcctctgccattgctggctggcggcagggcacctgggcgccagggtgtgtgggcagcagctctgtgtggcgtggtgcccaccctgggtggcatcacgcaggcgtgtcggcctctcattgcagacttacagccagctggcccaccccatccagcaggccaaggcactgggtctccagttccattctcgcatcctagacattgacaacgtcgacgtaagcacctcgcagtgggggcccgggccaccatcgggggtgggaactatggcccagacaaggcccaggaggtggccttgccaggggctgggggccatgggctgatccaagaggtcttgggcttgtccaaggggagggtctcgagggaggcctggtcctggcctgagaggcaaggcccacggggagggaccggtgctgggcctggtgctggagccttctcctagcagggcctaggcgcaggggtttcacctccaggggagcagccgggctgtcctctgaggcacatcccccctctcggcccctctgcagctggccatgggcaagatgatggagcaggggccggtgctgatcatcaccttccaggcacagctggtgatggtggtcaggaaccccaaaggcgaggtggtggagggtgacccggtgagtgagggagtgggatggggcaggcacatgacaccgcctgtccccaagatctgtgtgtggccacctggcagagaccccagctcagagccctgaagctctgggactgggtggggatgtggagaaacctctgggccagagtttggggttgagggaggtcggagaccagcagacctgtctgtttttaccaaggctgagtggttcctgagtctaggcaattgtgctggcctctgctcccagcccctggggaagttgccggtggctcctgccccacagagcctggcccccccccagagctgcctgggtcacctcaaccctctcaacagtgcccttcccaccccaccctgcaggacaaggtgctgcggatgctgtacgtgtgggcgctctgccgagaccaggacgagctcaacccctacgcggcctggcggctcctggacatctcggcctccagcaccgagcagattctctgagtgtggtgccggagccaggtagccccggcctgggtcatcaggcacagaggcaccgcaacaccacctgcggcaactccagacctctgggaacaagactgcgggctctgcccccagctctgccaggacggctgcaagaccagctggcccgggaggggacaacgggctgttgcgggtgcgcggcagctggagacactcccccgcagggccaacccctgccctgttgctctgccctgcaggggtcccggcgcctggtcacctggggtgcacacaggtcacacagtgccaagaggccccagggcccagggactccccccacagcagggtgggacccgggacccgcggctcagtggcccgctagccacgtcagccaagccactttaggtccattttttaattttaacagtgctcttccatcttgtgcataagcctgagatttggaaagaataaaacaccgaattgcagaagagcagctacggagtctgaagtgtcttctctggcgcgggagtggccgaggcgatggtgggggtgggagcaggcggctgctgtgggaggcggtcaaggtcgagtgaggaactgcagccgcagtgggtggacgccttgcccagggctggaccctgagttggaagacgaggccagtgacagacaaaactagggggacttactcatcccagtgacctgcctgagctctctgagaattgaggtccccagggccgggggagcttgagtgcccatatgagtgttttagggccactgaggtccccccacaaacagggagtctcgagtggggtctatcgcggaggagaatgcaggcacagggcaggctggggggcccgaagtgccaggggaggtgggagtggcagctgcccactccccggcgaggtcgtgggtgctcgcgggtcctcggggctggggttccgtcctcccgcaggcccgggcggggtcgctggctcgcgcgccgctccctgcgcagcctccgccccctgcagccccgccccccgcggcggccccgcccccgtcgccataggaacagccgcggcggcccggctcgcgcgctgcttgcctgcctcggtctccgccgctccaggggcgggtggggtgggctgagccggagcccgggccgccgccgccgccgccggggagaggccgaacgcgcagccggcgcgggtccctgagagagcgcggccgccgggcggtcggtccccgtccgggtcgaagccagggtgaggggcgcgccggggcgggggcggtgggggagggggtcccaggccgccgagaacaaagggagcgggggcaggggccgcggggaccgtccccacgccgcgcgcccgggccgcggccgcgctttcgcacctgttgtgtgcggcccaggccgggcgcggctccgtttcccggctctcagcgcccccacctgcgcgcacggccagagttgggtccccgcgtggtggtggcggcgatccggcgggccgggcatgggcgtagcccggggaccgaggcgcgggcgggggatggggtcgggcacgttaagggaggcggcggcggcggcggcaggagggggcgaagcggaggaggcgcgggagggagggcgcagcctcatccccggcgcccggggcgggtcccctcctccgcagggcgcgcggcgatgtgagccatgagcgcgacgtggacgctgtcgccggagcccctgccgccgtcgacggggcccccggtgggcgcgggcctggacgcggagcagcgcacggtgttcgccttcgtgctctgcctgctcgtggtgctggtgctgttgatggtgcgctgcgtgcgcatcctgctcgacccctacagccgcatgcccgcctcgtcctggaccgaccacaaggaggcgctcgagcgcgggcagttcgactacgcgttggtgtgaggggcgcggcgccccctagccggccctgcgccggggtctcagagggccggcccggcggggggcgccgcggggccaggactgcgctcaggatcccgccccggagcccccagcccgggggagagggggagggagttgggagaagcccagcccctccccctcgagacccctcccatgtcccttcc

SEQ ID NO: 7879 - DNA, 6000 bp, Homo sapiens
gggttacagacgtgcgccaccatgcccggctaatttttgtttttgtttttttgttttgttttgttttgtttgtagagacgcagtttcaccatgttggctagactggtctcgaactcctgaccacagatgatccgcccatctcggcctcccaaagtgcagagattacaggtgtgagccaccgtgcccagcctcgtatactattcttgcaattttttttttgtagctttgaaattttgcaaaataaaaagttggggaaaacaaagcactctcgctccttcccatatgttcttccagctgccatcatttcaccttctgtgcacagtgaatattcctgggaagagtctgtgttctgtgtcccagtattctcaaccaccgctgtgctggtgaaatgtttaataactggctcaccagagaaacaaaccaaccaaagagctcctgacttggaatgtctgccaattcctgtggtgtaaatactcccaccacttgtggctgatctgcttgtaggtgatttcaagctacaaagatggcatcatcaaacagaactggtacacaatgcagtgactcacataatatagtatttccagcacgcagacatcatatatgtaaataaccccaagataagccaggtgcagtggctcatgcctgtaaccccagcactttgggaggccgaggtgggaggatcgagtgagcccaggggtttgagaccagcctaggcaacatagcaagactctgtctctacaaaaagattatttatttacttatttgagacagagtctcgctgtgtcactcaggctagaatgcagtggtgcaatcttggctcactgcaacctctgcctcccaggttcaagcaattctgctgcctcagcctcccttctgagtagctgggattacaggcatgcaccaccacatctggctaatttttgtatttttaatagagacggggtttcaccatattggctgggctggtctcaaactcctggcctaaagtgatccacccacctcggcctcccaaagtgctgggattataggtgtgagccactgcacccagcctgtctctacaaaaaattttaaaaagtagccaggctctgtggcttgtgctggtcatcccagcactttgggaggtcaaggtgggaggatcgcttgagcccaggagttcgagatcagcccgtgcaacgtagagagaccctgtctctacaaaaaaatacaaaaatcagctgggcgtgatggtgcatgtctgtagtcccagctactcgggaggctgaggtgggaggatcacttgagcctggaaggtcgaggctacagtgagccgtgctggtgccactgcactcctatctgggcgatagagtgagactgtctcaaaacaaaaacaaaaaccctcaagagcacagatagtagtaacatgtagcagcataattaggaagtgatgaattttgcattattacttttgttctaatataatctatttgatcttaagtttatacaattaattgtttacatattggccatgtttaacaagaggctttgaattcttgaagatgtgccggctggctcttgcgagtcagtgcaagctggccccagcatgcctctgtaaaaccatctccactcactgaaatctggctcccaggcccaccactcacccaaaacccctcttgcttatctcaccaatgacctccatattgcaaaatgcaatggcggtggctacatttctgtccttgccttgcctgaactgtgcagcactcgcctctgctgtttccatctgccttctccaagttcctccagattgtcttcctttttttttttttttttgatggagtcttgctctgtcgcccaggctggagtgcagtggtgtgatctcagctcactgtaacctccacctcttgggtccaagcgattctcctgcctcagcttcccaagtagttgggactacaggcacttgccaccacgcccggctaattttttgtatttttagtagagatgggggttcaccatgttagccaggatggtcttgatcccctgacctcatgatttgcccatctcggcctcccacagtgctgagcgcagtggcacacgcctgtaatcccagcaatttgggaggccaaggcaggtggatcacgaggtcaggactcgagactagcacggccaagatggtgaaaccccgtctctactaaaaatacaaaaattatccgggtatggtggcgggcgcctgtagtcccagctactcgggaggctgaggcaggagaatgccatgaacctgggaggtggagcttgcagtgagccgagatcacgccactgcactccagcctgggtgacagactgagactcagtctcaaaacaacgacaacaacaaaaaattgttttttagagatggaggtctcgagggggcatggtggctcatgcctgtaatcccagcattttgggaggctgaggtgggaggatcacctgaggttcaggagttcgagaccagcctgaccaatatggagaaaccccgtctctactaagaacacaaaattagctgggtgtggtggcacatgcctgtaatcccagctacttgggaggctgaggcaggagaatcacttgaacctgggaagcagaggctgcggtgagccaagatcgcgccattgcactccagcctgcgcaacaagagtaaaactccatctcaaaaaaaaaaaggccgggtgtggtggctcacgcctgtaatcccagcactttgggaggccgaggcaagcggatcacgaggtcaggaaatcgagtccatcctggctaacatggtgaaaccctgtctctactaaaaatacaaaaaattagctgggtgtggtggcaggcacatgtagtcccagctactcgggaggctaaggcaggagaatggtgtgaacctgggaggcggagcttgcagtgagccaagatcgtgccactgcactccagcctgggcgacagagtgagactctgtctcaaaacaacaaaaaaagagatggaggtctcatgctgtcacccagggtggagtgcagtgggtgatcatagctcactgcagcctctaactaatgggctcaagagatcctcccacctcagcctcctaagtagctggaattccaggcgagagacaccatgcttggcttatttttttatttttgtagagatagggtctcgttatgttgcccagactggtctgtaactcctgggctcaaatgatgctcctgcctcaggctcctgagttgctgggataataggactgagccacggatcctggcttaaaggagtcttctatctccactttatctttgggtctttgacatgcttatatgacacactgcctctgagtgtccaatgctgtagttttctttctttcctttctctctctctctttctttcttcttctttttttttgacacaaggtctctctctgttgcccaggtagtgtagtgtagtgtagtgtagtgtagtggcacgatcacggctcactacagccttaacttcccgggcctcaacgatcctcccatctcagcctcctgagtagctgggactacaagcacatgctaccacgccaagctaatgttttgtatttgttgtaaagaagaggtcttcactatgttgcccaggctggtctcaaactcttgggctggagagatcctcccgcctcagtgtcccaaagtgctgggattataggcatgagccaccgcgcccggccaaactccgtactttcaaccacaactaagaatccatatttctagcccagaccttattcttagcaacacacctgtgtacaccaaccgcttaactagtttgctcctcttggcatcaagacatctcgaacaaagccagagtggaagccctcatctcttacccccaccttgagggggagctcctgagatggagaacacaagtctatccatcgcagaagccaggaatgcatgctctccggggccaagctgcctccctttgaaataatgaagtcccataaacccatatcacaggttagtaatgcaaaaagaccgggtgcggtagctcacgcctgtaatcccagtgactcagaggctgaggcaggaggatcgcttgagcttgggaattggaggctgcagtgagctagattacgacactgcactctagcctgggtgacagagcaagcctctggctctataaaaaaaaaaaaggatccaataagacaaacagcaacagcaacatacattagctctcccaggggaccaaccctcctcctcatacccggattgcatggccatgttaaaataccgccacctggtggcggcattcttcgaatggaaaatagcatctggggtgctgaaatgacaaaggcctgagcgtcttcagatcagagtgtcagttcacactgaatcgaagtaggactggaccacagtcagcccgctctcagcttcctcttcttattcggggtcaaaaccaacaggcgtcttcccaaagcgccgcacaagagtgggctccttcgctttctcggagcgactcacttgctggtctctcagccattgtcaatcaatcagtcattgcaggggcagccatagacaattactctggagctggtccgccggtcaatcagaatccaatcgaatccgtccttgtggtcggtggatccacgtgcctgtaccacctgccaccagcgcccggcgcgttctgtagccgaatcaccgcaagtgacggaatacacgcccctgggctccgccccctcgtagtcgcgcccaatcacagatctgaccctcccaggagtgccctcccccgggccacatccagtcacgggccccgtccttccaaaacactgccctatcagaggtcaagctctctaggcattccctacccttttaatgccccgccctatgacggacccaatcggagggctctccctacccgaaaccccgctcctggagcggcttttctcaggcttgcgcggctctaggccgaagcggcggatgacgcaaccgggccgcgccgcgagaaggtcacacgattctccaacatggcggcggcggccctgcggagtggctggtgccgctgtccacgggtgagcggcggtgcggcgctggcagggcgagcttaggggtcttctgggccttcggccaccaaggctttcttctcagacccttggccttcgcgacccttgcttgggctccttagaaagcttggggttagatctttgggtagcagaggccaggacagggggcacagagcgtggcctgagggcggggaccgagcttaccgggcagggggcggcgatgcgcgggacctgggagggagctgatcacccttcgccctctgatcagactccacgtatacaggagagagaatggtagccggggcggcggcgtcccgtggaaaaaagtagaggggaaggcaaaaaaacgtgaaattcacagctcgcggttaaatgccaagttctctaccgagagcatttcttgtctcgtttcttctaacgttcattgtggatgtgcgagaggtggttcgcgccctagcaggctcttgggtccacagggcagtggcagtcaagacgtgtaaggcgcactcagaaagtagtacttcatattgctcgtgctcttcgttttttcttttttctcttttttttttttttttgagacagagtttcgctcttgtcgcccagtctggagtgcaatggcgcgatctcggctcactgcaacttctgcctccttctgcctccgggttcaagcgattctcctgcctcagcctcaggtggatcacctgaggtcaggagttcgagatccactggcccacatggtgaaatcccatctctactaaaaccccatctgtactaaaaatacaaaaaaattagccgggcatggtggcgcgctcctgtaatcccaactacttgggaggctgaggcaggagaatcacttgaacccggcaggcggagattgcagtgagccgagatcctgccactttactccagcctgggcaacagagggagactccgtctcaaaaaaaaaaaaaaaagttatcctcaagtaaatacaggagatagtaggcacc

SEQ ID NO: 7880 - DNA, 6000 bp, Homo sapiens
actgcactccagcctgggtgacagagtgagactctgtctcaaaaaaaaaaaaaagaactctgtgaataggccaggcgcagtggtgtgtgcctgtaatcccagtgactcgggaagctgaggtgtgaggattgcttgagttctagacttgtttgagtaacacagcgagaccccgtctctattagaaattttttaggctgggcatggtagctcacgcctgtaatcccagcactttgggaggccgaggtgagaggatcactaggggtcaggagatcgacaccagcctggccaacagggcgaaaccctgcctctactgaaatacaaaagttaggggcgctgtggctctcgcctgtaatctcagcactttgggaggccgaggcgggtggatcgcttgagcccagaagttcaagaccagcctgagcagcatggggaaaccccatctctacaaaaaatacaaaaattagccgggtgtggtggtgtgcacccgtaggcccagctacttgaagggctgaggcagaaggatctcttgaacctgggaggtcgaggaagcttcactgagctgagattgcgccactgcactccagcctgggtgacaaagtgagaccctgtctcataaataataaacaagaaagaaaatacaaaaattagccgggagtgatggtgcacacctgtaatcccagttacttgggaggctgaggcaagagaatcactcaagcctgggaggcggacgttgcagtgaactgagattgtgccactgcacaccagcctgggtgacagagcaagagtctgtctcaaaaagaaggaactcagtggagtggtccttgttgtcaccttctgattcactggagtccagcaccagagtgtggcaagataccttgttcccacacagccccttgccatgcccccagagatgtgtgcatttcccagggaggccacttctgccttttccatttccttgaggctcctgggaggtcctgtgcctccacccctggggcgcctcctccatcaccccaccctcctgcttcctttcttgcttaggctgtgaagtgtgtgagctccacaggctcaggtgggtggggtgagaggggagggtgctcgtcctggacttgccggcacagggtctcctgggggctccctcttggccagctctgggccagagatgcgttttgcagttgccatttgcgcatggattctcagccccaccagcctgagtcttcctgagggcggtgccccatcttcctggctctgcgcccacacagtagcgcctgccatgcagttcttgcccagtctgaggcaggaatagctggaggccattgtcacctgatcgcttggcccttttgccagcatcctgttttgaggggcagcaggaatgggggtgggggccttgtgtacgctggagaccaaaagtgggaagggaggagcccagctctccacagtgggttctgggcctgggggccacagcagggggttcatacagggctcaggggagagaggaggcttgctagctcccacctggcgttggctgatcctctgaggggctgcgttggaggggttggcattctggaacaccctgctgtctgtcctgcaggtccagaaagtccctgtgggtgtgtttgtcccggggcaggtgtgggctccctcagatctttccacactgttctttggaaaccctcactgaagtctttccctcctccagctctgctgtagctgccactgagaagaaggcggtgactccagctcctcccataaagaggtgggagctgtcctcggaccagccttacctgtgacactgcaccctcacggccacccgactactttgcctccttggatttcctccagggagaatgtgacctaatttatgacaaatacgtagagctcaggtatcacttctagttttactttaaaaaataaaaaaatagagacagagtctcaccatgtttcccaggctgatcttgaactcctggcctcaagcgatcctcctgccttgacctcccaaagtgctgggattacaggcatgagccaccacacctggcctgattttatttttattttttagaccttcccactgaggcctctgcttgaccttggtcaccctgtagctcaacggggaaggcaaaggacagtgagggctgcttacagggaaggcagacctagggcagatcaggaaaggcctccctgagccagaaaccattatgctggggctgtgggatgagaatgagttagctccagaaggaaggcagctggttcctggggaggagatagaaatctggctgcaggagccagagttttcgcgcttgtcacccaggctggaacgcaacggcacgatctcaggtcactgcaacctctgcctcctgggctcaagcaattctgcctcagcctcccgagtagctgggactacgggtgtgcaccaccatacccgctaatttttttttttttttgtagagatggccaggctggtctcaaattcctgacctcaggtgatccgcccgccttggcctcccaaagtgttgggattacaggtgtgagccaccacgcctggcccctgattttaagcaatacccagcttacttggattttggggtgaagtcagtgctgagtctcccaactctgttggcactccaggggtgggacagacactgtccctgggtgcagaggccctggagacagcactgccctttcccccaaaggccaggctctgaccttgagagtggtgggagtgggtgatccttctgggaggttggactcccaggaccgctggctgttggggagcattgattgtgaagaccagtcaggtggggtaaggggtgtatgtgcggacactcagtaggccagccacagacttctcacttcttttttttttttgagacagagtttcgctcttgttgcccaggctagagtacaatggcgcgatcacggctcactataacctctgcctcctgggttcaagtgattctcttgcctcagcctcccgagtagctgggattacaggcgcctgccacaagcccagctaatttttgtatttttagtagagacggggtttcgccatgttggccaggctggtctcaaactcctgacctcaagtgatccgcccacctctgcctcccgaagtgttgggattacaggcgtgagccaccgcgcctggcctaacttccatctcttgagggctcccacagccacttctcacatgaaccttcctcagcaccttcccactgaggctcctgcttgaccatggtcaccctgcagctcaacggggaaggcagaggacagtaagggctgctcacagggaaggcaaacctagggcagatcaggaaaggcctccctgagccagatcccattatgctggggctgtgggataagaatgaattcgccccagaaggaaggcagctggttcctggggaggagacagaaatctgcaaagggagggtgtccaagtctggctgcaggagccacccagtgaccctacgcaggggagtgtcatggcttccccagggcacagccccagacccttcagcagctaaaaaagatcagctgtggaccaagagggtgctgagaccgccctgccctctggaaggggaaaggccacggctacaggcagcaggtaccagtgtcccagagtgggtcctacaaaggctaacaccttcctggagaaggtgggattctgcttggggcaaaaggatgaatcagattcagaaaggtcaggagggaaggaaagactaggcagggtgtgcagaggccacaaggagggcaagaccctaggcaaggcatgccgctgacggcatctgaaccaagttttatgaccacaacttttttttttttttgagacagagtctcactctgtcacccaggctggagttcaatgatgtggtctcggcgcactgcaacctccgcctcccgggttcaagcgattctcccatctcagcctccctagtagctgggactacaggagcatgttaccacacccggctaatttttgtatttttggtagagacgggagttttactatgttggccaggctggtttagaactcctgacctcgtgatccgcctgcctcggcctcccaaagtgctggggttaacaggcgtgagccagcgcgccggccaacttttctaacaaatggggtctcactgtcacccacgctggagtgcagccccaagtgattctcccacctcagcctcctgagtagctgggactacaaattagagccaccatgcccagctaattttcttttttcttgaggcgggcggggacttgctgtgttgcccaggctgatctcgaactcctgggctcaagcgatctgcccgcctctgcttcccaaaatgctgggatcacacacgtgacccaccgcgcccggcctttattattaaatttaattaattaattgatttcctttcctttttcccccccaagcaacccgactccgagaatggacgtttcatttattcatttactcaccaaatgtttactaagagcctactatgagtcaagcactatgtgtcagatcctgagaataaagcagtgagcaacagaagatccctgccctccagtagctagcattctatggggactcggacaacaaaccagaataagtaaataaaataaattacctgtcggcgccacaaaagcagtgggatgagggaggaaatgcggagtgcctgaggggcgtggctgccatattaaagaagatcacgaggcagtaacatttgcagcagtcctcatttggaacgggaaataatgcaaatgaacaccaacaaattccttcccatccccagaagtttctaacttcaagcgggctccatacctttcaactgatctggtcactggggaaagtggggacgggcctctaattctcttttccctgctattctgacatttacggtacgcgtagccgcgggcgccgcagaactcaggggcttgggccccgccccaaccccgcgcgtgcgcgtgcgcagggataagagagcggtctggacagcgcgtggccggcgccgctgtggggacagcatgagcggcggttggatggcgcaggttggagcgtggcgaacaggggctctgggcctggcgctgctgctgctgctcggcctcggactaggcctggaggccgccgcgagcccgctttccaccccgacctctgcccaggccgcaggtgagtgacgccccgcagcgcgggctcccacccctcgcgaggcttcgccccgccgccgcgcaccgacaacgcctagtcactggctgcaccgcacgtcagttcatgacactcccccagcacgtggacttggacttcatcgcttgtgggaaggcgcgcactggtgctaggaagaccccatgctgggggaggggaggagggtgtctccacctgcctttaacggttttgctccggccctgcacaccgtctccacacctgctgtgccctgtcgtcccccattgtcacctccaagccgcccttcataccagcgtggtcaggaaagctcttagcaggctcagattgtccgaccgctaatcacgcaggacgggtcacctggtgcctctcgcacctttgccttccaaaccctcgcgcccaggccttgtgaccgttccgcaaccgtccctgccctcccagtctctcctcctttgtcctccatccttagagaacgcgaggtctctcccccccatgctactgcaggctctcgcagagactggggtcacaagttgaatatacccccgtggacgtgttcgccctggcctaagaggtattggtggccagtggggacgggctccctctctgatacccctagaggcagctggagggttggagtggcctccctgtgcactcaggcactcccaacttgcagccctgggctcaggctcacacactttcccagctcctttgtgcattccgcacttctaggtccctggactcatcccaaagtccctgacattcacgttaaatgttcctgggtttttttttgtttgtttttttttaaggaggcagcgttcacgttaaccaagtacaaaagtttttgttttttt

SEQ ID NO: 7881 - DNA, 6000 bp, Homo sapiens
ggctcactgcagctcccaggttcaagtgattatcctgcctcagcctcctgagtagctgagattacaggtgcctgccaccacgcctggctattttttgtgtttttagtagagatggggttcaccacattggccaggctggtctcgaactcctgacctcaagtgatcaaccacctcggcctctcaaagtgctgggattacagacgtgagccagtgtcctggcaaccaaattcattttgaattgttgctcttggccaggcgcggtggctcacacctgtaatcccagcactttgggaagctgaggcaagcgaatcatgaggtcggagttcgagaccagcctgaccaacatggtgaaaccgtctctactaaaaatacaaaaattagctgggcgtggtggtgcatgcctgtaatcccagctactcaagtggccaaggcagaagaatcgcttaaacctgggaggcagaggttgcagtgagctgagatcgtgccactgcactccagcctgggcgacagaatgagactccatctctaaataaataaatagttgctcctggctgctgtgtggaacctggagtggattcagagagaagggtggaggctggcactgttctttaggggagcaatgatggtggcttggcgggtggtggccatgaaaataaacatatccttttattattcagtcaacaaatgtttaactgagcatctactatgtgccaagtattgttctaagtactgagggatacagaagcaaacaaaaccaagtccctgcctgatttgaaacagggacttgatttgaaatagccactgggccagtggctcatgcctctaattccagcactttgggaggctacggtgggtggatcacttgaggtcaggagttcgagactagcctggccaacatggtgaaaccctgtctctactaaataatacaaaaattagctgggtgtgatggcacatgctgtagttccagctactccggaggtggagattgcagtgagctgagatcgcaccactgcactccagcctgggtgacagagcgagactatgtctcaaaaaaaaaaaaaaaaaaaaaaaaaagatgaaacaggaaggtccttcactgagcagatggtatttgagcaacaccttagtgagggaggaaccaggtagctattgtggggagaacgttgagaccaccccatatgcaggtgctgtgcccgaggcttgcagggaggtgagtggatcaagtcgggccgcggtgttggcatctccgtggacggcccccttttctctcccaggggcctgcgaggtcaaccgccagaaccgagccggctactcggccctcatgctggctgcactcacctctgtgaggcaggaagaggaggacatggctgtggtccagagactcttctgcatgggtgatgtcaatgccaaggccagtcaggtgcgtgggcgcccccactgtggctctcagccaggagtcacttccactttgggagtcaacctgtgacctcccttccctgagcctaccccagcctgttccctcttcctccccactccccagacggggcagacagccctcatgctggccatcagccatggccgacaggacatggtggcaaccctactggcgtgtggggctgatgtgaatgcgcaggatgcggatggggccacagcgctgatgtgtgccagtgagtatgggcgcctggacaccgtgcggctgctgctcacccagccaggctgtgaccctgccatcctggacaatgtaagaccccacaatggggctggcatcttggggggtgcccatggcttggctcagggatctgactgtccctaacgttccacaggagggcaccagtgccctggccatcgccctggaggctgagcaggatgaggtggccgctctgctacatgcccacctgagctcgggccagcccgacacccaggtgagcacagctctggaagaaacaaactttcccagctgcaaattcagtttgcagaggatagtaaatatgccctgagcctccctttctgctccccaaaggtggcaccaggggtgcagaaccagtgtctggattctcctatgtggctgcttttcttttttgggagacagggtctcactctgtaacccgggttggggtgtagtggtgtgatcagagctcactgcagccacaaactcctgagctcaagggatccttctgcctcagcatcctcaagtgctgggattacaggtgtgaaaccagagcgcctggcaggggctgggatttgatgtgaaagcagcaaaaccccagtgaggttgacactaccccaggtcatgagactgagtcctcaaggggggaagtaacctaaggtcacagagacctagctaagacctttcatgcatgcccctgggctcctgttacctactgccagggaggctcttatcaaaggaaaaaggagccctttggcatcaggcagggtggggaagggggtccagagcttcagaactggagactgggtgagtttgcagaacacattaacccccaacaccactatactctgatggccaagtgccaggatgttttagcactttcataatccaagttatctaatcagcccactcatcctgtacaggttgaccccaatttaccatggctccacttaccattttttatttatttttgagatggagtcttcctctgtcaccgaggctagagtgcagtggggcgactgcagctcactgcaacctccacctctggggttcaagcgattcttctgcctcagcctctcaagtagttgggactacaggcacgtgctaccatgcccagctaatttttttttttcatttgaagacaagagtctcgttctgtcacccaggctggagtgcagcggcacaatctcagttcactgcaacctccacctcccaggttcaagaaattctcctgcctcagcctcccaagtagctgggattacaacagctgtgagccatcgcgcctggcacaacttacaattttttgacttcatgatagcataaaagcaatgtgtgcttagtaaaaaccacacttcagcagagtattcaataaattacataagacattcaatactttattaaaacaggcttcgtgttagacgagtttccccaactacaggctaaggcgttctgaacaagcttaagatggaccatgctaagctgtgatgtttgggagattaggtgtattaaacacatttcaacttgcaatactttcaacctatgatgtactcaccggaatgtaacccattgtaaactgaggaacacctgtactcaccccactggaagggatgtgggaggaaggtcaagcgcctcttccaggtcagaaggggcagaggttggatacaaaccaggcagcctgggtccatggtaaaagaacctccactaagtgaggctggggctgaatcccacgtttcctgcctcaaggagattgcagcaggcccccctcttttcccctctctccagagcgagtcaccccctggctcccagacagccacacctggtgaaggagaatgcggtgacaatggagagaacccccaggttcagtaagctgcctcgtctggctcactacacctagctgtggggagatctcctcgtcagtcacctcagcctttggcgcacagaagggtccagggtcccctgctcagaggctaacactggccgaagagaaaggcaatttcagttggggtgactgtggcaggaaggggctcactctggccccaccaaggtgaggtggggaccaagtgatagagccctgatccacccactctctgaaacttctttgctaataaaacattcctactacgcttgtgttttgtttggggtagagggtgcaatcgacaaacacgaccccccgcctcaaaaaggaaaagcttcgtttggcaagaccgcacggccaggatttccagagtgcggaggatcggtgaccgcctgggagccactcaagaaacctggagaaaccctagtcgtataacccagacaagaacctgagttaacttgaaacacaaacgctttatttaaaggagcatctcagttacgtgtggcggacaaaaaaaaggagcagactgtgacagaccattcccatcggccaagtggtcgaacccgacatccaagaccctgtaaacagacccaaacatgagatgttgacaggccccgcagcaattggcaaactcccgcctccctcttgtcagtctctgtatgtagactctgcctcccaaaccctctcaccctgggcttaacgaagcctccctaccaccaaccaaaggtctatcaaaggggtgtcctctttgcacccaccagcgagcagccaagctcagcgcaacctccgggcttctcgctctgactccaaaagggtgagcacgtcgccctcgcgcacggggccttttacattgcggatgatggatcggctcgtgtcgtccatgaattccacgcgcacctacgggtccccaccggagtggaggaagaagtaagggcgggccgcggaaaggcaccgcggagtgggaagcagatatgaattcagagaacgtgtcggggccagaatacagatcgttaaagggaaccatcagaaccccgtgatgaaatgagaatcggctcccggattccggctggcaggggttagggcagggtagaggtcacatcagggtttaggtcgccggcagtcggccaaatgcccccacccgattacctgcgtgcactgtccctgagaaccggtcctgcccaggaccttggtgacctggaggaaagaagctgggttcagacccggcccgtttggctcctctaatccctccccctgcccccaaattcgggcccccacctcaccctggccagcttgataggctgcacacggctggtgtccatgatggcggcgcggcggcggtctggcggagaggagtcacgtgcttcggggagagcctttataggacgttctagcaccgcccactcccgtctcgcgataccacgccgcgtctttcccagcagccccagcggtggagacgtcaccggctgcgcccttcagtatcgcggacggaagatggcgtccgccacccgtctcatccagcggctgcggaactgggcgtccggggtgcgcggggcggacagggctgcaccatggggggcttcgggctccgtgtgtccgggacccgctcctgctcctcacctccctcctaagccgggacccttcgctctccccgaatctccctgggaacccccagctagtcaccccttcagcccgggaccctctcctggcctgggaaccactcaggcctgggatttccccagtccccgaccttcttagccttggatctgtgggcccggactctggctttgctcttcacctgcaggacccacatccgtttccccgagtgttcatcccctgccttcccttaaaatgcgcatccccggaccatccctggtcccttgccctctcctttcctctctcctggggtgccttgcaggccgacctctcctctcctcttcccacagcatgacctgcaggggaagctgcagctacgctaccaggagatctccaagcggtgagcaggccccgctcgctgcccagcctctggctctgtcctttctccaccaaaaacgaaatctgtgttcctttagacccctgaaacggagggctgacatcctgccaccagtcccctgccaggctgtggaggcagaggtttgcctttaaccttgctgaactccggaggacagccctcctgaaacagcgaggccgggcgtgcattctgactggcaatcaggctagatttgcagtgctcagcgtggccatgttagtcagtgttatccccaagctacagatgaaaaaagaggtccagagaggcgaaatcatttgcctcaagtcactcagaagctaaaaagtggcagcggggacttgaacccagaagtgtcctgatttcagactcatttatattaaaatattagttgatatttacaagcccccgtcatgtatgacctcagccttgggtttaactttgtgaaccaggaaagttcttatccacattctttca

SEQ ID NO: 7882 - DNA, 6000 bp, Homo sapiens
ttttagtagagactgggtttcctcatgttagtcaggctggtctcgaactcctgacctcaggtgatccatccgcttcagcctcccaaagtcctgggattataggcatgagccaccgcacctggctcgtcttattatttctatacataatatatgctcttttggctgggcgtggtagctcaagcctggtggcagacgcctgtaatcccagctacttgggaggctgaggcaggagaatcgcttggacctggaaggcagaggttgcagtgagccaagactgaaccacctcactccagcctgggcaacagagtgagaacccatctcaaaaaatactgataataataagatcatcttcagaactcagttcctggtgcatgaagagattcaatacagccccctcactctcagttcttagaaagaagaatatgccagcctgaccaacatggtgaaacccccgtctctaataaaaatacaaaaattagctgggtgtggtggcgcacgcctgtgatcccagctactcaggaggctgaggcaggagaatcgcttgaacctgggaggtggagattgcagtgagcccagcctgggagacagagcaagactcattctcaaaaaaaaaaaaagaagaagaatatgaaagagataggatcaataactaccttcattgtttaatagcctaagagtgaaagcccagcacagtggctcacccctgtaataatcccagcactttgggaggttgagttgggaggatcacttgagcccaggggttcgagaacagcctgggcaatatgtcaaaagctcctctgtagaaaaaatacaaaaattagccgagtgtagtggcacacacctatagtcccagctactagggaggctgaggtgggaggatcacctgagcctgggaggtcaaggttgcagtgagccatgattatgtcactgcattccagcctgggagacagagccagaccctgtctcaggaagaagaagaaaaaaaaaaaagccaaatctttttatcccaggatgtctgaaaaggacagagtctatggagcatggatgcagaaaagtagttattcctaccagaaaaaaaaaaaatgaaatgtggacacagccactcaagatcagagactcaaccagtgaaagcaattagcttcaatttcattgtcaccaggagggcgcacaccagagaacctgggagaaagcctgggctagagcccttagcattctcagtgttactggtgctgtggttcaacaacctttgtgggaatgaggagaaccagagaccatcaccatcacacgtaaaaaggatcctatagcaacaatgtggctgtcaaaaatcagctggaggccaggcgcggtggctcacgcctgtaatcctagcactttgggaggccgaggcgggcggatcacctgaggtcaggagtttgagactagcctggtcaacatggtgaaaccccgtctctactaaaaatgcaaaaaattagctgggtgtggtggtgcatgcctgtaatcccagctacttgggaagttgaggcgggagaatcacttgaacctgggaggcagaggttgcagtgagcccagactatgccactgcactccagcctgggtgacagactgagaccctgtctcaaaaaaaaaaaaaaaatcagctggagcttaaattatacattgtttgcaatccagactgtacttgctttcttgtcaatggcttgagatatgtgcagaggccccttaaacatgtgtaggtgacctttctctgtcgcccaggctggagtgcaggggcacaatctcagctaactgcaacctccacttcccgggctcaagcaatcctcccgctgcagcctcctgagtagctgggactacaggtgtgtgccatcaagcttggctgatttttttgtactttttttttttttttcgagatggagtctcgctctgtcgcccaggctggagtgcagtggcgcaatctcagctcactgcaagctctgcctcccgggttcacactattctcctgcctcagcctcccaagtagctggtactacaggcgcccgccaccatgcccagctaatttttgtattttttttagtagagacggggtttcaccgtgttagccaggatggtctcgatctcctgacctcgtgatccgcccgcctcggcctcccaaagtgctgggattacaggcgtgagccactgcacctggccgattttttgtatttttagtagagacagggttttggcatgctgcccaggctggtctggaactcccgacctcaagggatccgcctgtctaggcctcccaaagtgttaagattacaggtgtgagccaccacgcctggcccagaaatactctttttttttttttttgagatggagtctcactctgttgcccagcctggatggagtgcagtggcgcgatctcggctcactgcaagctccgccttctgggttcacgccattctcctgcctcagcctcccgagtagctgggactacaggcacctgccaccatttttttttgtatttttagtagagacggggctaatttttttttgtatttttagtagagatggggtttcaccgtgttaaccaggatggtctcgatctccttacctcgtgatctgcccgcctcagcctcccaaagtgctaggattacaggcgtgagctaccacacctggcccagaaatacttctttatcagaaatattactgacgggtgtagcagggcacgcctataatcccagcactttgggaggtcgaggcaggcagatcccttaagcttaggagttcaagaccaacctgggcaatatggtgaaagccgtctctacagaaaattagccaggcacagtggtgtgtacctgtggtctcagctcctagggaggctgaggtgggaggatcacttgaacccaggaggctgagattgcagttagctgagattgtgcccctgcactccagcctaggcgacacggtgagactctgtttcaaaaaacaaaaaagaaatatgacttatttacaaatatttctttcttttttatttttagagacagggtctcactattacgtaagtattataaattatatatatatgtttgtttgtttgtttgtttttctgagacagagtcttgctctgtcacccaggctggagtgcagcggcacaatctccactcactgcaacctccgcctcttgggttcaagtgattctcctgcctcagcctcctgagtaactgggactacaggtgcccgccacaatgcccagctaattttttatatttttggtggagatggggtttcactgtgttagccaggatggtctcgatttcctgacctcgtcatccacctacctcagcctcccaaagtgctgctaggattacagacgtgagccagtaagtccgacatcttttttttttttttttttttttgtggaaacagggtctcactgtgtctcccaggctggagtgcaggggcacaatctcgactcactgcagctttgacctcccaggctcaagcgatcctctcacctcagccttccaaggagctgggactacaggcaccaggcccatgctactggtccctgctgtttacaaatacactagacttgggttttagctgctctctcaacaccaggtgggaaatggattgttcggaaggtagaggaatagaggagggacctgcttaggaaggtgggggtgctctagatgagagaggaggtgctgtgacctcaaggtctggggaaagtgggtgagtgcagggccccatcaaggctctcaacaaggcctctctctctggagctcagatgtgaagcccagaaggcaggtcagaggcctgaggtcagaggcaggtcaaaggtgggggtcccacctggtccccttggcgccttcccttggaatgcagtgaccagctgcctggaagggtgggcaaggggacaacaggatggggtaaaggccagttacaagtagaatcctggaaggccgggcgcagtggctcacgcctgtaatcccaacactttgggaggccaaggcgggcagctcacttgaggtcagaagtttgagaccagcttggccaacatggtgaaaccccgtctctaccaaaaagtacaaaaattagccgggcgtggtggcacatgcctgtaatcccagctactcgggaggctgaggcaggaaaatcgtttgaacccgggaggcagaggctgcagtgagccgagatcccgccactgcactccaacctgggtgacagagtgagactctgtctcaaaacaaacaaacaaaaaccaagtagaatcctggatagacagtggctcagggactcagctgtccccaaatcacctaccttagctctttgtgcaggggatgggggatccccaagatcttcaaagatagggaggtatcctcaagatcttcaaaggtggccaggcgtggtggctcacgcctgtaatcgcaacactttgggaggtcaagatgagaggaggccatcttaaggccaggagttcaagaccagtcggggcaacatagcaagactctgcttctgtttctgtttttgtttttgttttttaatgtttcctcgaaatcccaccttaacatctacacaatggtgcctacagttttccccattaacttcctctctggggacagaatattcccctacccacctaagttcagccagaaggagatgcctcatcccccccacccaggcttcccagtgctgagaacaaaagaaaccagtttagttagcatttcctgtgaattcaaatgggggccagcagtgcaactgggaccagcccattccctgggggagactcagcagtgctggccactttgcagagccccgtctgggtcccccaccctggcccccaagggccacagcatccccttccacccacaggcctgggcaaggtgcagtccccagacttctgcaatcttaaccgctgtgcttccgtcgcagtgggaggccccgccttttcccctgcctgcccttcgggcacctcaggaaggcaccttcctctgtcagaatggccaccatggtaccatccgtgttgtggcccagggcctgctggactctgctggtctgctgtctgctgaccccaggtgagaccagtcaagccggggagggctggagagggctgcgttttggggatcagtagagggtagaggaatagaacgcaacgctgttcacatcctgccacactgcgacctggccgctgactctgtatcctcgggagaaagttctggttccttagttcagccttcaggtggtcaggccccagcataggcttgtacgccatccctctcccctaacacacacacacacacccctcatgcttcctgctccatctgaactcctgaaatttgccctttgcgtatgtgcttccctctgccaggatcacctgtccctttcacttgctaactcctacttagccttcagtttcgggctgcaatggtccccgcttccaggaagccttccctgactcacctcctcctatgctggatcagagcctcttctggcctccttctgagttctccccggtctctgatggattctacctttcccactggaccatgaaggcaggaacccttctgtctcggcacaaggagagaggtgttaaatggtggggcctgttgatgcgtgggttgggggacaaggaaacaaacaccaggacttcttcatgttcctgaaggtgtccaggggcaggagttccttttgcgggtggagccccagaaccctgtgctctctgctggagggtccctgtttgtgaactgcagtactgattgtcccagctctgagaaaatcgccttggagacgtccctatcaaaggagctggtggccagtggcatgggctgggcagccttcaatctcagcaacgtgactggcaacagtcggatcctctgctcagtgtactgcaatggctctcagataacaggctcctctaacatcaccgtgtacagtgagtcgacgtgtccggaggtgggactggtcttgggtagtggtgtgggcaagtggccaatggctcaggagagtggggaccct

SEQ ID NO: 7883 - DNA, 6000 bp, Homo sapiens
gctagagaagtttttttgtttcacttttctatcttttcctctctataatatgtgtttaaaaaacctcctacaacaaaaagatgaacaacccaatttttaaatgggcaaaagacatgaatggatacctttccaaagaagatatacacaccaccgagaagcagataagaagatgctcaaccttactaatcatttgggaaatgcacatacactaggttggctataataaacaaacaaacaaacaaacaaaaaatacaaaacagggccggtcacagtggcccacgcctgtaatcccagcactttaggaggccgaggtgggcagatcacttgaggtcaggagttcgagaccagcttggtcaacatggcaaaaacctgtctctaggctgggcgcggtggcttacgcctgtaatcccagaactttgggaggctgaggcaggcagatcacgaggtcaagagattgagaccatcctggccaacatggtgaaaccacgtctctactaaaaatacaaaaattagctgggcatggtggcatgcgcccatagtcccacctactcaggaggctgaggcagaagaatcacttgaacctgggaggcagaggttgaagtgagccaagatggtaccactgtactccagcctggcaatacagcaagactccgtctcaaaacaaaacaaaacaaaaacaaaaacaaaaacaaaaatctgtctttattataattacaaaaattagctgggtgtgttggcatgtgcctgtaatcccagctacttgggaggctgaggcaggagaattacttgaacttgggagatggagattgcagttactgcactccagccaaagtgaaggagtgagactgtctcaaaaacaaaacaaaacaaaaaacaaaatgcaaagtaacaagtgttggtgaggatgtagagaaactggaaccctcatacgtggttggtgggaatggaaaacagtacagccactgtggaaaacactttggttgttcctcaaaaagttaaacatagaaataccataggatccagcaattccaccacgagatctataccccaaagaactgaacgcaagtaataaaatacacatacatacatgttaacagcagctgtactcacaatagctaaaaggttgaaataactctactgtccctcaataatgaatggctaaagaaattgtggggccaggcacagtgactcacaactgtaatctcagcgctttgggcactgaggcaggagaatcacttaagcccaggagttaaagaccagtctgggtaacacagggagacctcttgtctccacagaaaaataattagccaggtgtggtggcgtgcacctgtagtcccagctacttgggaggctgaggtggatcacatgagttcgggaagtggagggtgcggtgagctgtgatcacaccactgcactccagcttgagtaacacagcgagactgtctcaaaaaaaaaaaaaaaaagaacaaaagaaaaattgattgtggtatgtacatacaatagaatactactcagccataaaaaggaattaaatattgatacatggtctaaccctagaaacatgctaagtaaaagaagttcaatacaaatggtgacacattgtctgcttctattcatatgaaatatccagagtaggtaaatccctagaggcaaaaagcacatagctagttgagaggcggggggcaaagtgtaatgaggagttgatacaggagatagaaagtatttaggcaggcagtgagggcaaagagtcctcagcagaatttcttttctaacagaaagtagcccctgatatcatttcttttctaataaatagcagcctgaaaactcaagctgcaaacatagataaggaagctggaagcttgcacgtgggaatgctggcagctgcaccaacagaaaatggctacctgggagccaggcatatccaacacggaggctccatctccccttttttgctaccacgtgtacaggaactaagaaatgggcaacatggggctggtcaaggtggctcacaccagtaatcccagcactttgggaggccaaggtgggcggatcatgaggtcaggagttcaagatcagcctggacaacatggtgaaatcctgtctctactaaaaatacaaaaaattagttgggcgtggtggcaggcacctgtaatcccagctactgaggcgggagaatcccttgaacctgggaggcggaggttgcggagagcctaggtcacgccactgcactccagcctgggtgacagggcaagactctgtctcaaaaaaaaaaaagaaaaaaaaagaaaaagaaatgggcgatgtggcacagctcaggtagagaccccggctgcataataaaagattagcagataccagaaattcacaccctatgcaaatggcacacctgttctaaccagtttttcatcccctatgtaaatcaggctaagtctcctcaccagctcatctataaacccccctgtattttgctatggaccagcaacccatttttctgggactcctctctgtagcagagagctatactctccgttgcctattaaacgttcgttctcaacctcattcttttgtgtgtcctggtccttgttcttcgtggctgtgagacaacgaccccgggtgttactcaagacaacgaggccgtttcagaatcactgcttaatgggtacagggatctttactgagccgatgaaaatgttttggaactacatagaagtcactgcacaacactggaatgtactaaatgccactgaattgttaattttaaaatggttatttttattttctttttgacacggagtcctgctctgtcgcccaggctggagtgcagtggcatcatctgggctcactgcaagctccgcttcccaggttcacaccattctcctgcctcagcctccagagtagctgggactacaggcacccgccaccacgcctggctaattttttgtatttttggtagagacggggtttcactgtgttagccaggatagtctcgatctcctgacctcatgatccgcctgccttggcctccaaaagtgttgggattacaggtgtaagccaccacacccggccttaaaattgttaattttatgcaatgtgaattttactgtatttaaaaaaatcaattttagtaatcccaacactttgggagggtgagggagcaggcagatggcttgagcccaggagtttgaaaccagcctgggcaacacagggaaacctcatgtctacaaaaaattagttaggcatggaggtgtacacctgtagtcccagctactcaggaggctgaggtgggagaatcacttgagcccaggaggtagagattgcagtgagccatgatggcgtcactgcaccccagcctgggcaacagagcaagaccctgtcctaaaaaaaatccggccgggtgcagtggctcacgcctacaatcccagcactttgggaggccgaggtggatggaacagaaggtcaggatatcgagaccatcctggctaacatggtgaaaccccctctctactaaaaatacaaaaaattagccaggtgtggtggcacgtgcctgtagtctcagctactcggaaggctgaggcaggaggatcgctggaaccccaggagacggaggttgcagtgagtcgagatcgcgccactgcactctagcctgggcaacagagggagactctgtctcaaaaaaaaaaaaaaaaaaaaaggaaaaaaaaattaaaaaaaaaaagaaaaaaaagaaaaggagtcacccgttctccactgttacttcaaattgtccaagcagtgagtgtaaatgatagaaaaagttggagtgaaaaggaataccaaactgatattacaaagagctacttccccaaattctccaaatgcaggaaagtgctgacaacagccagctgtatttgagggatctttgtcatcacctgccaaccttttccgggtttatctttgaagactaaacatctccctgtacacagtttatgtttagacgggaaccaaataacagattattatttactgagggcctgtgatgtcccacgcactgcggaagcaagcactcaacaagcatttcacgtatcctaaagacagcccagtagcgtaggcctattatccccattttgcagaagaggaaactgaggctcaacagagggaatgcctcaagtaatgggtggggcaggagctgaaccaggcaacgtggctcccagtcccacactgtccttatctcttcctacctgggctgtcgtttttctgacccgaggctactgtaatggctctatttacctgctggcccttgagtctgagacccttggggtgcatggtggggccacgcccctccactgtctataagccaggaaagctgagcactcaatatgaaccaagcctcatctcaattctcacagccgcactacagggtggtcgttccatcactcccgacttacgaggaaactgatacgctgatgcctctaaggcgcaaaaggcgtcgaacctggaccacgctcacagagcaagcaaaacacgacgccacaggtatctccgccccgccccagcccttttataggcgagccctacgggtcgcgtacagggccacgcctagacgctatttttgggtccactccaccacgtcggtcccgccaaaggttgtcacgcgcggcgcactctgggaaaaccacgtggaggtgactaaaaaggaccctgccgcctgtaactttagttgtcttagctactgcctacaaaagatgcgccatcatggcacttatttttgtaattttcctccaccagcggccgagaagagagccgaagcctttgagaaaaatattcccagacggttgagtgtttctgggcacatcaggcattcattcgggccgcctgccctctagtgggggggtccttcactcctggcacctctggttacggacaacatacagaagccactgccaatgagctccgccgagtagcaccggggcagggctagcgcttaaaggagccgcgacccctttgcagaccagagggtgacccggatgatggcggccggcgcggccctagccctggccttgtggctactaatgccaccagtggaggtgggaggggcggggcccccgccaatccaggacggtgagttcacgttcctgttgccggcggggaggaagcagtgtttctaccagtccgcgccggccaacgcaagcctcgagaccgaataccaggtagagggtcgcgggctgggcggccagcagagtcagggagagggggcgtggccaagcggtcgaggcgaggcgcgctttaggaggaagggggaggaatccgtgcttgggagcgcgggggcggagctagaaagagatggacagatggggcggggacggtgtgtgggagcggaaggggagggagtaatgaagcaggcggggctagagtaagagatccagagggggcggggccatcgataagtatagggagcctctgagaggacaggactctggctggtgggcgtggcgatagtgctgataggtcaactgcgggggcgttgcccacacaggcctttctcgggggttagactaaggaaaaaggctgggcctatcctctttcggaggcggagccaaccaggggcgtggtcaggtaaacgtccattaagtacttttggtaggtgcgtggtcagctgaaagtatggaccccaagctgtcatatcaatgagggtggaggcaaggggcgcagccactgggacaggttggggcgggtgtgggtgtgccgccgttcaggtaagcccttggtggtctgtattgatcagtgttggttcagccgtagccctcttcggcaggcgcccttggcctaccgctagccctccacccgctcttacctgccccccaggtgatcggaggtgctggactggacgtggacttcacgctggagagccctcagggcgtgctgttggtcagcgagtcccgcaaggctgatggggtacacacgtgagttcagtcttgatgcctgcctgggttcagttacagccctgcccttcccaggcggcct

SEQ ID NO: 7884 - DNA, 6000 bp, Homo sapiens
ctcagctcactgcaacctctgcctcccgggttcaagcgattctcctgcctcagcctcctgagtagctgggactacaggcacgtgccaccacacccaggtaattttttgtatttatagtagagatggggtttcaccatgttagccaggatggtctcgatctcctgacctcttgatccacccgcctcggcctcccaaagtgctgggattacaggcatgagccactgcacctggcctattctttaatctttttaaatgtctccaccaagcaaacaccttgagaagtccttatcagttattaaaaatctacaatgcaaacatacaaataaaaggagaacagtaagttctcttaaacattctgatactacttctaaacttagccaataaactgagaatgaatgttaattttttaaataaacaggccaggggcagtggttcacacctgtaatcccagcactttgaggggctgagttgggaggattgcttgaactcaggagttcaagagcagcctggacaaggtgacaaatccctctctctacaaaaaatacaaaaattagctgggtgtggtggtgtgtgcctgtagtctcaatccccaggaggccaaggggtgtgggaggatcccctgagcccagaaggtcgagtctgcagtgagccgtgatcgcatcactggtctccagcctgggtgactctgttttagaaaaagaaaaaagaaagaaaaaaaaagctttcattaactgaagacagactgaaagcaagagaaactgaaagcaagataaatgagtgggtggttttctcaagcactggtaagtgctgcagagaaaactacagcaacaggagagtcaatgatgggggcagggtggtgcatttcagataatttcagataaattatctttttctttttttttttttttttttgagacagagtctcactctgtcacccaggctagagtacagtggcacgatcttggctcactgcaacctccgcctcccaggttcaagcaattctcctgcctcgacctcctgagtagctgggaccacaggtttgtgccaccacgcccagctaatttctgtatttttagtagagatggggtttcaccatgttggccaggctggtctcgaactcctggcctcaagtgatccacccggcttggcttcccaaagtgctgggattacaggcgtgagccaccacgcccagactcatttcagataaattaaaggaacttgaacacaatgggtgacctcagtatctgactaaggaagacccttccaggcagggagaacagaaagtgccaagaccctgaggccagagtgtatctgagacagtcaagcaatgcggaggaggtcagaggagcaagaaacagggaaagcaggattggcaggaggaaggaagggaagggattgggtagagacagcagcggagaacaggacctggatgtattggcaacaggaggaactcactcgtggggttgttgacatctgagattgacactggtgttgggaaaataggaaagggtggaggtggagggagattctgagtcacagcctgatctagctccacagaaaatcagcagaagagagttctcctgggtgaatggagagagaagagcttattcagcaccctggaggagaccagagagagatagccaagaacgcacaggttttattacatgctctgtgcaagatcaggtttatttttttcattgtgctctctctctctctctctctctctctctgagacaagagtctagctgtgttgcccaggctgaaggtcagtggtgcattcgtagcttattgcagcctcaaactcccaggctcaagcgatcctccacctcagcttcctgagtagatggaaccacaggtgtgcaccaccatgcctggctaattttttttttttttttttttttttttgtagcaatgtggtctcgccacgatgcccaggctgttcctgaactcccgggctcaagcgatcctcccacattggctgggtttacaggcctgagccaccatgcttggccagctttttcaatttaaaaaatatagaaagtgttaatacaaattaaaaagttataaaatagtgccaatagtatcccatttttccgaagacaaacataggcagagaaaaattaatggatactgtctctctgggcaggggtattactggctattataatctttttcttcgtgcattccagaatttaccaacttttctacaaagatcatgtagcacaataagataataaacataattttgtgtgatctcaaaatacaggaagcatagaagcttccaaaacacgcctgtacccaccacgtgaagaaacagatgttaacatttggtcataattgcttcagatttctttctttttttttttttctgttttttttttgggggggacagagtcttgctctgtcgcccaggctggaatgtagtggcatgatattggctcagtgcaacctcctcctcctgggttggagtgcagtggcatgatctcagttcactgcaacctctgcctcctgggttcaagagagcacctccagctaatttttgtctttttagtagagacaaggttttgccatgttgcccaggctggtctggaacacctgacctcaagtgatccgctcacctcggcctcccaaagtgccaggattacaggtgtgagacaccacaccggctaaataataagtttttaaaaaaacaggagactggccaggcatggtgactcacgcctgtaatcgcagaactttgggaggctgaggtgggcagatcacctgagatcgggcattggagaccagcctggccaacatggagaaaccccgtctctactaaaaatacaaaattagccgggcgtggtggtgcgtgcctgtaatcacagctactagggaggctgaggcaggagaatcgcttgtacccgggaggcggaggttgcgtgagccaagattgcgccactgcactccagcctgggcaaccagaataaaactgtctcaaaaaaaaaaaaaacaaaaacaggccgggcgcggtggctcacgcctgtaatcccagcactttggaaggccaaggtgggtggatcacgaggtcaggagatcgaaaccatcctggctaacacggtgaaaccccgtctctactaaaaaatacaaaaaattagccgggcgcggtggcggcgcccgtagtcccagctactcgggggtgctgaggcaggagaatggcgagaacccgggaggcagagcttgcagtgagccgagatcgcgccactgcagtccggcctgggtgaaagagcgagactctgtctcaaaaaaaaaaaaaccaaacaaacaaacaaacaaaaaaacaaaacaacaggagaagatgatgacagacctcacaagagcttggccccagggctgaaaccccacccagtgctgtggttctgcggctgtgggcccatgggtgcccccaaagggtcccaggcagatggaggctcctggttggcgtggaggaaggaaaaggatgaaatcggctcccctggccaccccttctagcccagctgcagctgcagtccgtgggtctgagccgacccttggggttcatcggcccattttacagatgcggagcctacagccgggaggcgtggcggctctgggcggtgcagggttccggggcggggaggccgaggcgcccgccctccccgccggggctcacctgggtcagccctgagccctcgagcagggcggatcggccgctgcctgcttaaagctggggccgccaggagtgcgatcgcctgcggatctgcagctgggcaccggccgcaacgcccgccccgcgacggcaggtgagatgcgggcggccccgtgggaggggtctctgcctgtcctcgtcacccacttccttcccgtttgttgctgctgcagggctgggaatgggggggaccaagcacttcgcagggtgacccggggagatctgtgagccagtggcctcagcgttgaatgagagctctctcccgggtccgcgctcgcagggactgaagggactcctgaatgtccgcgggacgtgtcgcggcggcgcccagcacggaggaggcaggcagggaggtgaggagcaggtcagaccggccgcaggtgcagggcctcctgccctcccaggctgcggtcccgtggagggcctgcagacagctgctgagactatgagggtcagaggtctgtggtcacgcgcgctatcaccagctagctgcctcctgcctggttcctcctgcaggaatgggagtctggggggaggggagggtgtgggcaggacttcctggaaaagggaagcccgttggtgtttatgtgtgggatggagagagggcagggggaggacggggacacacgcggagtcccccacccagatgttgtcaaacacagctcccacaccagacacgcaacccatcctagagatgcaacccaggcacacacacatggacacacacaaaactccatccatagggattcccacccagtgccacgtgagaacacaggcgtgcatcgcagacaagccacacaggcctcgcaggctcagcatacatgtctgcagcaacaccatcaggtacagagccgaggcccaggtaggcatgctcagctgcacgcaggaagcaagacacacccagacacacacaggtaagcccttactcagagaaagaaggtgcaggagatgtgtcttgggtaatcacagccacagcctctcaagtgtgcacacacacacacactcacactgagatacacagacacacagagatacctggacgtgtcaagcctacagcacaaacaggcccctgcaggtccacccggaggctgtgtgggccgaggctgctgcacacgtgtgcccagatcctcccacccccaccccaatcccgtgtcctgctccagggaagtccagggctcacatgacccaaggggagggctcccgggacagccctcggagaaactgcatcatcctcactaatgatccacttcctcctcagggaataaaggctcagggaccggcagttctactctagagcccaccagcctctcagagcctccggtgactggcctgtgtctccccctgggtgagtgctgggcaggctaggtggaaggagggtgaaatgggcctgcagggccatcttggtacagctcgccctctcacagaccgcgccccccttccctaagccagcttgtgcagccttgtgcagcttgtgtgtcctgagaattagggcaccaaggggttcccgcaggggcagcctgcagcaagcagtctccctctatctcagggcaggcgggggtctcaaggcctccctgcccttgtcacagcccgggccacctatgcttgtctctcttctcccagatggacatgtggacggcgctgctcatcctgcaagccttgttgctaccctccctggctgatggtgccacccctgccctgcgctttgtagccgtgggtgactggggaggggtccccaatgccccattccacacggcccgggaaatggccaatgccaaggagatcgctcggactgtgcagatcctgggtgcagacttcatcctgtctctaggggacaatttttacttcactggtgtgcaagacatcaatgacaagaggttccaggtctgtgcccaacagagtggggcaggaggtgggggcgggcagtggggagaagccgccttacctagtgaccttcctttggtgagggcagagggaaggtgatggggcacctttgggcgccgggagcattcagtgtctcccttatcctgacttggtgggaggatcggcatagccactgaccccagggaagaggcctgccctatctgtttgctacaggagacctttgaggacgtattctctgaccgctcccttcgcaaagtgccctggtacgtgctagccggaaaccatgaccaccttggcaatgtctctgcccagattgcatactctaagatctccaagcgctggtgagccaccctcagccctgccttccgagatcctcacatagcagggacacaggggccctgtggcttgagctg

SEQ ID NO: 7885 - DNA, 6000 bp, Homo sapiens
gtctcctttgccgagattcccccggctctgaccccactacaccaggatggtctgtttctggcctgactccccaccaggctgggacatgtcaaggacagggctcagggcttgaaaccatgcacagggatgctaagatgtagctccagtttcttgaatgactgcagccctatctcacccaaggttagacatggccgtcggctcccccttgcccaggggtcagtgccagttgctcggcctggcatctgcagcccagcctgaccccggatcttgccgcacctgccgccaccctgaagcctttgtttcctgactgatgcatgcgcaggctacacctcttaacatatgctgttccctttgcctggaatgcccttcctgcctcatcttctctctagcccaagctgggcacggtgtctcaggcctgtaatcccagcactttgggaggccgaggcgggtgaatcacttgaggtcaggagtttgagaccagcctggccaacatggtgaaaccctgtctctactaaaaatacaaaaattagccaggtatggtggtaggggcctgtaatcccagctactcaggaggctgagacatgagaatcacctgaaccctggggggaagaggttgcagtgagctgagatggcgccactgcatttgcctgggcaatagtctcaaaaaaagaaaaaagggccgggtgtggtggcttacgcctgtaatcctagcacttgggaaggctgaggtgggtggatcatgaggtcaggagtttaagaccagcctgaccaacatagtgaaaccctgtctctactaaaaatacaaaaattagctgggtgtggtggcacgcacctataatcccaactactcaggagactgaggcaggagaatcgcttgaacttgggaggcggagtttacagtgagccaagattgcgccactgcactctagcctgggcgacagagcaagacttgtctcaaaaaaaaaaaaaaaaaaaaaaaaaagatcctagccttcaggccctggagtgactgaggtaaggacagggctgagatggggcaggcatctaggtatgaagtagggctgggggcacctcacctccaccaggtcccagaagaacaccttcccgtcctcagaacagctgaccacatgtgtgtcacgctcgctcaggcagcagtccagcttgtattcctggttcttatggcccttgtacctaagggtggacaggatcggggggcttggtcctctccaggggtgggagaggagggaaggggatccccacgaccacaaggactcactcgcccagcagctcccctgtgtctttgtccaggagccgcaatgtggagtccaggctggacaccagggtgcactgcccatcccggctgaagcaggtgcaggtgatggggccttgggggaagggtgggtaggtgagtgagggtggggtgcccctggttggccccccatcttccctgcctgtcccacatccccagccacactcactgcccacgtagtctgagaagagctgccccatccttaggtcatagcgtctcacgcggccatccacggagctgcaggagagggtagatccagcgggaaccttgactacactcacatggctccaggcagccctgtgccttcccagcccagtgggcctgctcttccagtgcacaggagtggaattctgaagctctggccttgagactcaggcccagggccaattacgtcctactccatcatttccaagacccacaccccctttccaagcccttggagtccttctgattcccccttttcttccttttgtttgagacagagttttgctcttgttgctcaggctggagtgcaatggcatgatcttggctcaccggaacctctgcctcccgggttcaagagattctccttcctcagcctcccgagtagatgggaatacaggcatgcaccaccacgccctgctaattttgtatttttagtagagacggggtttctccatgttggtcaggctggtctcgaactcccaacctcaggtgatccgcccacctcagcctcccaaagtgctgggattacaggtgtgagccaccccacctggcccaattcccccttttcctgcattctccagctcctcctcctcagtactcagtcccaccactttccccactacccagcaccagcatctagactgttctggtctccctgcaccccccacagccaccagagggagcacttttcaaagtacagttgacccatgaacaacacggtttgaactgaacgcgtccacttatatgtggattttcttctgcctctatcagctgtgagacaccaagatcaatccctcctcttcctcctcctctgctttctcaacacgaagatctttatgacgatctcttcacttccacttaatgaatagaaaatatattttttccaccaggcgcggtggctcacgcctgtgattccagctctttgggaggccagggcaggtggatcacgaggtcaagagatggagaccctcctggccaacatggcgaaaccccgtctctactaaaaatacaaaaattagctgggcgtggtggcacgcgactgtagtcccagctactagggaggctgaggcaggagaatcgcctgaacctagaagttagaggttgcagtgagccgagatcacgtcactgcactccagcctggcaacagagcgagactgcgtctcaaaaaaaacaaaaattcttccttatgattatttttatgtatttatttatttaatttatttacttattttgagacggagtcttgctctatcgcccaggagtgtagtggtgcgatgtcggctcacagcaagctctgcctcctgggttcactccattctcctgcctcagcctcctgagtagctgggactacaggcgcctgccactatgcccggctaattttttgtatttttagtagagacggggtttcaccgtgttagccagaatgatctcgatctcctgacctcatgatccgcctgcctctgcctcccaaagtgctgggattacaggcatgagccacagcgcccggcctatttttatttatttttagaaatcattttatctttttttttttgagatggagtctcactttgtcgcccaggctggagtgcagtggcacaatctcggctcactgcaacctccaactcccgggttcaggcgattctcctgcctccgcctcccgagtggctgggattacaggctcccgtcaccacacctggctaatttttgcatttttagtagagacggggtttcaccatgttggccaggctgatctcaacctcctgacctcaagtgatctgcccaccttggcctcccaaagtgctgggattacaggtgtgagccaccgtgcccggccagattattattattttgtagacagtctgtctttcacccagcatggagtgcaatggtgcctcgaactcttggactcaagtgatccttccacttcagcctcccaagtagctgggattacagctgtgtgccactgtgcccagctgagagtaggttttaatctgagcatgggggcagctatgattccccgtagcacctggggtgagaccaggtcctggctccactcaccctgccaggatctcgtggtctgacaccttcacactggacacgccatctctggcctcatccagcgtctgcactggctcaggcctccgtgagcggcaatcccaacagcggatactggaatcaatagagcctgtgaggccagcatgatggtgaggtcaggtttggagggggagggcagcaccctgggcccccgtgcttaggccccagactcaccggacaggataactgtggcctcttcattaaactgcaccgtgttcaccttctgagaaagttattgccactcagaggaggctggactttggaggactgggataaaggcagggttcccagtgtcggttaaagcaagggcgaaggggaggtgaaaggttttgggggaacagcaaggacaggggttggtgactgcctagcctggcatgcggagtgggggatcgtcatctggggaagggatccttacggtgtaatgggggtggccgtgtcaccacctatgcgctaatacgggtcccctccactcaaatgagggtctccaggctttcactcacccctgcgtggccccggaatttgcgcacgacctgccctgatgccacatcccacagaaccaccgccttgtccccgccgccggagcagagactactgttgtcaaaggagctggagtaaaggaggaggaggatcagcatcgacctcggatcccagcctcagcgctcccatcccagcctggtccccggctcacccggccgcatccagcacctcgtagccgtggccgctgtacgtccgcagcagcgtcccccgaagcgggttccacagcttcagcgtcttgtcactgccgcacgtcaggcagtaattgccatccactggggaacaccaggcgggggttactgggccgtcgatctcaggaggcgggaggaggacccggaatgaagacgaaggcgctcaccattaaatcgtacggctcgcactgccccctgcccgcagtccagcgtcttcaaccgtttctgcggcagctctggaggccgcggctttggctcagggaaagccatgctcccaggactccttccttgcagccttaaatcggtctgtacggaaaattccgcgccttagaaacccacgcttgggtgtaaccttattattgttcttcctgacctacttcctgtttatcacttccgggttcatcattttggcatttcggtgatcgggttggaactattgaagcccgctttcaggttcttttccccattttccctttgaaaggaagacttctggcttctcctaaatctccgttctctgggtaaggggagtccaagcctctgtcatgaggaacggaaatgcgagggcctcgggtgttactctaaaatccgccctcagcttgcacgccggaagctgcgattcctgcagcggaagaggcgtgatctggccttcgactcgctatgtccactaacaatatgtcggacccacggaggccgaacaaagtgctgaggtgaggaccccagcgtcgtgggcacgggttcgggttgtgggtgtggatcggggccctgggaagcgcctgtctatcccgggggcaggacctgagcgcccctgaccctcgagcctgtcgcaggtacaagcccccgccgagcgaatgtaacccggccttggacgacccgacgccggactacatgaacctgctgggcatgatcttcagcatgtgcggcctcatgcttaaggtgggcggggttgagcttctatgggtgtagttggacctgagaacgaggcccgggggcgggtttggaatgaagcggggtgtcttgtcattgctgatggggcgggacctgagatcggccgggagtggggctgcgatgacgctgggccgagaaagccccagtctttggtgaagtcaaggattcgagtcaggttggggatgtggcagattggtctgcgagtggggccaggctttgaagcaacttggagaggagttgtggaaaaagggcagggtcttaagcatgtgggatgtcagagtctctcttggtcctgagagacgcaggccagacagtaggactagaaaccacgtatctagagtatgccatgagcaggtgggactgaggaattccgggtggggcaaggtcccagctgcatcagatggaatcagtgggcatgatctggtgtctggaaaggtggcttcggggactcattgttgtgcctttcactaacctgcccacccacttacctttccctagctgaagtggtgtgcttgggtcgctgtctactgctccttcatcagctttgccaactctcggagctcggaggacacgaagcaaatgatgagtagcttcatgtgagacttgccctacagaacaagtgactcttgagtaaggggtggggggaccccagcctggccatcctagactgacacctctctcctgtctcaggctgtccatctctgccgtggtgatgtcctatct

SEQ ID NO: 7886 - DNA, 6000 bp, Homo sapiens
aaccccgcccctcccccaccacagcagaaaaccagacagcaccggcttttttactcaaatggtttttattttcctatctgacatttctaacaaaacgccaggtagacggagttaaaaagaatccaccgcacgaaaggtaaacaaagcagaccctcagaaactccctggcaaggatgttcccctccccagattggcccagtttcaccagcaactggtctcagctcagccttatgcctttccactgacaccccccacccctccacattctcgtgattcagaccaggaacttctcggctgattgtgtccgtgtgtctgagggaggggcacgctggaacctgggaacctactgggcacctctaatgcagatgagaaaaacttgagaatgtgaaagtagatcagtccccgctcccacccgaaggtgcagagacgcgggacattaaccagcagcacgcgggggtgaagtaactcaggccactctcctccccactgcccagggcgggtgcacgccccaggacctcctcccaggccccacacccacgcaaggcgacaggaagctccccacgcctgccccatgacgcaacgatgaccgcttatacaagtatgtcagcggagggggaaggggagtgcctggaattctccgaggttggaaacgcaaaaccaactcttgaaaaaccttgaaagggccagcacagcccacagtacaaaatgaagtccgaccctgaggagatctttaaaaacaaacaaacaaacaaaacaaaaaacacaacacccaagcctcccttctcccagtccagaaggagagcgaaaggttcacgtcccagtccactaagacagcacctgtgggcgcaggtctctgcggaaggcgcccgcgcccccggctcagactcctcggtgccgtccctgcacactgaaggcgatggctccccggggacagagtccctctccgggcctctcagcagcccgggcggcggcttctctccacggttttcgcgggcgcttcccccaggatggaggggggtggcctcgcctcaggtctgcgccctcgggccgacggttcgacgcgcgctctgggctccggcagcgccgctcggggtcctcagaaggccaccacggcccgcacgagcacgttgagcatgctgtccgccgggcggcaagcgggctttgcctcgcacgcgggcggcgccgtcggaggggccgcggggctgcagttcaggaggccggagaagcgcctctgcaggacgcgggccaggttgggaaaggcgccctccgcttgcgccggagggggctgcaggcgatcggcgacttcggatgacgctccctcctcttcttccttttcttccagacgggctttcttgctcgggaccagtccagcgtccccgccgtcgctcaggctgctgctgcgtcgtttgcggctgactttggcggggcgcggggcacagcaggcggaggtctcctcggctgtcggcgcctcctgcgtgtccattggctccggaaacgggtgctcaccgtcgggggtcgctgtctcggccgtggactcggcttctcggggcgggtgcaggcgagggtcagaggggagggcggccggcaacgacacctcgggctcgagggcctccaccttggccgagaggtagagctcccgggcgctgcgcatgaccagcgacagctgcagactccggtgcagccgcaggccaccgcgctgcatgcgggagtgatacatcttccacaccgacagggtcatgatgcgctgtgcctctttctgcacttccatggcgactcgacggcgacagcggcgggggctcccgggagggacagaacaggcagcaggtgcactccggacaacgggctcgctcacgcctctctacacaaaccaacccacgcagtgacactgctaggacgctctgcccaggcgcccgccacccaggcccttttatacccccagtgacgtcactgagacaccccgcccaaccgaaggacgcatccgggctttccaactcgtcgcggccaaacactccttaaagagacagaatgcgatttacccagcagggaaaggggacgggaaccctggcgaggaggagcgtcccccgactccacgctgagctttctgggtgggctcctttctctgagccccgccgatgcatcagcgccttggcccaagggaggggggccgggggtggagctcacggcctacccacatgctcccgtctggaggccccagtgggtcgtgggcagcaagtttcccttcacacaggggaagaccctggttccagcctgaacatcccctgtggccactgttcttagcatttaccaggtgtgtctaatgagtgttttctgcaccaataatcatgctaacagcgcttacaacgtgccaggctaggttaagagctctccttttatcaataattcaccgatccccagcctccactcctcggaggatactgttctatctgcttccttcaagtggggaaaccaaggcagagtcactaggccaatatttactaaacaaacaatatttgctactgctgtgaaagggggccactggggcctccagctcttcggtctctagcgtacgccagcccttgcttgtaggcggtgacccgccccgggctacgggttcccgtgattcgtaccaagccattcccccgcagtttcccgcgacaggagctccacgggtgggttcagagctcgcacggctgcgaacccggcgcgcacgacagtccccgtgaacacgtggctgccgccccccaaacaagggggccgagttccgtctccgcgttcggggaggcggggttaggttgggagctggaaacccagcaatgcagagacagagcagatagaaaatctccgccctaccctccgctacgcgccgtctctccaagaaatactaattccacttcctccaaaaataggatgcagaattgttcgaatggctccattcattcctggtgcgggccctttaaggggtggtgcgccccccgccccctttccgcccgcactggctcgcggcgccttcccgccaccagcgcccgctgacttccacaactaaatttggacggagtgacgtagggcagtcgcgcgggccgcttccggttgcccatattaggacagggcccgtgatcgccttagcggccggcggcggggcttccggggggggggcgcggaggggcggggctttgcgctccggccacgcccctccccatccccgacccgggcagccggagcaggctggagccccaggcttcctgactcgcattccagccgggtgggggaagaggagagtttcacttccttccctccaggggccaggaaggcgtgacgccaggaaagcaccccgcagcgggtaggggcgacctgagggctcccagggacgccatctcccagagacgctgcagaacgaccctgcatacacaggagacgacccgctgaggcccccttcatcccatctctcctcttcccaattatttcccccatacaaggccccctcccaggttattcctgacccctgccccacactgatcttctcaggccttgggacaccctcccgtcccgcccttcccccgcacgctgggaactcaaaagttattcccccctaaaatacccttcccaaactcgtccccattcaacgatggtgccagactgcgacgacctgccgaagacgcaggccgtccccaccccgctaaccttaccacggagaccccacaatgatttccccagcccaggcgctatctctgagaccccacgcagcaactctgacgcgcaagggggcgaccctccgaggactccctcagataacccgcccaccctccaggggagaccaggccccctatcactcaaaaaaagtgctttcccgaagctccccaacacacagcgccactgtcacacatagggacgaccctgagtccctccgctgatattcctggcccctacccagacggagaccccacacacagagggcccccctggagaccatcctcaaagccaccacccgctacccccaggctcgcacccagaaagactccgcgcttctgaagaaacccacctccacgcactttctcaaaggtgacctccccccgctgctggcatatctgggaccccctcacgaccacctcgccccaaggcgacctcgaagtgcccccaactccgccacttctcaggaaagagattgggagaatgcggcagaactccccggaggagcaggcccgctcctcaccgcgcccccgcagggagaagggaggaccacctctcccccagaccctagccaaacctgacactcgggaccctgggatgggacgatctcccaggtgccagctcagggagtccatgaaaagcttcaacgaatcgaatgagccccttccccagccataatacccagccgccagagatgagggaggctatcattatttacattgcccgtgcctggaagggaaactgaagttgcgcaggaacaatccgaggaactgggccttgaaccgaaattccgaactcggacccgaataggcccagacagaactccgacaccgccccctacggtgcggcacgagagggctaaggggcgggggcatgtgcaccggaagctgcctctgcccacaaccaagatggctgaggagagggcggaagtgtccgcacgtcgggcctccgaggcttctctttctcccctggcggtccggctctcgatggtggcgtgacgggggcgggggtggcggcgcgttctcctcggttgggagggaaccagcccgcgaacccaggccgggaggggggttcggcctgggggggaagggactgacatgtctctcgaagaccccttttttgtagtccgagggtgagtgacaacgacgggggagggcggagggtgctctgtacccaagccagccagtgcccgggtgccggccccagcgtgcccggcgggctgggcaaggccgtcggggtgcagagtgggaggcgcacgcaggggtatataggggtctccggagtcccccatgcgtttgggtttgcagtcgggggcagaggcaggcgggaggaccgcctgcccccagccgcgcccgccgtgcccctgcccgcagcgaggtgcagaaggcggtgaacacggcccgcgggctgtaccagcgctggtgcgagctcctgcaggaaagcgcggcggtcggacgcgaggagctggactggacgaccaatgagctgcggaatggcctgcgcagcatcgagtgggacctcgaggacctggaagagaccatcgatatcctggggctttgtggcagagggtggcatgggagagcccattgcggtggcagcccaccttcgggtagggctggacccctagggacggggatgatatctggctccggccttgacccttgactctcagcccacgtatagtggaagccaacccaggcaagttcaagctcccagccggggacctgcaggagagaaaggtgttcgtggagcggatgcgagaggcagtccaggtcaggaaaggtcctgcaggcggggagtgggggaaggtttgagtgtgtttttttttctttctttctttcttttttttttttttttttgagacagagcctcgctctgtcgcccaggctggagtacagtgttgcaatctcggctcactgcaacctccgcctcccaggctcaagcgattcttgtgtctcagtctcctgagtagctgggactacaggtgcctgccacgatacccggctaagttttgtgtttttagtagagacggggtttcaccatgttgatcaggctggtctcgaactcctgacctcaggtgatccacccggcttggtctctcaaagtgctaggattacaggcgtgagccaccgcgcccagcctgagtgtctttcctccctaatgctgtccttacctccaggaaatgaaggaccatatggtcagcccaacagccgtagcatttttggagaggaataacagagaggtaagccttcctgacccaccctgcccacctgagcccctgggggtaaccaagccagatccctctgtgcgtgttca

SEQ ID NO: 7887 - DNA, 6000 bp, Homo sapiens
gacgagcttaatggattttaatattaacagaatgcaagaattcacggacagggtttccaattctgcattgcaactgttcttgaagaaactaaaatatgtagcattttggtgtcgtctcaaagaatagacacagttacctgaaaagctgattaaaataatcttcccttttcaactgcctgtctgtgtaagactgaatttttttcatgtatttcaaccaaaacaatataccattacagattcaatgcagaagcagatacagttgattttcatgattcatggtagttatattctatgaagttgcttttttttttgttttttattttagagatggagctttgctcttgttgcccaggctggagggcaatggcacgatctcggctcaccacaatggtgcgatgtcagctcactgcaacttccgcctcctgggttcaagtgattctcctgcctcagcctcccaagtagctgtgactacaggcaagcgccaccatacctggctaattttgtatttttagtagagacggggtttctccatatttgtcaggctggtctcaaactcctgacctcagatgatccgcccgcctcagcctcccaaactgctgagattacaggcatgagccaccgcacccagccctataaagttgctttgaacactgaagtagcaaatactaaatcactgcttccagggggaagtacaagatttagtttctgtaagcacctggtcacaacatttttgtcaactgatatatactttgttttatttgtgtttttgtttaaagactccatatttaatatatgttgctgattcattaacattgagctcatggccaacagtactagaagttatgtctgagcatagcttacctaacatacatattgtctctgtaaggcacgtcacagccttacagccttacagcctttttttttttttttttttttttggtgttgttgttcttgttgttgttgttttttagagctaaaatcttgctctgtcgcccaggcaggagtgcagtggtacgatcataggtcactgcagcatcaaccttccaggctcaagcgatcctcccgcctcagcctcctgagtagctgggaccacaggcacgccccccatacctggctcattttaaaattttttgtggagatgggggagtctcaatatgttgctcaggctggtctcaaactcctgggctcaagtaatcctcctgtcttggcttcccaaagcgcggctgggattgcaagtgtgagccaccacacccagctaccccacaaccttctagagcttagaaacacactgagcacttcagcttagaaacgctagacagcacttcagcaaagtgctcaggaccattttaaacagcgaaatcaacaaaaaacatgaaagttagaaaagtatggcactaaacaggccacaaataggatgcttgttcactgtatgagctgaaacaagataacagagcatggttcttttgcacctcagctacaaatgttcacgccgtgcagctcaaaatgttaatctctctgcaaatgacccagaaaaatgtcagaatctccgcaagtattaattttggggtcacaaatacatgttagtgagtgagtgactttgcaaatacagaatccgtgaataatgaaaatcaactgtataaaaattccgtttccttttgatgaaggtagccattaaagcaatttgaaaaagtgtaaaacaatgtcactcttctttttttgttcttgttttggaaaatacagttatttttcgtaaaaatatgctattttatgttaacatgtagtaggtttatttttgttatgttaaaatgaataaatgttgaaacactttttcagttttaatttctgatactgtaaagatcaatagctataacctatataaagaaaagctctttgggatctcccaggatctttttaaattaagacacagtttctgagaacagttttagatttacataaaaaatgaaaagatagtacagacagctcccatatgctcccttgacttagtttcacttgttattaatatatttcattagtatggcacatttgtataattaccatattgtaatattgatatattattatattgatacattattaacaaaatgttattgttacagataactttttttgaaacagagtcttaccctgttgcccaggctggagtgcagtggcacgaccttggctcactgcaaactctgcctccggggttcaagtaattctcttgcctcagcctcccgagtagctgggattacaggcacccgccaccatgcctggctaattttatatttttagtagatacggggtttcaccaggttggccaggctggtctcgaactcctgacctctagtgatttgcccacctcggccttccaaagggctgggattacaggtgtgtgccaccatgcccggccaatatggatacattattattagcgaaagcccatactctattcagatttcctaattttttccttatatcctttttcttttctaggatctcacattacgttttgttgtcatatcttcttagactcctctcggctgtgacagtttctcagacattccttgttttctcatttttaaattttatttttttttttagagacagggtctcgctctgttgcccaggctggagtgctgtggcacaatcatagttcactgcaaactcaacctcttggactcaagcggtcccagattcaacctcttggactcaagcggtcctcctgcatcagcctcctgagtatctgggactacaggcacctgccaccaaaccctgctccacatgttccttaatttttaatgactgttttgaagaggactgcgcaggtagattatcggatgcctctctattgaaattagtctgatgtttttctcatgcttaggcttgagttatggtttctttgggatcctccctgattgttacgggtgtaaagggcttgcaaggccaattgccagggaacaactgctattttatttacttattattttgcgtgacagaccgagggctctgttgtcttcgctgctgagtctccagcctctagcacatccaagtgcacagtaagtatttgtggagtgaatgaccgtaagaggcaggagttcaggggcagctctaggttcaagaaggatgcagaatcgtctaagcacagtgagtgactgaagcagcggagtgagaaggctgcagagaggggttgccaatgtggtccaggggaatctgacatctaggacagagattcagccttagccatacattggggagcattcaaatatactgatgcctgggtcccacttccaggtatgctgatgtgcttggtatagggtgtggcttgggcatcagatatcttttcttttctttcctttttttttttttagacaaggtcttgctctgttgtccaggctgaagtgcagtggcacaatcatagctcactgtaacctcaaattcctaagctcaagtgaccctcctgcctcagcctcctgagtaactgggactacaggtgtgtgcccagctaattttttgattttttttttttaaatagagacagagtcttgctatgttgcccaggctgatcttgaactcctgggctcaagtgatcctctctccttggcgtcccaatgtgctgggattacatgcatgggccactatgtcaggctggcttcagaatttttaaaacctctccaggtagttttaaaatacagctaagtttgagaatcacctatctaggagttgttgcaaagaagcagagccagggcgatgcatgcaaagaattagaattggggcatctgtttcctggctgtgtgaccttggacaagttattgaacctttctgagcacctgtccccgccctgaaaatagaggaagtgatatatactttataggagtgtgtagattaaatataagtattaataaaagagcctgcctagttcaggaggtcgccatcaacacttcatcaacaacaacaacaataataaaaaacattgaacgtgcactgactttttttttttttttttgacggagtctcgctctgtcacccaggctggagagcagtggtgcgatctcggctcactgcaacctccgcctcctgtgttcaagtgatcctcccgcctcggcctcccaaagtgctgggattacaggcgtgagccaccgtgcccagcctgcactgagtttttattcatacgacagacctgatgctcagatctttaaatggcattagctctcaggagaggcagaagatgtgggaagcaaccaagtcattgcctttcgagaagaaaagtcgagtgcaccttgcctggtgtgctctaaagacagcaaagaataatattaattacaataggaacgacattatccatctcccatttgcccagtgcttcgcgctggcacggagcatttccagcctcacgcgctttaattttctcagctttaattttctgtggggtcggccaagccatcttccttgtttagcggaggaagccaggctcagagagggagaggagttggcccaagggcacacagcagccaagtggccaaggccggaaggtgcacccgcaaggagaagggggcagcggagccctctccctggctgttgttactgggacactagagccgcgccttccccaggcctccgccgaggctgctggagcgggtcccgcggtgccagggcctgttccccgcgctccgccagggatgctggggcctccgagggctccggaggcggtttagggggcgggggcgcggaggcgcggctccgagcagggggcgggggctggatgccggagaggccactcacccccgcccacccccagtccccctcccttcgcaagcacgctgtcccccttctcccacacggctgcggagcctgggctgggcgcgggggaggcggagggcatcgcggaggggatcccgccccctcccccggccgctcggtgcccccacacccacgtgagcgcagggccggcccggatccctcccgcagcatagcgcgtcccggctccgcgccggtgcctccacggtccggtccccgcgccggtgctgcacagtccctggcgggtccccgcggccccggccgggcgcttcgccgggctccggctcctgcatccgggcgcagcgcgcaggccgaggcgcgggcaggccgcccccgccgctccggacgccggtgagtggggactccgcggctcggcgcggggactcggtgtggctgcggcgcggaggttgcgggcaggtgggggatccgaggcgctggggtcaggcgtgtggggcgctccctgcgcccacgtccccacttctccgccgccctttgtctctgagctcctgcttgccccttagagccgttgccaccgcttttctcctggtcgttctggtgagtttcctatccccttagttatccccgggtctccctgcccgtctccccacctccccaacccgtggcctccgcacacaggcacgtttccagcaccgagcccgatgccttgtgcatttatagggctcggttgccttctctgtcagagggcttatttcaccaatttcagatgtatctgatgtggctgaggctgcagagggtctgggcattagtgtgtgtgtgtgtgtgtgtgtgtgtgtgtgtgtgtgtgtgtgtgtgacagagagagagagagactgaatttgtgagtgggatcgccgtcctgaacaggtgtgtggagctgaatgtttaaatgtgaggatgattttgaaagtctgaagtttgtgttttgtgccctaaagagtgtgtgtgtgtgtgtttctgtgtgtaggtaggaattgtatggctgtcactgcctctgtaagatttaattcatgaagggtagttgtgcagagccacgaaggtgtgtgtggttgtgtgcctgagggtgtacatgaatgtgtatgtgtgtgtgcagaattgtatgactgcatgcctggaattgcatttctgaaggtgtgggtggttgcgtgcctgagggtgtacatgaatgtggcaagtgtatgtgtgagtgtgtctgtgtgcagaattgta

SEQ ID NO: 7888 - DNA, 6000 bp, Homo sapiens
aattcagattaaaagagaccaagagatataaggattagaattagccgggtgtggtggctagctacttggggggctgaggcaggagaatcctagctacttgggaggctgaggcaggagaatcctagctacttgggaggctgaggcaggagaatcagttgaacctgggaggtggaggttacagtgagtcaagatcatgccactgcactccagcctgggtgacagtgcgagactctgtctcaaaacaaaaggattagatgcaactcatgatgcagcattagatagatcctgggccagcaaagaaacattgcaataaaagatttaattttttttttcttttcttttcttttttttcttgagactgaatcatgctcttttgcccagtctggagtgcagtgtcgcgatctcggctcactgcaaactccgcctcctgggttcaagcgattctcgtgcctcagcctcccgagtagctgggattacaggcacttgtcaccatgcccagttaatttttgtatttttagtagaaaaggggtttcaccatgttggccaggctggtcttgaactcctgacctcaggtgatcagccggcctcagcctcccaaagtgctggaattacaggtgtgaaccaccgcgcccggccactaatttttttgttttttccccacagggtcttgctctgttatccagactggagtggagcaggatgatcacagctcacggcagcctcgacctcctgggctcaagcaacgctctcacctcagcctcctgagtagctgggactacaggtacgcgccactatatgctgctaattttttctagttttgtagagtcaggagtcttactatgttgcccaggctggccttgaactcttggcctcaaccaatcctccctccttggcctctcaaagtgttgggattacaggtgtgagccactgtacctggcccaataaaggatattatttgggcaactagcaaactttgaatacagactggggcaaaaactgtagtatgtttatgaaagaggatacccttgttctcaggaaacacacagcaaagtatttgaaggcaaaggaacatcatatctacaacttactctcaaatcatttagccaaaaaatgcatatatgcatatgtgtataacgtatatgtacacatatatgtcaaatgtggcaaaatgtgggtggttggtgaatctggacaaagggcttatacaagttgttcacgctattctgtaactctcagttttttttgtttttgttttgaagttggttcttgctctgttgcccaggctgaagtgcagtgacatccaggctcaagtgatcctcccacttcagcctcccaagtagctgggactacaggcgctcaccactacaccctcttaattttattttaattttttatagagatggaggtcttgctatgttgcccagactgattttgaactcctggcctcaaacaatcctcctgcctcagcctcccaaagtgctgggattacagacatgagccaccacgcccggcatgcaactttgtgtgttttaaattattttcgtctttttttttttttcctttttgtggagaatggggtctcactatattgcccaggcaggtcttgaacttctgggctcaagctatcctcccgcctcttgcctccctgagagctgggattacaggcatgagccaccgcgcccggcttaaattattttcaaataaaaagttaaaaaaactgtggccaggcatggcggctcacgcctgtaattccagcactttgggaggctgaggtgggtagatcacttgaggtcaggagttcgagaccagcctggacaacatggtgaaaccctgtctctaccaaagacacaaaaattagccgggcatggtggtgtgggcctgtagttccacctacttggggtggcggggggaactgaggcaggagaatcgcttgaactcaggaatggaggttgtagtgagccgagatggcaccactgcactccagcctgggccacagaccgagacttggtcttaagaaaaaaagagtccggaagtggtggctcatgcctgtaatcccagcactttgggaggctgaggcaggtggatcacctgaggtcgggagttggagaccagcctgaccaacatggagaaactctgtctctactaaaaacacaaaattagccacacatggtggcacatgcctgtaatcccagttactcgggaagctgaggcaggagaatcacttgaacccaggaggcagaggttgtggtgagccgagattgcgccattatactccagccggggcaacaagagcaaaactccatctcaaaaaaaaaaaaaaaaaaaaaaaaaattggcccggcgtggtggctcatgcctgtaatcccagcactttgggaggcagaggagggtagatcacctgagttcaagagtttgagactagcctagcctacatagtgaaaccctgtctctactaaaaatacaaagccaggcatggtggtgtgtgcctgtaatcccagctacttgggaggctgaggcaggagaatcagttgaacccgggaggcagaggttgcagtgagccgaggtcgcgcgccactgcactccagtctgggtgacagagggactttgtctaaaaaaaaaaattgtctgaagatttctgggatacccatgtgactatctcctaccagaatggttctcccatgctcagccatacctgccttgtaggtgaccccctcaaacccagcatctctcctccacccaacccattccttcttccagcatccttatcaccaagccagataccaaggagtaagcatggctcctttctcctcttaacctctggcctgtacacgttcccttccaactctgtcccttcctgttggcatgggccagtccctctgctgggatgacttccctccagctcaactttcagggccaagccccactggacgtcctcttggacgccctccagggtgcacccccagtccatagaacagagtgtgatacagggctggagccttagccatacttgttgaatacatgaatgaacaaataaataaccctcccaggcaaagtcctcacccaccacccgtgtaccccaggcccttcccagattccatgcctttctctggcccagccctgagccctccacactgggtgtgtgtgcgtctagctttttcttccccagactggaagttcctccagggctgggctccaggcctctcagggtccccattctttccacaggaacagagggagctgcaggaagcctgtgcagcatgactgatttgggaaaaggcaattgatcaaggctgggcgtggtggctcacgcctgtaatcccagcactttgggaggctgaggcgggcggatcacttgaagtcaggagttcgagaccagcctggccaacatggcaaaacccagtctctactaaaaaaatagaagctgggcgcggtggctcacgcctgtaatcccaacactttgggaggctgaggcaggcagatcacgaggtcaggagatcgagaccatcctggctgacacggtgaaaccccgtctctactaaaaatacaaaaaaaaaattagcagagcatggtgccagttgcctgtagtcccagctactcggacggctgaggcaggagaatggtgtgaacccaggaggcggaacttgcagtgagcggagatcatgccactgcacttcagcctgggcaacagagcgagactccgtctcaaaaacaaacaaacaagtaaacaaaaacccagaaaaaattagccacgtatggtggcgcacacctctaatcccagctacttggcagattgtgggggtgggggctgaggaaggagaatcgcttgaacctgggaggtagagcttgcagtgagccaagatagggacactgcactccagcctgggtgacagagcgacacgctgtctcaaaaaaaaaaaaaaaaagaaaagagaattaatcaaattgagccagataggctgaggcccaaagctgtgtggggtatgggggtgggactagggggctggggtgaccctttgagagtcacagaggaagtgggttgctttctgggagggctgagagcaagaagagtttgtgtgtgcatgtgtgaacacacacacatgcatgtgactcctagtacgtgtctgaggtctgaggctgcaaatgtagtcctaggctcctggcctggctgagtgagttttagcggttttttgtttgtttgttttgtttgagacagggtcttactctgttgcccaggctggagcgcagtggtacgatttcggctaagtgcaacctcagcctcctgggttgaagcgattttcctgcttcagcctctcgaatagctgggactacaggcgtgcgccaccacgctcagctaatttttgtattttcagtagagtccgggtttcaccatgttggccaggctggtctccaactcttgacctcaagtgatccatccacctctgcctctcaaagtgctgggattacaggccggagccaccgcgcccggtccgacttttaggtttgtgaatgttttagatcagagtcctggggaagcttggtgcatgggcttgcatttgtgcgtccgtggctgtgggtccatgagcctctcaggacgtgactggcctcagtttccagagtttctgggaggctgtgttttttgtcccggctccagaggtgtccggctctgggtgtgtactgggggatggggatggggtgcgtgggcgttcacgaggttgggtgtgcccgccactccgggttctgcccgcgtctcactgcatgctcggcctgggtttccgagggtccgcgcgtcccaggctgtgcgggtggagggtgggcagggaccccgggaggccgggcggggggcgggggcgcgctgggccggccccggggcggggcgagccttcgagggctgggggcggggcggcccggccgcctcacttcggcgaagttggcggcgcggaggctggcccgggacgcgcccggagcccagggaaggagggaggaggggagggtcgcggccggccgccatggggccgggggcccgtggccgccgccgccgccgtcgcccgatgtcgccgccaccgccaccgccacccgtgcgggcgctgcccctgctgctgctgctagcggggccgggggctgcaggtgaggggccgggacctggcggatgggacgagggcggcagagggggagtgcaagaacccccaaggccggggctggcgggggttcatgggaggcaggaaccagggtcggggaaggggcgcaggagccccgggcttcatgccagtcctggaggacccagagattcagaatggggaggaccccagaggcccaaggaacagggacccttgagcgattagagctgaagatgaagggacccaggagtccgagactgggagctcgaggtgcggggatcagggactcgaggtgggggggtgcgtacagagttcgggactcgtccccatccaactcacgcctggagtcctgggtaggttatgattgggggcccaggtacttctaggccggggacctctcgcacaaaagcccccccaccccgcccccgacaccccgggcgggctgggccaggcggggggtggggagggggcgcgaagttctgggagctctgaactcggagaaaacttcccaggccggcgcgcagcaagacccggagccggattccgagccggagcctcggcggcgcgcgcgccccctcccccgcccgcagcccgcctctctcctctggccgcggggacccggaggccctgggaccccgcccctgcgcggggaggggaaggggcgagggcccacgtgctccccttcggctccagcgccccctccccgcggccagagcccctccccagccggccaggggcccccgcccctcctcctctcctccctcccctcccccgctcgggacaatggccgcgccgtctagacaccccctccctccggccggcctcgcgctttctttgccagacaaagcgggacccgcggctgggccggggagggggctgcgggggc

SEQ ID NO: 7889 - DNA, 6000 bp, Homo sapiens
ccagcctggccaacataatgaaaccctgtctctactaaaatacaaaaaattagctgggcgtggtggtgggcgcctgtaatctcagctactcagggggctgaggcaggagaatcgcttgaacctgggaggcggaggttgcagtgagccaagatcgcgccattgcactccagcctgggcaacaagagcaaaactccgtctcaaaaaaaaaaaaaacagggagggaagaagaaaggcttgagatcttttaagaactgcaaatactccaaggatatgaaataagaccttagccgggcacggtggctcacgcctataatcccagcactttgggaggcggaggcaggtgaatcactaggtcaggagttcaagaccagcctggccaagatggtgaaaccctgtctctactaaaaatacaaaaaattagccgggtggggtggtgggtgcctataatctcagctacttgggaggctgaagcagagaattgcttgaaccttggaggtggaggttgcagtgagctgagatcatgccactgcatttcagcctgagcaacagagcaagactccatctcaaaaaaaaaaaaaaaaaaaaaaagaaatagaccttaatgaatggaggaatgttctgtgttcttaaataggcaatttaatagtgaaacaaaacaaaaaccagttctctccaaattaatatagacagcacatttctagtcaaaaatatcagtcggggagtaggactgaatgaaatgaaattattttaaagttttacattgtaaaattcagtctaacaatagctgagagattgatttcagaaatactaaaacttactacaaagctgctgcaattaaaaaacaaaaaaagtgataattagcacagtaatgaaacagtggaaccagaatagagagtctagcaaaagatctcagtatatttcagacttagtaatttgttaaagttagtacagatattttatctgaaaccttagggccagaagcctcagaattaatttttcagcttcagaaaaccaatatgcaaggctgggggcagtggctcacacctgcaatcccagcactttgggaggcttaggtgggattgcttgagcccaggagttcctgaccatagtgagatctcgtctctacaaaaaataaaaaattagccaagcatggtggtgagtgcctatagtcccagctactcaagaggctagcatgggaagatcacttgagcccaggagtttgaggctgcagtgagccgtgatcacacaatggcagtgcagcctgggcaacagagtgagactcctatctctaaaataaaataaaaagaaagacaatatggtattagcactaacctctccaacaggatctggggaaagcgccttgtagttgagtcacaaataattcttcacatgacttacatataaatgaaaaatgtaatgtcagttcacatttagccaccaaatgaattttgggggaagacttgttttctagagccttttggatttccagtttatagataagggatggtagacctatatgccaatttggtagggaaataaatggtgtgttttgtacatttctggaaaagaaaattttggaccctctacctcataacatatacagattgagttcatccgtcatctgaaaatccgaaatgctccgaaatccaaaacctttttctttaagaaaaaagaattgagtcttgccatgttgtgcaggatggagtgcagtggctggtcgcaagtgaaatcattgcacactatagccttgaactcctgaacttgagcaatcctcctgcatcagcctcatgagagtagctgagactacaggcacgagacactgtgcccagtaaaatctgactttttcagcacagacatgacaaagtaaatgctcattgaagcatttcagattttgggtttttggagtagggatgctcaactggtaagtataatgcaaatcaaaatctgaaagacttctggtcataagcactttgaataagggatactcaatctgtatcaaattctagaaaatttggctgggcgtggtggctcacgcctgtaatcacagcactttgggaagccgagatgggtggaggtcctgagctcaggagctcaagaccagtctgggcaacataggaaaaccctgtatctactaaaaatacaaaaaagtagctgggtgtggtggtgcgtgcccgtagtcctagctactcaggaggctgaggcatgagaattgcctaaacctgggaggcggaggttgcagtgaactgagagcccctgcactccagcctgggcgacagagcgagactgtcttaaaaaaaaaaaaaaaaaatttaaatgtgaaaaatgaaaaccaagatcagaaaatagttagaaaattataaactgtgggcgggtgttccagtgtgcttaccagagcactcactcgccggtgggcagggaaatgccgtgggaggcagcagcacagattcttctgtcttttatccacagcaaaaatacccaacagtgacaacatccagtgctgatgggcaggcaggaggaccaggtcattgttttaacacaggtggaagaagcatgacttgcaaatgttctgcagttaattgggcactatcactttgaaaccaaacctggttagaatgaaaagcaccagcatggaagtgtacaagtttattctagtgttgctgggttattgtggagaagatctggaagcaacataaatgtgcctcacttgggagaatttatggtgtggttatctgggcatctagaaccaggaggataaactgttggcaagtgagagtcactgggggaacggtctatagtagtatcctaattgtgtatctttagtttattgtgagcatgtatgatgtctgttaatattttcctccagtagtagagaaaacgtgctaaggaaaaaaaaaaatgaagatggagagagtagaaacagcaagtgagaaggctttctgaaacatgtaaatggagtgggaaggactcaatgggctctcccaccccaccaaaaatatccttcttttaccttatggtttttataatgatcaaagtgagatttgcctgtactcccaccatgagatggcccagcatattgatggaaatccttccagacaaaatggctctggcatgctctgcagacagtactatattatacacctttcttatgccagtgcagagatgagcccgatttgaagggctgcatgatgttcttttgaatgtacgatttatttaacctcttctgcactgaggaacgtttaggtgttttcccatttttcaccactacaatcagtgtgcacgcatgtttccagttcttaaatttaggatacgttctgggaagggattaatgagacagatttttacttttcatacattgtgtcaaactgctttccaaaaaatacggaaacagttgatcctcccaccagcagagaagactctcttcacccttgcatgactgggaataattcttcattcttggaattctgtgggttaaaaaagacgtttcattaaatatctgttcctgtttttatatcttccccgttggccccaaagtgctccttgcctattagcctagttggcaccttgttacaggttgcacccacctttggctcttagtttcttaattgttcactgcttatagcttttttgtaagcaaatcagatttctgtaatacagccgtaaagttagagatatatagatctgtatttttatttacctacagtaagtgtggtgtggaaggagagggaatttgaacaaagatcagataggttgtggttccatgcttgtggagtggccctccgttggtggggctggaagtgcgtgggtgcaggggcggggtggggtccctctaagctggcagggtcggggcagcaacttgtagggcactcagagcagcctctccagctccttctgccctgcccgcagctcatgatggagcagtccaagaagtcctccctcatggtggcccgcagtattctcaacaacaagctcatcagcaagaagctggagcgctacctgaaggtgaggcactggtccgggcctgccctgtccccagcttagtccccgcctgtgctccctcccttcagtgtccgcgcccctccccacagggcgagaaccctttcaccgacagccccgaggaggagaaggagcaggaggaggctgagggcggtgccctggacgagggggcgcagggcgaagcggcagggatctcggagggcgcagagggcgtgccggcgcagcctcccgtgcccccagagccagcccccggggccgtgtcgccgccaccgccgccgcccccagaggaggaggaggagggcgccgtgcccttgctgggaggggcgctgcaacgccagatccgcggcatcccgggcctcgacgtggaggacgacgaggagggcggcgggggcgccccgtgacccgagctcggggcgggcggagcccgcgtggccgaagctggaaaccaaacctaataaagttttcccatcccacctccgggtttctctgttactgtgccgcgcgggcggggcggggtgggcagaggggcggggtgcgcatgcgcgcgggccgggccgtcgggcaccgcggtgggaccacaactcccattaggccacggagctggatcgtagcagcccgaaaggccagctgggacggcgagggcgggccctcgtgaagaccagccaatgggggcgcgcggaagtagtgacgtgtgcgcctggtcttccagtagtcgatggcggaggtgcgctgaacgcatgcgtgctgtggtcgcctagtaaacggggctgctggtgggccgcgtcgaagacatggaccagggctacggaggtttgtgttggctgctgggtgcggagcggggagggaaggctctgtgcgggcgacgcagccgctgcgcagactgccgccggccgggccttcgtcccgagcgtggttgccccagctgggccctccggagaggcggccagggcgcgcgcgcgccgctcattgggctttggcgccgtcgctcccggggctctgcgtgcggattggccgccaggccccgaggaggcgggcgggactcggggttggggcagacgccgcggtgggcttcgtgggggcgtcttagacagtgtgggccgtttttgcccctcaccttcggcggagtccttccggcccccagcgaccccggggtttgcactcccggcttcctcttccgaagacgccacaaaatggcggcgctaggggggcggagctacagcgtggggttgtgaggtcggacccggggagctgggtctggggccgcgggcggaccgcgggggccgcctctctcccgacctgccctaggcccgcggggccgtgtagggtctccgctgggctcacgtggcccagggcgcctgtcccggaagccgtcgggctgcgcggggtcgggcctttagtccccggtgcagcgcggtggggccgagtgctgccggcgcgagagtcagcctcgccgggctccagctctgtacccggcgcgtgctggcttgggacaggatggtgaggggcagatgctgagtgttcgtataaagctggaaacctgatgtgccctggggctggtgacattggcagttctcctttaggcagtctgttgtggtggcctggaggggccgaggggctgtgcaggagggaacgtgtcctttccccactaggatttagcgcttggcctgcagtagggccgatcttctcgagctgcctgctccctgcttctggaatcagagccttttgggagcaaagtttgcccacaggggatagttgggacatgctgggtggagctcgactggttgtagagaagctagtggtctgatcctggctgcaggagctcgagaagttgtcgatcttgagaagtggcagggcaaaagtatcccagcaccagaaattgcagagagaggtttcggtcctgaggcggcagcgtgcgcggtgtgctttggtgtcttccgggtcctagcgaaggctcagcctggctctcctggtcttccgcagcctgggtagatttcaccattctttccc

SEQ ID NO: 7890 - DNA, 6000 bp, Homo sapiens
tcatcacccgcaaggtggtgaagcagacagtgatgaccgtggtgtacggggtcacccgctacggtgggcgcctgcagattgagaagcgcctccgggagctgaacgactttccccaggagttcgtgtgggaggcctcccactacctcgtacgccaggtcttcaggagtctacaggagatgttctcggggacccgggccatccagcactggctgatcgagagcgcccacctcgtctcccacacgggctctgtggtggagtgggtcacccccctgggcgtccccatcatccagccgtatcgcctggagtccaaggtcaagcaatcaggaggtggaattcagagcatcacttacacccacaacagagacatcagccggaagcccaacacacctaagcagaagaacggcttccggcccaacttcatccactcgctggactcctcacacatgatgctcaccaccctgcactgctacaggaagggcctgaccttcgtctctgtgcacgactgttaccggacccatgcagctgatgtctccatcatgaaccaggtgtgccgggagcagtttgcttgcacagcgagtccatcctgcaggacctgtccaggttcctggtcaggcggttctgctctgagccccagaagatcttggaggccagccagatgaaggagacactgcaggtggtgcccaagccaggggccttcgacctggagctggtgaagcgttccacctacttcttcagctgacacccggcgggccttgtgccagtgtgtaaataaagctcttttgccaccccctcaaaaaaaaaaaagtctagtagaattaatcagtgaaccaattggggtcttggctttctgttttggaaggttattaattattgtttcaatcgatttaatagatataggcctattcggattatctattagcacttaccttttattcttttctttccccttctcgtatcttttggatggatggaaggtaaatgatggtatatacatgtgattcaaaattatgtagctggtaaaaattataacattgatagagaaatataggacccatatgcattatttaaatacctatataataatcataaaacatgtttatgccataagtgcaaggattgaaggacaatatgaaaagtgtagttaggtgaatcttacaaattatttaaagagactgtttaaggttagtcaagcagagtgacatacagaaaagaagactactattaaatcattggcaatatccctctgtattaggccactcttgtgttgctataaagaaatacctggctgggtatggtggctcatgcctgtaatcccagcattttaggatgccaaggtgggagaattgcttgaggcttggagtttaagaccaaaaaaaaaaaaaaaaaaaaaggaaatacctgagactgggtaatttgtaaacaaaagaggtttaactggatcacggttctgcaggctgtacaggaagcatagtggcatctggttctggggaggcctcagggagcttttactcgtgttagaaggcaaagtgggagcgggcacatcacttggcaaaagcaggagcaagagagagagggtcaggtgctacacagttttaaataaccatatcttgcaagaactcactaacacgaagaccacatcaagccatgagggatccgcccccatgatccaaacacctcccaccaggcgccacatccagcattggggattacaattcaacatgagatttgggaagggacacagacagacccaaaccatatcaacccctaatgccagcagaaccactgagtagctttaggatcttcagaaaggattttaaagctcgaatagtcccagcactgtaataattacaagagaaaatgtaactacaatgtagcatctacacaataattgtgattctcttctccgttcttgttcaatccaatgtttaatataaaaattcaagtgaaggtaaataaaagcattggggaatgaccttgccatgtggtattaagaagaagattctcaagcacaactgcctaagttgcaattaccacagctacatctagaaggaagatgtgagagttttcattccacattaactagaaacctagcatgaggcagatggctggaagcagtcgagggagtgtccaagaccttacacagaaaatcatgttcagagaggaagcttgttgctcattccttttttgtgcccagctgcctgggttcccttctccaccattttatttggtagtaagctatctagagaacttgctccctacgctgagccaataagcgaaatgtgtgagctttgaaggatacagtttcatttcgaggaatggagaatatctgtgcaaagttggggcagttcagagcagagtgagctgcagactgttctgcaggtatggggctggaagtcttcacacgacctcatagtcctggcacccaaacttactcagacaatggtgtgtccggaattggtgggttcttggtctcactgacttcaagaatgaagccgcggaccctcgcggtgagtgttacagctcttaaggtggcgcgtctggagtttgttctttctgatgttcagatgtgttcggagtttcttccttctggtgggttcgtggtctcgctggctcaggagtgaagctgcagactttcgcggtgagtgttacagctcataaaagcagtgtgaacctaaagagtgagcagcagcaagatttattgcaaagagtgaaagaacaaagcttccacaatgtggaagggggcctgagcgggttgccactgctggctcgggcagcctgcttttattctcttatctggccctacctatgtcctgctgattggtagagccaagtggtctgttttgacagggcgctgattggtgcgttcacaatccttgagctagacacaaaggttctccacgtccccaccagactcagaagcccagctggcttcacccagtggatcccgcaccggggctgcaggtggagctgcctgccagtcccgcgccgtgcgctcgcactcctcagcccttgggtggtcgatgggactgggcgccctggagcagggggcggcgctcatcggggaggctcgggctgcacaggaacctacggaggccgggggctcaggcatggcgggctgcaggtcctgggccctgccccgcgggaaggcagctaaggcccggcgagaaatcgagcgcagcgccggtgggctggcactgctgggggaccgagtacaccttcccgagcagccgctggcccgggtgctaagcccctcattgcccggggctggcagggccggccggctgctccgagtgcggggcctgccaagcctacgcccacctggaactctagctggcccgcaagtgccgcgcgcagccccggttcgtactcgcgcctctccctccatacctccctgcaagctgagggagccggctctggccttggccagcctagaaaggggctcctacacctataagtgagaatatgcggtgtttggttttttgttcttgcgatagtttactgagaatgatgatttccaatttcatccatgtccctacacaatgagaacatatggacacaggaaggggaacatcacactctggggactgttgtggggtggggggaggggggagggatagcattgggagatatacctaatgctagatgacgagttagtgggtgcagcgcaccagcatggcacatgtatacatatgtaactaacctgcacattgtgcgcatgtaccctaaaacttaaagtataataataataataaaaaaatccaaaaaaaaagaaaagaagagaaaagaaaggggctcccacagtgcagcggtgggctgaagggctcctcaagtgccgccaaagtgggagcccaggcagaggaggcgccgagagcgagtgagggctgtgaggactgccagcatgctgtcacctctcagtgggagcaggtgtgacaagagttgggcaaatcagacctttaatccaccctgataggctggagtgtgggcttatggcatttctcctttgacccaattaacctccactcccaatgtatctctgtgcagaaggctcagctaggtgtatcagccattgtaaatcctcaacataaattataatttaacctagaatacagagactaggtagcaggaggagaggaaatgtagagatactaatctcttctcccttatcagaaagaaacctagcataagaaatttcacgcttaatgggccaaagagtaaatcagaaaactccatgggtgatggtatgctcatggtggtggtggtggtgatggggaattatttgccctcctgtgacctcccttggattaatttctccccaggacaatgggaaaaatcatttaatccttggagttttttttttttttttttttttttttttttttttttttgcttgagagtgactctgatcctgtttctgatggtcatgttcctcagcatcatactgagtaagtcactggccttgtagcatctggagtgattggagtgatccaagatccctagttcccatgtcacaaatgaggatcccacatatctgggacagagatggaacattatttctgggtgtgtctatctaatctattcatcctatctatctaatttctcatctatatatatatttgcctacccatccatccatcaatccatcttagctgtacgtttatccattccatctatttatcctattatctatgtatctatctatcatctattaatagctatctatccatctgtctaatatatccattatctatatctactttatctatctacctaatgtatccatcctatctactctatctatctgtgcatctacccatccatctggaccctgagctgattcctctgcacccagctggcctgacgccaggtgttgattggctgcccaggctcaggagacacatccaggctgcagggattggttggcccagcccaacccagccagccctcccacagcctttgctatatcaagggccagggtcaaaggcctcccagcagacagagagaggaggttgtctgggacagactgctcctgacagaaggtgccaggctgggggtggcaggcctggggggggtcctggcctgggatggagaggggcactgcccaaggcccacgcagctcctgggtgctggcctggaggatgggtggtttccgagtaactgaaaccaagcccctggcaacctcacagtgattcaggctgggcctttctggactttaatcagtctctctctctctttcccattctaagtgcttactagggaactggaggccacttggctgctggttttggttgggcctttctggactttacctctcagcccctttttacccatccctgagccctccctgctctacctccggcactgcccgtccctgcctctccactgtccctggaggtccctgggccgttctctgggcctcaggatctcaccgtccatcccgtctgccctgcaggatgtcccagctgagcctgtcctggctgggcctctggccagtggcagcatccccttggctgctcctcctgctggtcggggcctcctggctcctggcccatgtcctggcctggacctacgccttctatgacaactgccgccgccttcggtgtttcccacaacccccaagacggaactggttttggggacaccagggcatggtgagtgtggcagcaggatgggtctaggtctcaggatggatggacttcctgaggggtacgaggcttagggagtgggggtgaaggggtgggctgggatctggggtggcagagaagcagaggaggcatcttactcattcctctgcttattcatttctgtgaggtgcctacgcaagcccttctcacttccttgtcctcccactccaggcctgcattgaatccttttcctgcctgtcttcccacattaatgcacctctgcggggctcctgggcagagggttggctgcacagagaggcgagtccctggcattcccacattctccattgctggactcgaggcttcttatgcccactgt

SEQ ID NO: 7891 - DNA, 6000 bp, Homo sapiens
catccacaactctctgactctgcccttgtacccatatcctcttggttcccctccacctggggctgccttcaatcaagtggccataaggcaaatgcagaaaaagcagccttttaaggtgttttcagggggtacctgtaggcaagtgtaggagccagacaaaggcctccttaaactggtgctgtgagctttattcctgcagtggccttcccagcaggtcattcccatgggcctccccaggaaaccaccctggaagggctgtcctctgggtctggaggggccaggaggagcctcagggggcgttcaggaacctgcagcctccacctcttcctccagcacacaagggctctctgcccagggaggctttagctcctgcaaaggatgggaagattccagtctcaaaggagataggactggagataattctggttaaagattaataaggaagggacatactgaggcatagccgacatcccctcccatcatagctgggaactcagtttttaagatttcttttgggtttccatgttcaagagggttcaagtggtactcctgcctcagcctcctgagtagctgggattgcagatgcccaccaccatgcctagatactttttgtatttttagtaatttttgtatttttagtagagacagggtttcatcacgttggccaggctgttctcaaactcctgacctcaggtgatccacccacctcggcctctcacagtgctgggattacaggcatgagccaccgtgctcggcccataaacttctatactctaagcttaaaaattattcatgctagagtttatttatacaaatatgacagatagaagtgtatgcatgtgtgcactgttcacctaatttctgtgaaaatcttgcagacatacctgctgttctgtacctcaatcccttagcctcatatcttgcctcccttgacatgtgtgtacatagaggaagatgcattttaaatgatcccctttctcattgatttagaactggttgagtttgaggctcatttccgtagagtatctaccctctaatattctgtaaagcagggacccccaacctccaggcagcagactggtactggtctgtggcctgttagggactgtaccacacagcagaaggtgagcggtgggcaaatgagcaaaacttcttcggtatttagagtcgctctacatcactcgcattactgcctgagctcagtaatgctcagtcagatcagtagcagcattagattctcaaaggagtgcaaaccctactgtgaaatgcacatgcagggaatctagattgtgtgcaccttatgaaaatctaatgcctgatgatctgtcactgtctcccatcaccgccacatgggatcatctagttgcaggaaaacaagcacagggctccctgattctacatgacggtgagttgtataattacctcataatatattacaatgtaataataatagaaataaagtgcacaataaatgtgatgcacctgaatcatcctgaaaccatctttgcctctcctccccctgctgcaacttgtggaaaaattgtcttccacgaaactggtccctggtgccaaaagggttggggaccactgctgtaaaggcagagtgtgtgtgtgtgtgtgtgtgtgtgtgtgtgtgtgtgctgaggtctccatgttgggggacattcaagcagagactctcatggatgcagtagctgggctgtgtagagctcacttcttcactagatgggaggctgggctccacggattgttcagttcccagaaccagaacagctggcatctcccctgcaagaatccacctgtgagtctgccttaacacctaacaggtgttcaaattttctgttactacttcaccacagataactcttctggattcaggccaagcctcctgtgtctaggaggttgctcccctagccataatctacagccaaagagaacacgtggtgaggacaggctggacctttaggtcccttctctaatacagtgcaaggccatgtctctgccccctgtgggatccaggtcaaaccccatatgcagcttacacagcaactgcaacaacagcaggaacagtgagttgcacttgctgaacctttagtctgccttgtgcattttgcatgcattgtctttttaagtattatgacaaccatgtgaggtgggtgctgctgaaacgcccatttacagacgtgaaggagcacggcccggtggtgagggtagcacaatgtgaggctgggtgggaggtctgggtgtatagcccggctccaccagctgtgcaactgtgggtggtcacttaagtatcttccaggcttaatgtttcatttgtaaaatgaaaaacaaggtgactaatatacttaaaggacttaaaacaggctgtgtaggttatgtcggcaaatggtggtggccaccattcctgctctaggctgcctgctcatcccaggcacacaggtggtctacagtgtgccaaacccctctagccactgggagcgctttcttctgtgtccctataaccccgcctgttcatcaaactctggctttgctccctgagcctaacagggatggaactgccagtaggtgaggtctgtccttgcagagggagtagggattttgggggatgcaccctaccccactgaggctgtagggccaggagcctgaatcccctggttgattgagctggcagtggtggtggggtgggggaggctttggggctccccaacacccagccagtgtcaggagcactgtcttccctgccctcctgcttagcagctgtgctaggagccccatccttcaagcaccccctcacccaagtccacccggcagggcaattctggacaggatacaaggagggccaggaggggagccctgggtctgctgggtggagcatccggggtgtgggaggaggagccaggtgctgattcaaagacctcaagatatttcccctctgggaccatgacattgcctgagattcctccatttatacatgtccctgtattaatatggcattgaccctaatgaatgggtgcagaacagcatggcagaggaaaaaggtttgggcttgaggatctcacaaacctggcttcctgtgagctctgtaacttgggctagaggcctgccctctctgagactcagtttgctcttttgttaaatggatgcattcccttctctggatgccatcactcaggtctctccaacaatcccagggctctggctcagagaaccgaggggaggttggtgtgaaggctttgggcatggtgacgcgggtgagcatctgacatgagcaggtgcacttgacctagagtaggtggaacacagtaggcatgctttacctagagcccctgccacatagtaggagtgctttgtggagagtgccttgcacacagtaggcattctttatgtcaagaactttacatagagtagttttactttatgtggagcacttgacacacagaaaaaacactttatatagagcatctggcacacagtaggtgtgcattatgtagagtaccggccacacagagtcagagtttatgaagagtacccagcatccagagtaggcacgctttatgtagagcacttgacacacagaaagaacactttatgtagagcatctggcatacagtaggtgtgctttatgtagagtaccggacacatggagtcacagtttatgaagagtacccagcacccagagtaggcacgctttatgtagagcacttgacacacagtaggtgcacttgacatagatcaccaggcacgtagtaaacatgctctacatagaacatctgacacacagtaggtgtgttttatatagagcagcaggtgcagagtaggtacactttacataagttactccgcacaaatttcactttatatagaggaccgagaacaaagaagcaagattttctgtagagcgcccagcacacagtggacacacttttcatagagcacttggcacacagtacacaacatgtatacagagtacctggcacatggtaggtgtgctttatttagagtccagtacacagtaaaagaactttgcatattgtcttttgcaaagagcagagactgacacacagcagctaaagtgctagctgccagccccttcccttcactccctcctcagaatctttcatctgtccccatctaaggcccattttcctgtgatccctcctctgtccccctctaaggccttatctgacatcccatttcccagatgggaagcctgagtccaggaggggctcactacccacagttagggcaaggggagggcagaataaggactccactcagggtcccccatctctgccctcctgtccctggccccatccactcatggcccctctcagccttacctcccatctcccctctctgtcctcctatgctgaacctagcctccaggtattctcctccagcggggctctttatctctaaaatctgaccgggtaatccccagcacagttagatagtttgttcctactcctgtcagtcatgtctcgacccaggccctgggttgcctggaggcaggacttgaactcctgccagactgtgaagccagaggccaggagcttctgtctctgaatctcctaagtctgcactgagaaatggtgcatgatgaactcctggaccacatgtggagaggagctcagaacatgatctggcacaatggttggcctggccccactctcttgccacctgaactctcaagttcatgactttatctgccacactcttgccttggaagggcaaggtggctgtaaactttggggctcagagtcacctttgactcttcctcaagatcccctcccactcaggtgtgagatgttgagacctgcggatcctgtgcccatgctgtgtcaccctgagctggctcctctgcacccagctggccctacgccaggttttggttggttgcccaggcttggaagacacacccagtccatggggattggctcgaccagcccagcccagcctcgcctcccacagccttccggaaatcaggggccagaggcaaagacctcctagcagagggggagaggagggtatgtgggacaagctgcttctgataggagccaggctggcagtggcagggctggagggtcctggcctgggatggggaggggactgcccaaggttggggtgggtcaaggctgctggcctgggagactggtgatttcctggtaactggacccctggcaacctcccagtgattcaggctgggcctttttggattctaatcagcctctctctctctttccctttctgtgtaactggaggccacttggctgctggttttcattgggcatttctggactttagatctcagctcttgtttacccatctcagagccttccctgatctgcctccagcactgcccatccttgcccctttccactgtccttggagcttcctgggcccttccctgggcctcaggatcccaccctccatcccgtctgccctgcaggatgccgcagctgagcctgtcctggctgggcctcgggcccgtggcagcatccccgtggctgcttctgctgctggttggaggctcctggctcctggcccgcgtcctggcctggacctacaccttctatgacaactgccgccgcctccagtgttttcctcaacccccgaaacagaactggttttggggacaccagggcctggtgagtttgtcagcaggacgggtctggggtctcaggatgcatggagttcctgaggggcaggaatggggctcagggagctgggttttgagggtggctggggtgtgggaacacagagaagagagggaggcagctcactcattcctctgcccactcactcattcctctccccgctcactcattcctctgcccactcactcattcctctgcccactcactcattcctctccccgctcactcattcctctccccgctcactcattcctctccccgctcactcattcctctccccgctcactcattcctctgcccactcactcattcctcttctcgctcactcattcctctgctc

SEQ ID NO: 7892 - DNA, 6000 bp, Homo sapiens
aggcccagagggcagccgcctggagcgtgacgagaatgacaagcacagtggcaagatccccgtcaacgccgtgcgaccgcacaccagctccccgggcctgggcaagccccctggaccctgcttgcagccaaaggcttcggtgctgcagcagctggacagggtggacgagactccggggcctccccatcccaagggaccccctcgctgctctttcagtcctcggaactcacggcatgagggctcctttgcccggcagcagagcttgtatgcacccaagggctccgtgcccagcccctcaccgcggccccaggcactcgatgccacacaggtgccgtcaccgcttccactggcacagccgtccacaccccccgtacggcggctcgagctgctgcccagtgcggaaagcccagtgtgctggcttgagcagcctgagagccaccagcggctggcggggccgggctgcaaggcagggctgtccccagccgagcccctcctgtcccgggcaggcttttccccagactcctccaaggcggacagtgatgctgcctcctcagggggctcggacagtaaaaagaagaagaggtaccgacctcgagactatacggttaacttggacgggcaggtggctgaggcgggcgtcaagcctgtccggttaaaagagcggaagctcacctttgaccccatgacgagacagatcaaacctctgacccagaaagagccagtgcgggcagacagccctgtgcacatggagcagcagtccaggacagagctggacaagcaggaggccaaggccagcctccagagccccttcgaacagacgaactggaaggagctgtcacgcaacgagatcatccagtcctacctgagccggcagagcagcctgctctcatcatcgggcgcgcagaccccaggggctcaccacttcatgtctgagtacctgaagcaggaggagagcacccggcaaggggccaggcagctgcatgtgctggtgcctcaaagcccgcccacggacctccctggtctgacccgggaggtcacacaggacgatctcgacagaatccaggccagccagtggccgggggtgaacgggtgtcaggacacacagggtaactggtatgactggacgcagtgcatatcgctcgatccgcacggcgacgacgggcgcttgaacattctgccttatgtctgcttggactgaccggcctgtcagccacaaagtgcattcccatcttgcagaagccgggtgggcgggcaggcaggtgggcaggtggccggggcccagctgcctcctgcgctgggaactcggggagtccggcccaggcgggagggagggggcgggagtcacgcggtctctctgcgctcttccctcaaaactctttttgtgaaatgctgctaccagtttactaacaaaattgcgaagaaggaccgcgtggaaggaaggacggcaaagtgagttcagaactctatagcaaaccagctataaaaagcgttagtccctcacccccaaagaggtgcggacactttccagcacctgaaagctggggcctcagttgcaggcaggcacagaaaacctgtgggagaggtcacctttaacacagcaacagaagcacgcatctcatctctcttgcattttctgttctttaatttggccctgagtgtcttgagacagtgggccatgccactgcctctgtttgctccctacccagccactgtcaggccagtgttgtctgtcatgtgccagaagcttctcagctgtggtgagccactggcattgggcaggcgggccagctggccagccagtgtgacccacactccatgggcagccacctgtttatatctggtttcagttataacccagtttttaaagaaatgctgcaaaaatttaagttttctcatgtttattttaaacaattcctcttccatcagaccaccagacaaaaaaacctttcctttcttcctcccttttcttttttcccttcctgtacacatctagaaaacttcacctttctagagtccccccaaaacaacacaaaagttattgtgggtgctactggttttatgctgtactgtggggcgagggggaagacctgtctgtacgctggaaacactcataaccattcctttagattcgtttgccttatggttatttgtcataaacgcgatttgcaaaaacaaggagccttagtgaatgtacagtacctagacttctgtgttctcaggacgcagaagggagcaactttgctatttggtccagtaagtggacaccttgtgatataaatgtggaaataaaaaaaaaaaaaaaaccatttgcacaaaccagtctgagaatcttttctcatttggaccttcacaaccaaatcagccctttcctggattgtggattattagccaggaacacccagaccccaacagctgcaatgcagggagacagggcagggcacagccttgcagtccacctgttagcctgctgctgcatttgggaggacctccacattttattcattcagggccacattaaggaatgttttcttgtctcacccagactttacctggcctagagagcagccctctgtaggaggctcccatagcacaggtctcagtgactacccccacctcaacaaaatacctagttcttacaaggtatggcccagaggctcagagctgtgtgtgtgtgtctgaaaggccaccccatggccctggcccccagctgccttattagctggttggtgctgactccaaaaaaatttttctcccttgactataaagtgctcatcttttagttccccctcgtccctgaaactgtaggctaagactttggttttccagtttttcactttggaataggtcatcttacccatatctgcttaatttcacaaatgaagaaacagctacaccttaagacatgcagtctcacagggcaaaccaaaggttccttccagcctgtaagactacagtcagtccagagccagtttgagagctagcagggattcctggcaaaagcttggtgcagaacacactcccctccccaacaaaaggccatgggcaaagtggctttgaaggcaggatgaggttgaacccaggcctaccacccaccagctgtgtggctctgagctcatctcttcactcctgtgcacatgtccccatttggggggtgagaataccccagagttgtgagaactaaaacacaaagcatgtcagtgtgtcagtggaagtatctgacactcagctgtgctgtagggtgcctatagttatactttcctaatttcactgtgcctatgtttaacagctctgctgagacatggtgtcccaaggatgtgactttactctgatccacagagggtacagctggaggatattagggtgcagagcttggcctcctatcagcatctctagagttttgggataggttgcagctccccactacccctgcctgcagggactaccatgcctgtgtccatgtatccagaagggcctagggcctttgagaatgcaaggataagctaagataccttccaacatttggggagccaagttgggttgctgctttctacttttctttgagactgggtctcgctctgtcacccaggctgcagtgcagtggcgccatcatagctcactggaaccttgacctgggctcaagccgatccacccacctcagtctccctagtagtgggtaccacaggcgtgcgccaccacgcctggctaatttttgtattttttgcaaagatgaggttctgccatgttatcgatgccacgatctccaactcctgagctcaagcaatccgcccaccttggcctcccaaagtgctgggattccaagcttgactcactgcacccagccggttgctgcttctaatttgacaagtaaaaacactgtaacggaattttaacaccctttccccgaaaaagttggaggcacacgatgtggagaacaaattatagcccttgaattagtataagatcatcttactgaaaacctcgtcctgttttcctccactggggcctcctggggctggtccatcccggctggtccttggacatcagccgtcagggcccggcacctcccccttctgcagagccttggagacaggtgtccaaggacgctaccatgaccacggtccccagtgtggccaggaagcctaagacaagtcgcttccccattctggacttcggtctgtgaaatgcggacagtgatacctaccgcaccgcgttcctaggattcagtgggatgataccagggccacgcccgagaactgcgcacgtcgcggtggtttccagaacatgattccagggatcgggtgctccgggatagtcccactgccagagtttggccacgagcgtgcgcccccagtttgcagagcgagtttagcccaagagcttttcacaaatggtttctttccctaaaaggccttttacctttggtgtcagccgccgccagccatcaggaatcaggaatctagttagcggttgcccttgtatccctggtcgaggccctgatgtttggcccacgcacagacgccgacgctgcgaagccctccgcgcttctgttcgcccgtcccgttcgagctccggctcccggtcactgggaccgcccacgtctcaggtggcacagcttggacgcaggtctgtgtccccttcttccgcttccggcctcggctccgccggaagcgcatctacagtggactgggcctgcactcgagacgtggtggctggcgcgtcggccggcgcggagggatgacgcgaggaggcagcgaccaatgggaaacggcgtagaccggggcgcctgcccccccgcccagccccgcccccgcccggcgtcgggccgtcggacgggctggaaggggcggccgctcgggcaggatggcggcggccgcggtgggcgcgggccacggcgcggggggcccgggcgcagcgagcagcagtggtggggcgcgcgagggcgcgcgggtggcggcgctgtgcctgctgtggtacgcgctgagcgcgggcggcaacgtggtcaacaaggtgatcctgagcgccttcccgttcccggtgaccgtgtcgctgtgccacatcctggctctgtgcgctgggctcccgccgctgctgcgcgcctggcgcgtgccccccgcgccgcccgtctcgggccccggacccagtccgcatccgtcgtccggcccgctgctgccgccgcgcttctacccgcgctacgtgctaccgctcgccttcggcaagtacttcgcgtccgtgtcagcgcacgtcagcatctggaaggtgcccgtgtcctatgcacacaccggtaggttccgcgcccggcctcgggggcggcggccgggcccgccgcttcgggtttgggcgcatggataggagtgcgccgcccggggcgcgtcccgccggactgagaagtcagcagaggggctgccaagggtttggtaggggagggacacgcacggggttctcagggagaagaggagctgagaagagagctgagaggtaagcaggacagaccacaacagccgtggcaggaggaagccctaccgaaagagaaggggcgaagaggtgtgaggggctgccaggccctcccatcccgccgtggaggtggaacaggttgggccctgaaattcaggcagccccctgagtgcccatccctctctttgcagtcaaggccaccatgcccatctgggtggtcctcctgtcccggatcattatgaaggagaagcagagcaccaaggtaaccccgggcagggactctgggcagatgggagctccagggggttcctccctgttgccaactggtgacgtggtcaggatcctggtctgcaggctgcctggcttcccgtcaaatagggaagtcagtgtagaggtctccagtggccttttactactcaagttctagaatcaccctgtgagcagtggtgtgtggagtatgtgtccctctgtgatctctgctgtgtggtcttaggaacactgttgtccctttcagatccaattttcctccccgttttgattccctacctg

SEQ ID NO: 7893 - DNA, 6000 bp, Homo sapiens
ctttctttctttttttttttttttttttttttgagaccgggtctcactctgtcacccaggctggagtgcagtggtgtgatctcggctcactgcaacctgtgcctcctggattcaagcaattctctgcctcagcctcccaagtagctgggactaccacacccggctaatttttgtattttttgaagagatgggatttcaacatgttgcccaggctggtctcaaactcctggactcaagtgatccgcctgccttggctttccaaagtgctttggattacagatgtgagccaccgcacccagccaggaaatttgattttaaatcttcttttatttattgaaaaactaactcagaaaaaatctaagtgtccattcataattttatggtactgtatctggtgaaaacctaaacagccagccataggagtcaatgaatctcaaagacataatactgtgcaaaaagaggaaggtctatctttacctttttttttttttttttttttgagatggagtctcactctgtagcccaggctagagtgcagtggcacgatctgggctcactgcaacctccacctcccaggttcaagcaattcttctgcctcagcctcccgtgtagctgggagtactggcatccgccaccatatctagctaatttttgtatttttagtagagatggggtttcaccatattggccaggctggtctcgaactcctgacctcgtgatctacccgcctcgacctcccaaagtgctgggattacaggtgtgagccacgacccccagcctaccctttttgctaaaaaaaaaaaaaaaaaaaaaaaaaaaaaaaaaaaaaaaaaaatcaggcctggcgtggtggctcacgcctgtaatcccagcaatttgggaggatgaggtgggtggatcacctgtggtcaggagttcgacaccagcctggccaacatggcgaaagcccatctgtactaaaaaataccaaaaaaaaaaaaaaaattagctaggcatggtggtgtgcacctgtaatcccagctactcaggaggctgaggcaggagaatcacttgaacccagaggtggaggttgcagtgagccaagatcatgccattgcatgccagcctggacgacaagagaaaactctgcctcaaaacaaacaaacaaaaagttacaaagttaaatcagctaatataacaaatgatccaaaacagaaacattacaaattaaaggtgtgagatcaaattagaaaaggacaccaaatattgtttttgggcttgatacaaataacattggtatgtatatttaaaactctgcttctcacatggtgacaactgttcaaaattgtggcacatcagtaccatcaggtccggggggctttttgttttctgggagtttgaggttgcctttatttttccttgtcaactggtatcacattcatacatacatagatgcaacatcttctatatacaatgaagaacagccaagatcttaagtgtacaccaagacccacatctactggcattggcccagacactgcacccagcctcagctcctctgctggaccctggtcacccacacttcatccccatcatgctctcctttccccagtgctctcacaggcctggggcaccggcagctgggaatactgcccctcccctatgtctgagttcctcagcctgacatcagaggccaggcatgatccagccctcacatcttaaaaaatgccatcattgcccggtgcggtggttcattctgtaatctcagcactttgggagtccaaggcaggtggatcacctgaggtcaggagtttgtgaccagcctggtcaacatggtggaaccccgtctctactaaaaatacaaaaattagctgagcagtagtgctgcacatctgtaatcccagctacttgggaggctgaggcaggagaattgcttgaactctggaggcagaggttgcagtgagccgagatcgcaccactgcactccatcctgagcaatagagcaagactctgtctcaaaaaaaaaaggccatcatttattaagactgagtatgttccaggcatgacgtcaagtacttcaaaactggctatgttgttggccaggtgaggtagctcacgcctgtaatccgagcactttgggaggccgacgcaggcggatcacgaggtcaggagtttgagaccagcctggtgaaaccctgtctctactaaaaatacaaaaaattagccaggcatgctggcgcgtgcctgtagtcccagctactcaggaggctgaggcaggagaatcccttgaacccaggaggcagaggctgtggtgagccaagatagtgccactgcactccagcctggggaacagtgccagactccatctcaaaaaaaaaaaaaaaaaacaaaaaaaaaaaacaaaaaaaactggctatgttgtcttcacttgatttttgttttgtttttgttttttgggtttttttttttttagaacagggtcttgaacttgtgggctccaacgattctcccacctctgcctccctaactgctgggattacaggtgtgagccactgcacctggctatctccacttcggacaggagaaaactgaggcccagggagggaaagtcacttctccaaggccacaaagctggtaggtggcacagtcagaactcaactccagaactctaaactgtaatgctgggttcactcagactacattgcccccattacggaggatgttctcctcctgcccagctctggggggctctgggtgggtctggccaacccagagaaatggctggttgggcacccgtggcagcccccagccctccttcccccactagcagccgccgacgacgccgctgggaagggtccggaatcaggatcaggaaccaccgggtagctgcaaaggtcaaaggtcagacatgggtttcctgcccacccctgggaacttccttcttctcaactctacactcgcctcactgagcaccaccctggagtacccctccgctctgtcaacgacccctccccactctgttaccctggctaatggggggacgggtccccacgccccagccttcacattgccctacagaggacagcaattgcatgattgtcacctgtccggagtccagcctcctttccggctccctgctcctgttcctccagcccaccctgactccacagggtggggggtacctgtcccagtctgtctcccaagactgggagttgcttgtggctgaggttgggactgacacctcttggggggccctggcatcacccagcatggagcaaacaaagaagggactccagggagggtttccctggagctcctgatcctgggagataggcaggacacacagaatcctttgcttccgggtccccaaatcccctccaggcccaactggggggtgacccacagcgaccccagaaaactcccgtggtttttttggtttgtttgtttttgtttttgagacagagtttctctcttatctcccaggatggagtgcagtggcccgatctcgcttcactgcaacctccgcctcccgggttcaagtggttctcctgcctcagcttcccaagcagctgggattacaggtgctcgccaccacacacggctaatttttgtatttttagtggagatggggtttcaccatattggccaggctggtctcgcactcctgacctcaggtgatccgcctgcctcagcctcacaaagtgctgagattacaggtgtgagccactatgcccggccgcccatggggttttgagtgtcgggggaggaatctcagtcccacgtatccaccacttgtcattcaccatctcacggagcccccagcagtgcctccagcaggaaatgatcctaatcataacaacagccacagagtgacgaggcactgggtataccccgtctcacaaaggggaaaagggaggcacagacatgcgaggcctcttgcccgagctctcccgggacaaagccagctcttccccgctccaagttcattattccttgtgctgcagtttcctggagcatttactgagcatctaagtgaacagggcactgggggcaatgacagagcttggggagccagcgccaccgccatccatggctcagccctccgtgacgccctcctatgcaattactaatcacctactgcttctccatccctaggctagctaagagtttcacactttttctgtttttttttttttttgaaacagagtcttgctctataccccaggctggagtgcaatggcacgatctctgctcaccgcaacctccgactcctgggttcaagcgattctcctgcctcagcctcctgggtagctggaattacaggcgagcaccaccacacctggctaagttttgtatttttagtagagacggggggtttcaccacggtgaccgggttggtctcaaacttctgacctcaggtgatccgtccgcctcagcctcccaaagtgctgggattataggcgtgagccaccgtgcctggcacatttcccacgttttgtggcacttaatcagcaccgccctggtgaagtgggtgcacgtctgtagccagcctgtcttgaggtaagtcaagttcgctgaactaacagcgtgagaccccgaggcaaccccttctcctccctgtgcctcagtttcctccgccacacaagggagacagcaacagacctggcatgattcagcgacctaatcacagcaggtactgagaacagcacccgccagcaagtaaaggcgaacgcgaggctcgaagaggccaggaatgcctgaccagccagccagcgccccacccagcattaatcagaggggtccagccggtgccctggctctgggcccccagccccacccccgccttctcacagccagagtgggagtgttgtgataacccgcagcccccgtttcctccgggccaggaaggagccaggcagaggaagtattaagaggagtaatataagcactcccccctgcgaggcgggggccagagcaggcctggtggtgagcagggacggtgcaccggacggcgggatcgagcaaatgggtctggccatggagcacggagggtcctacgctcgggcggggggcagctctcggggctgctggtattacctgcgctacttcttcctcttcgtctccctcatccaattcctcatcatcctggggctcgtgctcttcatggtctatggcaacgtgcacgtgagcacagagtccaacctgcaggccaccgagcgccgagccgagggcctatacagtcagctcctagggctcacggcctcccagtccaacttgaccaaggagctcaacttcaccacccgcgccaaggatgccatcatgcagatgtggctgaatgctcgccgcgacctggaccgcatcaatgccagcttccgccagtgccagggtgaccgggtaaggctgtgggcaggacactcgccctggggaccctgagcaagccccctcacctctctgagcctgagtttcctcatccaagagagggggacgatcacaggaccaatgctctcttttcttatgagacagagtctcgctccgtctcccaggctggagtgcagtggtgcaatctcggctcactgcaacctctgcctcctgggttggagtgattctcctgcctcagcctcccgagtagctgggattacaggcatgtgccatcataaccggctcatttttgtatttttagtagagatggggtttcaccatgttggccaggctggtctcaaactcctgacctcaagtgatacgcctgccttggcctcccaaattgttgggattacaagcgtgagccactgcacccggccgatagattttttttttttccttaagagacagggtctccatgtgtatcctgggctggatggagtgcaattgctatcacagctcactgcaacctcaatctcctggactcaagtgatcctcttgcctcagcctcctgagtagctgggactacaggcgtgcaccaccacacccagctaatatgtttatatttagcagagatgaggtctcactatgttgcccaggcta

SEQ ID NO: 7894 - DNA, 6000 bp, Homo sapiens
tatatatatatgaagctaaaaccaaaagaatgctagcggctgggtgcagtggcttactcctgtaattccaacactttgcgggggctgaggcaggaggatctttggagcctaggagtttgagaccagcctgggaaacatactgagacccccatctctacaaaaaataaaaaattagctgggcgtggtggtgcacacatatagtcccagctacgccagaggctgaggtgagaggattgcttgagcccaggaggtcaaggctgcagtgagctatgattgcaccactgcgctccagcctgggcaacaggacaagattctgtctcaaaagaaaataaaaaaagaaaaagaatggtagcataacagtttccatttctaattttattgcgaaagtaattgtggtttctgccataacttttagtaagcataattaattaatgccattaaaagtaatggaaggccgggcgtggtggctcatggctgtaatcgcagtactttgggaggccgagatggacggatcatgaggtcaggagttcgagaccagcctgggtaacatggtgaaaccccgtctctactaaaaatacaaaaattagctgggcgtggtggcgggtacctgtaatcccagctactcaggagactgaggcagcaggattgcttgaacccaggaggcggaggtcagaggttgcagtgagacgagatcgtgccaatgcaccccagcctgagagacagaccgagactccatctcaaagaaaaaaacaaaaaaaggctgggtgcggtggctcaagcctgtaaccccagcaatttgggaggccgaggcgggcagatcacctgaggtcgggagtttgagaccagcctggccaacatggagaaacctaaacctctctactaaaaatacaaaattagccgggcatggtggcgcatgcctgtaatcccagctactagggaggctgaggcaggagaattgtttgaacccaggaggcagaggttgtggtgagctaagattgcatcattgcactccaccctgggtaacaagagtgaaattccatctcaaaaaaaaaaaaaaaaaaaaaaaagtaatggcagaggctgggagcggtggctcatgcctgtaatcccagcactttgggaggccaagtcgggtggatcccttgaggtcgggagttcgagaccagcctggccaacatgtcgaaaccccgtctctcctaaaaatacaaaaagtagctgggcatggtggcaggcatctgtagtcccagctactcaggaggctgaggcagaagaatcacttcaacccaggaggcagaggttgcagtgagccgagattacaccactgcactccagcctgggtgacagagggagaatatatttaaaaatataaaataaaatataggccgggcacggtggctcacgcttgtaatcccagtacttggtgagtccaagttgggtggatcacctgaggtcagaagtttgagaccagcctggccaacatggcgaaaccccatctctactaaaaatgcaaaaagtagccaggcatggtggcaggcatctgtagtcccagctactcaggaggctgaggcaggagaatcgcttcaacccaggaggcagaggttgtagtgatcgagatcgtaccactgcactccagcctgggcgacagagagagattccctctcaaaaaaaaaaaaaaaaaagtaatggcagaaaccgcaattacttttgcaccaaccaatatataaaaatacattatatatttaaaaatataaaataaaatataggccaggtgcagtggctcacgcctgtaatcccagcactttgggaggctgagtcagacagatcacctgaggtcaggagttcaagaccagcctggtcaacatggcaaaaccctgtctctactaaaagtacaaaaataagccaggcatggcggtgggcgcctgtaatcccagctactcaggaggctgaggcaggggaatcgcttgaactccggaggcagaggttgcagtgagccaagatcgtgccactgcactccagcctgggcaacaagagcgagactccatctcaaaaaaaattaattaattaattaattaattaaaacaaaataaaataaatatatgtacttaaaatatatatatatatttatttttaaatagggataggatctctctatgttgaccaggctggtctcgaactactggcctcaagcaatcttcccatctcagcctcccaaagtactaggattgcaggcatgagccactgcacccatcccaccatttgtaattgtgggcggcaagccacccaggtgccaaggcaagagactgaggacacgagctgttccagtataataaaatataaaacaagaatagttataccaaatatagatcttagagatatatgaatatcattaatcattagtttgtagtaattactctttatcccaatagtataataatcctcggtctacaatcataacctaggaaaaaccaggccatacagagataggagctgaggggacatagtgaggtgtgaccagaagacaagagtgcaagccttctgttatgcccggacagggccagcagaagggctccttggtctagcggtgacgccagcgtctgggaagacgcccgttgcccgagcggacagtggtctagcggtagcgaaaagtgtcaaggaacaacacccactacttagcagaccgggaaagggaggctccttttccctgggggagtttggagaagactctgctcctccacctcttgtggagggcctgacatcagtcaggctcgcccgcggttatctggcagcctaaccgtctccctgtgatgctgtgcttcagtggtcacgctcctagtccgccttcatgttccatcctgtacacctggctctgccttctagatagcagtagtcatttagtgaaagtactaaaagtctctgatatgcagaaataatggcataagctgtctttctgtctgtcccctctctctctctctgcctcggctgccaggcagggaagggccccctgtccagtggacacgtgacccacgtgaccttacctatcattggagatgactcacactctttaccctgccccttttgctttgtatccaataaataacagcacagccagacattcggggccactaccagtctccgcgcattgctggtagtggtcccccgggcccagctgtcttttcttttatctcttcgtcttgtgtctttatttctacactctctcgtcgccgcacacagggagagacccactgaccctgtggggctggtccctacagtaattttaaagggaagagcaacaaactttcggtttgcagggctgggactgtttacagctgcaaaatttagagaggacatcaatctattattatccacattttacagctggggaaatcaatgctaagagaggaaattcatttgcccagaggtgcaccaccctggcctccaatgtgcaattcatgcaattgtgatttccgacctggtcccaaactaaccctaaagttagcaggccagaacagtgctgctcaaataagtcagcttagtcaaataagtcaggcaaaggtcgtgtctttgcacctggagtcctggccaggctggtaggtccctcctcctgggacaagttcaccctcagaattttcagcaagatcatctcccacagcttgttaattggttcttggttctaagtgatttttttgtttattggtttaagagatgggatcccactctatcacccaggcttgagtgccgtggcacaatcatagctcgctgcagcctcaaactcctgggctcgagtgatcctcctgcctcagcctcccagcctcagcctgggaccacaggcatgtaccaccatgcctggctctaagtggctttaatggggtccttctgagggatgttggagtcagggcctggggggagttccccaggccttctgggaggcctgggctctggacttgacctcgcctactgtctggccctgctgaaaagaaaaaaaaacatggaaatggcagacctaacagaatctgggctgtggtcaggatgtggctgaagaagccacaagaaaaacatgcagtcccctttcagcggtcatgcccagcagttgggtgccgataatgggcctgatttcctgtaggaagccctggctctcttggccacatggacagtgtctgaggctggccctgttattcccctttgcagatgaagaaacaggctcagagagtttacctggtatcctggagtcccaggagcactttttctggaagtaggagcttgtttcctgcaggtgccaagacagagaccgacattgtttgttggctgggtcggtctcccagttttcagctggctccagtctcacctgttgctcacacaccctccatgtctcccatagtcccctcggtggggacagaggcactggatgaagccctgctcgtcaccacagagacacctgaacacaaaaaccagtccctggggtcagacccaggccccgcccccagacccaggccctgccctcactccaccacgcaactgtgcaacctcagtttccccaggtggagaccggaccaacagtgatggcctctgcctcttcaggtcatagtacagatgaatacaggctggcacggcctaggcactcagtaacacacagcagaggcacagggacttaagatggagtgtcccaggcagccacagttggctggcacccagctgggaagggcccaagggcttttaaagcagggtgaaaaaaaagcccacctcctttctgggaaactgaaactgaaaacctaattaatcctctgcctgtaggtgcctcatgcaagagctgctggtcagagcacttcctggaacttgctattggtcaggacgtttcctatgctaataaaggggtggcccgtagaagattccagcaccctcccctaactccaggccagactctaaaggggagatctggatggcatctacttcgtatgactattgcagagtgcccatggaagacggggataagcgctgtaagcttctgctggggataggaattctggtgctcctgatcatcgtgattctgggggtgcccttgattatcttcaccatcaaggccaacagcgaggcctgccgggacggccttcgggcagtgatggagtgtcgcaatgtcacccatctcctgcaacaagagctgaccgaggcccagaagggctttcaggatgtggaggcccaggccgccacctgcaaccacactgtggtaagctcctcaactcctttggatggcctagtactaggcggtgggagggacaagaatctctccccagaaatctgacccagggtgggtctccagggagatgcaggggaggtcctgaaactgctcctgggcccccacatcaagggacctaggttcccctaccagggtttgtgggcccctaacccagtccagggcactggtgtaggggcagggtgttaaaactctccagatcccccaaatcggggacctcagtatccccctgggacttaggtgaatttataaattctttccagggcactggtgtcgggggccttgaaactcctcgtgggcaccagtcctgggggagtagaaatccctattcagggttgaagggggacctcaccagaccctgaaaaagggggcttttgaaattttcacttcatccctaagaaactgaaatattcacctgggtcctgatatgggggatcttgaaactctcgctgggcatgtcacttgggcggggaaatcccactgcattctggatttggtagggccctctaacttttcttgggccattgctcaggcaatctggaaatgtccactaaactttggttatcgatagcctccaagtttccacgtggggtggcctcaaaactcccattttgaggacccacatgcttatgggtggccctgggagagtgtgtggttgtggctgttctttaaggttggagaccatggtgcagagagggttggaagaaaacctgaaaggggtttgcatttaagcccctctgtccccaggacctagg

SEQ ID NO: 7895 - DNA, 6000 bp, Homo sapiens
aaaaaaaaaaaaaaaaaaagaaaagccaggcatcatggtggcattggcctgtgtctcagctatatcagaggctgaggtagaaggatagcttgaaactgggaggttgaggctgcagtgagctatgattgtgtcactgcactccagcctgggtaacagagtgagaccctgtctcaaataaaaataataattaaacatcctcaaatgatccctcagaggcattagaaagtcctgattgaatgatgaaaattgttcttgttgatgagtgatgcctatgagtttgttaaattaacaaatgggttgtctcctggctaactcctatgcatccttcaacaccctctttagatgatcctcagcgacgttagggtctcttgccacatggagggaagctcggccctcctcctcgggctgaaggtctctctccctgagaaggcggaagctgaggaggtggggaagtgctgtggttcctcccgtcatgttttctggggccctcgtgactcgatccttcctgcttcacccgcccccgagtctgtggggcacctgaaagtggggcagccctgggaacttatctcagacgagcttctggggcagctgggtggggccataaggggcccacagggcctcttggcaggcctagagacggagggaaggaggtgggcttgccaagatgtggcaaggggaaggtgggatgtggggaacttcagagggagtgtcaggttgtgacttcaataaggggagaaataccacttcacctttgtctggggtacccctccagctcacacacctgccatggctccctaccgccctcggagaaagccaggccctttagcctggcgctcgaggccccagcccatcaccccacagaaacccagacccactgtgtccatcttggtggtccccaaagcacctcctctggacttttgcctctgctgtggcctctgccggagatgccctgtaattctatacattctagctcaagtgtccctcctccaggcagtcctccctgctccacttcagggcacccggcctccatctgttcctgatcccaaggggctaggggcgtctgtgtccagcttttcacctccccagccctgtatctccctccctcgatgtttttccagcagctgccaggcagaggccactggggaacaacaacaatgactaatcacactggccagcgggtggacagcgctcactgcaagccaagccctccttcatactcacaaaagcccattttgcaggtgggaaagatgaggcctgagagggccaaccttggtgcgggtgggggaagccctgaggcacggtctccactctggaaggggcaaaactatactccacaaggggtggtttgaatccatctcttcatctccagctggggcctcaggtggtctgagtgcccctggactcagtttcccaatctgtgaaataaggcaagtgagggactctccaggaattggtggagttgggagggtctcaggatggtcaggagggggccatgactttcctctgatctctacctatttcctccacctttcttgttattttttgagcagggtcttgctctgtggcccaggctggagtgcagtggcgcaattagagctcactgcagtctcgacctccctggcttaagcctcagcctcccaggtagctgggactacaggcacctgccaccatgcccagcaaattattttttgtagagatggagtctcaccatgttgcccaggctgctcttgaactcctagcctacagcaatcctcctgccttggcctcacaaagtgctggattacaggcataatccaccctgcctggcctcctccatctttatgtatctctctatctctgtccctttctctgtctctgcccctcccccaggcctcacacatccatcccccagctgaccctggcctgggccccggggccagagaaggctgtcctgtatggggtcacagggcccccgtccccactgtgccaggcccaggacactgagtctttgtccctaactcactgacctcatagcctgctgggcgcctgaccctggccagctcagctgcccctcggagccaggcttcttgaaggagggacctcctcccaggaagctgaaccgcattgcacaaccctggccacttgggcctcagtttccacagatgctcatccccaggagagaccctctccttctccctcctcagtgcccctggactctaagaatatttcttttttctgtagatgcatctcacgtaacctaaaattcatctttttttttttttttgagacatagtctcactctctcacccaggtgggagtgcagtggtgtgatctcggctcactgcaacctctgcctcccgggttcaagcgattctcctgcctcagcctcctgagtagctgggattacaggtgcatgccatcacgcccagctaatttttgtatttttagtagagactgggtttcactgtgttgtccaggctggtctcgaactcctgacctcaaatgatccacctggctcggcctcccaagtgctgggattgcaggagtgagccaccgcgcccgggccggaaattcatcattttaaagcaaacgattcagtgacatttagcacattcagtgttgtgcaaccaccacctctatctggttccagaacatttgcatcaccccaaaaggaaaccccgcatacatcagcagtcacttctcactcccgcctccccccagcccctgacaaccactcagctactgtctgcctctgtacatttgcctattttggatattttatataagtggaatcatacagtgtgtgcctttcctgtccatcttcgtccacccagcatgatgggtttttttttttgtgtatgtgtgtttttttttttttgagatggagtctcactctgtcacccaggctggagtgcagtggcacgatctcagctcactgcaacctctacctcccaggttcaagtaattctctctgcctcagcctcccgaatagctggaattacaggcacatgtcaccaggcctggcaaatttttgtatttttagtagagacagggtttcgccttgttggccaggctggtctcaaactcctgacctcaggtgatccgcccacctcggcctcccaaagtgttggaattacagatgtgaaccactgcacccagcccagcattatgtttttgagggttcatccacatggtagcttggatcagagcttctccactgacatttagaggctttgccgacagtggggagggaggggcaggaaacaaaatactcagaggctaagaaatggaacatgggggaaagactaagttgcatctcttaaatttttttttttttttttttaagagacaggatcttgctctgttacccagactggagtgcagtggcacaatcacgattcactgcagcctcaacctcctgggttcaagccattctcccacctcagcctcctgagtagctgagaatacagatgtgtgccaccacgactggctaacttttaatttatatatatatatatattttgagatggagtgtcactctgttgcccaggctggagtgcagtggcgcgatctcggctcactgcaacctccacctcctgggttcaagcgattctcctgcctcagcctcctcagtagctgggattacaggtgcctgccaccacacccggttaatttttgtattttcagtagagacagggtttcaccattttggtcaggctggtctcaaactcctgacctcgtgatccacctgccttggcctcccaaagtactgggattacaggcgtgagccaccgcgcctggcctaattctttattttttatagagatggggtcttgctatgttgtttaggtagacccaaactcctggggtcaagtgatcctcccacctcgacctctcaaagtgctgggattagaggggtgagcccaggtgcacaaggctggagcttggcatgtggggaggtgggcattgtggagggccagcatgctgcaagctctttgtaacaatttgttggaaggatgaaattaggccatccaagaacactgccctccttcagctcttgagtctcagattcagaagctggcgagatggcccggtgcggtggctcacgcctgtgatcccagaattttggtaggccaaggcggacggatcatttgaacccgggagtttgagaccagcctgggcaacatggcaaaaccccctctcttaaaaaaaaaaaaatgcaaaaattagctgggcgtggtggtgcatgcctgtagtcccagttcctggggaggctgaggtaggaggatggcctgagcctggggaggttgatgttgcagtgagccgtgattgcaccactgcactacagctgggccacagatcaagaccctatctcaaaagaagaaaaaaagaatttggcagccaggcacggtagctcacgcctgtcatcccagcactttgggaggctgaggtgggtggatcacttagggttaggagttcgagaccagcctggccagcatggtgaaaccctgtctctactaaaaatacaaaaattagctcgatgttgtggcagttgcctgtaattccagctactcgggaggctgaggcaggagaattgcttgaacccgggaggcagaagttgcagtgagtggagatcatgccaccacactccagcccgggcgacagagcagggctccatctcaaaaaaaaaaaaaaaaattggctagagagggccagagacctggccaagtgcatggaaccacaggtggcccatgggcccatggggctggcatctgggtgttcagttcaggtctggggccagcagggcagaaccccctagaaccctgacttgctccaaagtcagacttgctccagagtctgtggccgccaccatcaccaccaccacggagctgacttcctgggtttctctttcactttgacttgccttagggatgggctgtgacactttactttttttcttttttcttttttttcagtcttttctccttgctcagcttcaatgtgttccggagtggggacggggtggctgaacctcgcaggtggcagagaggctcccctggggctgtggggctctacgtggatccgatggagccgctggtgacctgggtggtccccctcctcttcctcttcctgctgtccaggcagggcggtgagtcccctgaccctggcatggcggctcctcttgctgggtggaggcacgtgtatgtgtggagagctgtgggcctgctgtgtgggttggtttcatctctctgtgcctcagtctttcctgctgtcaaatgggagatgggcagtcatggcttctgggatcgaacttagacatctttcctctggtctagattttctcttctgtgaaatgcactaaattttttccacctcccggagttcaatgagaaaaaaaactaaggaaggaataaaaagcaagtatgtatctaataggtatacatagtatagtatcttatgtatgtagtttacaatagatagacatacataatataatgtatacagtcatttccatatttacggggcaatggttccaggaccctctgcagataccaaaatccaaagatgctcaagttcctgatataaaatggtaaagtatttgcatataacctatgcacatccttccgtatactttacttatttatttatttatttatttatttatttatttatttatttatttactgaggtagggtctcactctgtgtcccaggctggagtgcagtggcctaatcataactcattgcagccttgaccacctgggctcaagtgatcctcctgccttagccccttgagtagctgggactgcaggtgcacactaccatgcctggttaatttttttggtgtatactttttacagagacagcgtctcgctgtgttgcccaggctggtctcgaactcctgggctcaaatgatccactcaccttggcctcccaaagtgctcagattacaggcatgagccaccatgcccagccttcccatatacttttaataatctcaggccctgcacggtgactcact

SEQ ID NO: 7896 - DNA, 6000 bp, Homo sapiens; identical to SEQ ID NO: 3316

SEQ ID NO: 7897 - DNA, 6000 bp, Homo sapiens
gctaaagttacagattaacagcatctcagggcaaagcaattgttcagggtatgggtcaaaatgaagttttttatgtcttccttttctacatagacacagtaacagtctgatcgctttttcttttccctacatcccagaccccaggactaccaaactccagggcccccagactgcaggacccccagatcccaagactcccagacctctggatccccagacttcagaaccaccagacccctggacccccagaccccaagactctcagacatctggatccccagacccctatacccccccaccaaacccccatatcccaagacccctagatcccaggacccccaaacctccggatcctcagactttaggacccccagacctcaggacccttagattccaggactctcagacccctggatccccagacctcagagtccccaaatctcaggaccccacagacctcagactccaaggcccccggctcccccagacccacctccaaaactcactatcccagaccccaggcctgcctgtcccccaccacctgcagcctcgggtctggcacttcctcatttctttatttcctttttttctaagaggcctcagaactgggcgtggaggacgtgcagctgcatgaggctcactgctggctgggctcctccatccctctgctccttataaaagaggccccaagagctcccctgctccctctgctgtctactgaggacacagtgagaagacggtcatctgcaaactaggaagtgaatctgctggtgccttgatcttggacttcccagcttccggaactgttgttcataagctaccccagtttacggcatatttgttatagcagcctgaacaaacatttggagacatctgctctctacccagggctgctcccaccacagggcctttgcacatgctgttcccactcctggatgctgttccccacatcccttcctccttactccctaaggggttccttgatcatcccattgaaaagttgcttctgcggccaggctcagtggctcacgcctgtaatcccaacactctgggaggctgaggagggtggatcacctgaggtcaggaattcgggaccagcctggccaacatggtgaaaccccgtctctactaaaaatacaaaaagttaactgggcatggtcccatgcgcctgtaatcccagctacttgggaggctgaggcaggagaatcgcttgaacccgggaggtggaggttgcagtgagccgagatcgcatcactgcactccagcctgggcaacaagagcaaaactccgtttcaaataaataaataaataaataaataaataaataaataaataaaagtttcccatctcatttcctgcccttatttttctttgcagcattcccaccacctgcacttgatatattttcccgatggattctgcctgttgtctgtttccccaactacagtgagaggtggggggagggggggctgggatttttgtctgttttattcactgctgtgtctgtggttcatagtacctggtatacaacaggaacttcataaaggcttacagaggaaatgaatgagtctttccttataggttcatagagatttataatttcattttcagaactttgtggcatgctaggatggatgaactgaactgttactaatgtaaccaatcctttaagttatttcctttttttttttttccttcttcttgaggcagaggatcactctgcactctgtcaccccaggctggagtgcagtggcacgatttcagctcacttcaacctctgccttccagactcaagcgatcctcctgccttaggttcccgagtagctggaactgtaaggatgtgccaccactcccagctaatttttgtgtgtgtgtatatctatctatatatatatataaaaatttttttttttggtagacatggggtttcaccatattgcccaggctagtcttgaactcctgggctcaagcgatcctcctatcttgacctcccaaagtgctgggattacaggcatgactcactgtgcccggcccattttattttttttcatgtaacaaacaatgctgcaatgaatcactttgagcctggagcatctttttgccttctctctctctctcttttttttttttatatgaagtctcgctctgtcaccaggctggagtgctgtggcgcgatctaggcttactgcaacctccaactccctggttcaagtgattttcctgcctcagcctcccgagtagctgggattacaggtacatgccaccacgcccagctaattttttgtatttttggtagagacagggtttcacagcgttggccaggattgtctcagtctcctgaccttgtgatccgcccacctcagcctcccaaagtgctgggattacaggtgtgagccaccacgcctgactttgccttctcaaaaaaacaaacctgcaacatacacacaacataaaattgaacattttagccaatttatttatttattattattattttgagatggagttttgctcttgttgcccaggctggagtgcagtgccgtgatctcggctcaactgcaaactctacctcccaggctcaagtgattctcctgcctcagcctcccaagtagctgggattacaggcatgcgccaccacacccggctaattttgtgtatttagtagagatggagtttctccacgttggtcaggctagtctcaaactctggacctcaggtgatccgcccacctcagcctcccaaagtgctgggattacaggcatgagccaccgcggccggcccagccatttattttaaattattttttagagatagggtcttgctctgctgcataggctggagtggagtggcacaatcacggctcactgcagtcacaaccttctgggctcaagggatcctcccacctcagcctctgaagtagctgggactacaggctgaagccaccatgcccagctaatttttaaattattattattattattattattattattattgagatggagtctcgctctaacgcccaaactggagtgcagtggcatgatctcagctcactgcaacctctgcctcctgggttcaagcgattctcctgcctcagcctccctagtagctgggattacaggcacgtgccaccatgcccagctaatttttgtatttttagtggagacggggtttcaccatgttggccaggctggtctggtactcctgacctcgtgatccgcccaccttggtcccccaaagtgctgggattacaggcatgagccaccacgtccaggctgagccacatttttttattcgttagtcagttcacactgtaaacatgcaaatattcaggcagggattcccagaagtggacttgctgtgtcagcaggcacatgagtttatcattccggtggcctgtgccagggtgccctccaccagtgctacaccatggacgcaccccacagcctggctggcacagaatgtcattgcattgttggatttttgccaatttgattggtgaagacaaacagtttgtgatttgcagttttcttattaagtgtgaacttttttttttttttgagacaggtctcactctgttgcccaggctggaatgcagtggagtgatcttggctcactgcagcctccacctcctgggttcaaacaattctcctgcctcagcctcctgagtagctgggactacaggcacataccaccacacctggctaatttttgtattttttaaagtagagacggggtttcaccatgatggccaggctggtctcgaactcctgggctcaagcgatctgctcacttcagcctcccaaagtgttgggattacaggtgtaagccactgcacctggcaagaatgagcatctctggacatgttgaaaagcagtttcccgctttttcttcaaggtctccgttcaaagcctttgaccatttcttggagtttggcgatgtgaaggacagaggccgaaaagaggggaaaacgtgggggagtggactcccagcctcccagatcccggagaagcctctgtgcatttgacagctgtggacatggtgtcacacgcagttaaggtggcacagtgagtcgggctggcataggttgtacctggtccacctgacaccaggttcaggtgaggccttctcccagcccacccctcctcagtatcatttttgtcactactacccctccagtctgcctcaggcccccatctgcttctgggacctcagcctcctccccaagttgcccaccccagacaccaggctcactccagagggacttcttgagccagtgcccctctgcccacgcacctgccttggctccacatggacctcttcccccaccaccaattccttctatcctctccactcctaaccatgctatcccagccagctacattttcccaagctgctgggagccctcctcactgtcccctccagcatagaggtgccactgtgcaagaactcagtgggagaggcttggaggagcttggagagccaatgataggtttggggaatcttagtgaactcctactcatgcgttgaagccccaactgtaatgcctcctcctccaggaagccttccaggaccctgtctttccctctggaccttccttaactgcatgggactaggagtgtctatgtccagctctgtcctctcttaagatagctccttgaggacctggtcagggctgaggcctcttgggggcccagcgtgggtgatgcttgttgaatgaataaatgactgcatgagctgggaaccagccaagctgagatcaagaagcgagttgatgaggtggcagtcggttggggtgctaatagaggacatgaagtcactgggttctagcaagagggaagcgggactctggtccacccctccctcttgccctccatccacctctggtgagaaccttgaggccctgcaagggggcggatctctgtcttcattcttcccctctgcactccacccagacaccagttcctcttccccctgagtcgctgggtgcagagccagaggaacgccagcgaccccagcagcgctgcggacggtgctggccgtggccgctgcggcccccgtgtccaggtgggccaggacgcagcctctgggcgccgtcgcttttccagcatcgcagaggcaaaagcgtggcagtgggacccaaaaggtaggactgaggctctagaacttgcacctgtgcagggactgcaaaccagacctgggaggaccctttcagcagcccccactccaccctatcccaggacttcccagcgacccgccgttctgggagataccgggagcgtgatcagggggcggggccgtttccaaggcaaccgcttatttgcatagggtcccgtcctggccaacgagggcgccccaaatgttcaggacatagaagaaggggttaactggcccggatctcctcctcgccttccaagcccgctaagcactggggttatctacccattccccagaaggggagactgaggcagcccaccagccaaaggaggcgaccagactggggctgcgttttaccatttcagaagcggcttgagctggtctgagctataataataaacactggcggtggaggcgagggcgaccacagggctgaggtcagggctaggattccggtgtctctacgtaggttgcttgaatggggggcaccctggcatggacgctgctgttgccgctgctgctgcgggagtcagacagcctagaaccgtcgtgcaccgtgtcctccgcggatgtggactggaacgcggagttcagtgccacgtgcctgaatttcagtggcctcagcctgagcctgcctcacaaccagtctctgcgggccagcaacgtgattctccttgacctgtctgggaacggcctgcgagagcttccagtgaccttctttgcccacctgcagaagcttgaggtcctgaacgtgctacgcaaccccttgtctcgtgtggatggggcgctggccgcccgctgtgaccttgacctgcaggccgactgcaactgtgccctggagtc

SEQ ID NO: 7898 - DNA, 6000 bp, Homo sapiens
gtaccttgtacaacaaattgctctcaggacatgaacacggggcttctctttgccagtgaaccattgctttatctcaggtggataaggcctgtgtaactcatcctcttgcccttttgacttggccaccaggggtgcacagtttggcactaaggccccggggaccctgagaagcaggaggagcttggtctgtttgttctcaaggagtctgatctggtgagagggaggcagatgggccactggtcccagcactgattgaaaccaaaggcagaaggttggatttgggggccaccacagccccagccctggtgggtgacagctacctcctcaccttgcaggagggccgtgagcctgactactcagagtacaaggagttcaagctgactgtggagaacatcggctaccagatgctgatgaagatgggctggaaggagggcgaggggctgggctcagagggccagggcatcaagaacccagtgaacaagtgagtgtggccttgtgggagggcatggccatgaacttggggtctgtgggtcccctgccgcctccccattcccacccctttatgtcatcgcttttcccttgtggcaaaatgatcacagcaccccactgcacaccccttgtcaggcacaggcctgcagtgcaggaggccatacgggctgggtcctccccagtcccagggcctccttccgtcccctcatgagtatctccaggccagatggggtgggtgagggtacagatgggtcaggccttgtctgccttgtgaagggccttatttgaattccccatgagtgcgaaaccactcccagagatgggcaggagctctcccaggtgtgaccctggccccgagtgcccccttcaaggctgtccttgagtaaccatcctgccatcccaagagctgcgacaacttgcactgtgggctcctccttcctgtgtgggaccctggggcctaggccccccccccccgcccgccccgggggtctcccctccttgaccattcaggttcaagcttctctctgtgcagatatgtcccagcccagccctgcacccgcgggaggtgctgttgagagcccagctgtgcccggccccccggccagagttctggccccaggtccctgctcacatcctcttctccctgtaggggcaccaccacagtggacggcgctggcttcggcattgaccggccggcggagctctccaaggaggacgacgagtatgaggcgttccgcaagaggatgatgctggcctaccgcttccggcccaaccccctggtacgcatgtcctcctgggctgcctttgctcagtcgacaggagagggtggtggtaggaacagaaggctcccttccttcctcagtccagccaggctgggtctcaccagcgagccccctaccacccacctgcattcaagcccccacccgtcccccaagcctgccctgccacctcaagggtgcgggctcagctgcctccggaaggttccagacaggaggaactgctgtctttagtgctaatcccctcctcctgttatctgttttgccttccacagaacaatcccagacggccttactactgagtgttctggaaatacatactttctgaatgaccaaccgtccctggactgtggaatgttccggcctgcatttctgcccaccccttccgttgtcacgagtgccgtgccgtgtaataaagtcccagtgctcatccaccacagatgcctggtcctgttgcaggaagcccctcctgttagcagcgggatgcaagatgctgtctcggggctctccttattggcctgtggagtctccatccccgctcagcctgggttgcactggaggggaggaagaaagttgttttcagcatagtaaagctggaaggccaggtgcagtgtctcacccctgtcatcccagcactttgagaggccaaggcgggcggatcactggaggtcaggagtttaagaccagcctggccaacatggtgaaatcctgtctctactaaaaatataaaattagctgggcatggtggtgcacacctgtcgtctcagctactcgggaggcagaggcaggagaatggcttgaacctgggaagcggttgcagtgagccaagattgcgcctttgcactccagcctgggcaagagagcaagactctgtctcaaataataataataataataaagctggagacttggccacacctgggctaaaggaatgtcaggaacctccgagcctagcactgtgctgcagagggaggttggggaggggtctccaggcagggccccaccttccctcagacctgtgggggcaggtggcttctgggcacacccatgtgctctcctggcaggtggtgctggcacggcccagcacacaggtgttggctgtggcccttcaggtcccaccagtgtggtaggcacacgagtccctggggcttgtgtcgttaggggacagccgcatggatgcatggatgtgccatgccaacatgtcaggcagctcctagaaggaagggcctcagagccggaggttttgaggcaggagggtagcccaggccacagtgtgtgccaagacccccacatctgccccagggccagagccccacatttgtgcctaagtcaccctggggatcttgttaagctgcagctgccgagtcagctggttgggcagggccctgggaatttgcatttccatctgcccccaccccctccacacacacccagtgggtgctgcccagcccctgcaggcaccaggggctccctattcacatgcttggcatggagtcgggctcctgggccagcttgtgttcacacagccattcagcaaacactaggtgccaagtgtggggaccaggtggacaagatctactccagtcagccaggctgctggggatgaggtctgaggctgctactgagaggaaccagggagccgtggtggggcggtctgcagagtgtctcagtggggtctgagaccagggaggtgccagatgcagtggcagagccaaggctggggtgatataccaccctttgttctttcctgacgctgtggctgaggcagagcaaagagtaacattggtgggcttggcctgggtgcccatgaatgagggctgcccagaaggcagtgggccaggaccctgagcacagcggggtagttctctgcagccagtggttcagggaatcctggcactgggtcccaggcattcagccatccaagtcacttctcagttctcagcaacctggaggctcaccaggctcagggcatggactttaccccttgccaggggacgaggcctccaagtgctgtgtgcgtgtgcaggtgcatcctgtacacgggacaaggccaagcccctaggctgagctgggcacaggcaccctggccttgtgtggagaaggtggggtgggggtggcaggcagggctgcctggaggaggggatgctggggcccgcttacaagaaggctcattttacagacagaaagcaggcctggggggtgttgaccctgctagagttggggaaagtccaggggaacctgaacttcacccatgggcagtggacacctggggaaggaggctgagtcagacctgcggccagaagaccctcttgtggcccagttcaggaagacctgtgacccagttggcatcaagctaaggggctgcgtgcagaatggggcctgaggtaggggcagtggttagaatttgtgccagctgcagactggggtcccgcagggcaggcgtcaggtgggcatggttcaccttgctgtctgcagcatccacaagtactccacatgggccagagtctggttggagggggtgacaaagacagatggtctccttattctcccccccaatactgtggccccctcccagctgttcaaaacctcccacagcctctcacagctgtctcgcttctcatcacaccccagcagaaccgacctcctttccactgctcagttccaagcctgagccactttcctccctgccaggaacaccgttcccaaactcttcaccaaactggctccatcccgatattctaacttcagcccccacccgctaggaccccttctaccctctccccgaaatgaagaaccctaaacccgggactagcctgcaaagggacagccccggagtcaaagcctcacacttaaagacccctcgcagtggctcacgcctgtaatcccagctcctcgggaggctgatgtgggaggatctgttgagcccaggagtttgaaaccagtctgggcaaaaaagtgagacctctgtctttacaaaaaataactagctgcgcgtggtggtgcatacctgtagtcccaactacttgggaggctgaggtaggaggatctcttgaggctgggagttcaaggaggagggccactgcactccagtctgggccacagagtgagacctctcaaaaaacaaacaaaaaaacttcacacctgcctggaaacacgtttacatttgtggccaccttatgaaaactcaaatctaagcccactgaaaggcattttgcacccaagagctggaggttgctccatccgtgcgcacagggaatgccgacttgatctttgggtggggatgggaaactctggggaatgcagaggtttagaagcgcagagtccaggagaaaatttccttagaacgaagttgtggaggcaggggaaagagggggcacgccaggacctccagggcgcaccccttggcctaagagcagaagcatcccgaggtgttgtgtcccagcctttgacagtgagggaaactgaggctgagtagcgggacggccattggagacgagggtgtcgatggtgaggggcgaaggggcggggcagctgccagggggagggccggggaggggccttggaggctccctgggaacacgcagggcggtcacggcggcctgcccagggcgcagcggggtcgacctttgtgcggggcgggtccctggcagcctcggcccggactcgccgccaacgaggagccgagcgccctggagaacgcgtcggggctgagccggggtccagcagccgccgctatggacatcccgccgctggccggcaagatcgcggcgctgtcgctgagcgccctcccggtgtcctacgcgctcaaccacgtctcggcgctctcgcagtgcgtgcggagaggggccagggcggccttggggacagtgggggcgggcgggggcggggaggactggaggtgggctggagggaggatgcgcggtccgcggacctggcttctgcgagccctgcgccccagctcagctccgacccggcaggattggggtgggccagaagaacacccccctctaaccggaagtccccttcccgccgggctggaggctgggatgcggccgctcctgggatgtttgtggcctgggaagaaggaatgatgagtccccacaagccagagctttggagggtttctggggttttcccagggatgcgccctgcctaggttccaaagtcaccaagggtaaaagtattgtcccagataaggccccgggtacctgactcctgctcacacacacacacacacacacacacacacacacacaccctactccattgcctgtctcaggcctgtgactttcctcttgttcagggctggctaaccatgtccctagactcagttccccctactggttccctttcctggtccctgtctcctaaccctagatcctagccctgtgggtccagccaccggatagtgggcatctgcaagcccctcgtacttctaaacccagctcaacccaagccatggggtggagagagtcttaaccatgagcctggctccctgggtgggaatacccatctccatctcctgggatcctgggtgagccaagttcctctgggagcctcagttccctcatcagtgtaatgggcacgatcctagatctcatctcatagttacggttaaggattataaactgtgtacaaagatttgtcttggtctcatctgagtactataatgtcattgttagatggggtcaggatggaaatcttgggttctgaggggatcatgagaaaatagggg

SEQ ID NO: 7899 - DNA, 6000 bp, Homo sapiens
tgtgtggggtgtgactgacaggtgctacccacagcccctcgctgggaccttggacctggacttgcatggaagcagaacttgctcccgttagggtcaacccaaccagactgttcccctccttcccccatcagtcttacaatacagtcctttgtgaccgccacacaactccccccgggctagaagtagacctcctccccactgacccttccagtaactgtttgttcaaaagacttcagctgaaccggcagacagttccaggatgcggtcacaacacctgcccaccttgcataacaaagctggcaaaaacatctccaggatgcggtcaggacacctgcacccccgactcagttctcacaccccagcccagttcctcgccctataaagccctgctgtagtctgtaagcggggctgcctcctctaactgtgggggagcagcccagcaggttaataaaacttacttgactgacttcaggtctcttcgtcctttcggctgaccttacagctcctggttttccggagcaggccctgtcggcttcctgtactcagtgggtccttcctgctgctttttttttttttttttgagacggagtttcgctcttgttgcccaggctggaatgcaatggcacgatctcagctaactgcaacctccgctttccggtttcaagcgattctcctgcctcagcctcccgggtagctgcgattacaggcgcccaccaccactcccggctaatttttgtatttttagtagaaatggggtttcaccatgttggccaggctggtctcgaactcctgatctcgtgatccgccggcctcggcctctcaaagtgctgggattacaggcgtgagccaccgcgcccagccgcctcctgcttctttttccggaacaccggtcacatgagtgtgcacggaattccagactccgtgttcagtgaagccatccctccaccttggagctggagagactcccaggtcacaatggaacaggtaggaggccctgatgtcctccagagatcaggaatttatgaggctattggtcccatggccaaggcttcctacacgttacttcttctcaggctactccttttcagccaagaaaataaaaacatgccttaaagggaacaaaattattaaatgcagggaaaaactggagtaaaccactttttttttctttttttttgagacggagtctggctctgtcgcccaggctggagtgcagtggcacgatctcagctcattgcaacctctgcctcccaggttcaagagattctcttgcctcagcctcccgagtccgagtagctggaactacaggcatgtgccaccatgcccggccaattttttttttttttttttttttttgtatttttagtagagacggggtttcaccgtgttagccaggatggtctcgatctcctgaactcgtgatctgcccgccttggcctcccaaagtgctgggattacaggcatgagccaccgtgcccggcctggagtaaacattctataaaggtattgctaccagaaaggggtccagtcccagactccaagagcagaagcttggaccttgtatgggaaagaattaatattggagaaaaaactgaaaaagtaagtatatcgaactgtatcatgggacagaaacatgtcattcctatttttactgaagattatcttatttgatactatgtgattattaagtcctattacatttcctttctccttttacgaagtcatgtatcttaataatatgcagccgggcacggtggctcagcctgtaatcccagcactctgggaggcccaggcaggcggatcatgaggtcaggagtaggagaccagcctgcccaacatggtgaaacaccgtctctactaaaattacaaaaattagccaggtgtggtggcgcatgcctgtaatcctagctactaagaaggctgaggcaggagaactgcttgaacccaggaggaggaggttgcagtgagccgagatcacagcattgcgcctgggcgacagagcatgactccatctcaaaaaaaaaaaaaaaaaaaaaaaaaaaaaaaaaaaaaaaaaaaccagagccgggcccggtggctcacgcctgtaatcccagcactttgggagtccgaggcgggtggattacgaggtcaggagttcaagactcagcctggccaagaaggtgaaaccccgtctctactaaaaatacaaaaaattagctgggtgcagtggcaggcgcctgtaatcccagctactcgggaggctgaggcaggagaatcgcttgaactccgagggcagaggttgcagtgagctgagatcacgccactgcactccagcctccagcctgacaacagagtgagactccgtctcaaaaaaaaaaaaaaaaaaaaaaaccagaatatgcagtgggtggccgcagcgggtcacacctgtagcactttgggaagtcgaggcaggcagatctcttgaggccaggacaggagttccagaccagcctggccaacatggtgaaaccctgtctctcctaaaaatacaaaaattagcaggcatggtggttcatgcctgtaattccagctactaaggaggctgaggcaggagaatcatttgaacccaagaggcagaggttgcagtgagcctagattgcaacactgcactccagcttgggcaagagtgagactccgtcccaagaaaacaaaacaagactaggactgggcaccgtggctcacacctgtaatcctagcactttgggagactgaggcggccagatcattagaggccatgagtttgagaccagactggccaacatggcgaaacccgtctctactaaaaacacaaaacattagactgggagcgctggctcacacctgtaatcctagcactttgggagaccaaagtgggcggatcacaaggtcaggagttcgagaccaacctggccaacatagtgaaaccccatctctactgaaaatacaaaaaattagccaggcatggtggcacgcgcctgtagtcccagctacccgggaggctgaggcaggagaaccgctggaacccaggaggcgtaggttgcagtgagctgagatcgcaccaccgcactccagcctgggcaacagagtgagactccgtctaaaaaaaaaagtacaaaaattagccggagcggtggcatgcgcctgtaatcccagttacttgggaggctgaaatgggagaatcgattgaactcggaaagtggagtttgcagtgagcggacatcgcgccactgcactccagcctgggcgacagagtgagacttcatctcgaaaaattaaaaaaagaatatgcaacaatataagctacaaaatttaaatatccaataaattttaagtttaaataaatttgctgtatcagaggacaaaaagaaacataaaatagttactgtttgtcacacatactgtttaatcctactaattggtactgttaagtagtcctattgtggttttgttcaaatagcatttatgcaacagtacagttaataatatagaactatataatttcttttttttttttttttcagacagagtctcgctctgtcgcccaggctggagtgcagtggcgcgatctcggctcactgcaagctccgcctcccaggttcaggccattctcctgcctcagcctcccgagtagctgggactacaggcgcctgcaaccacgcccggctaattttttgtatttttagtagagacggggtttcactgtgttagccaggacggtctcgatctcctgaactcgtgatccgcccgcctcggcctcccaaagtgctggaattacaggggtgagccaccgcgcccggcctagaagtatataatttcaagtaaacaccagtttttcattttttatgttaaagtggtaatttctttttttttttttttttttttttggagacagagtctcgctctgtcgcccaggctggagggcagtggcacaatctccgctcactgcaagctctgcctctccagttcgcgccattctgcctcaggctccggagtagctgggactacaggcgcccgccaccacgcccggagaattttttttttttttttgtatttttagtggagacggggtttcaccgcgttagccaggatggtctcgatctcctgacctcggcctcccaaagtgctgggattacaggcgtgagccaccgcgcccggcctaaagtggtttttgtaattcatttttcttttttttttttttgagacagtcttgctctgttggccaggctgaagtgcagtggagcaatcttggctcactgcaacctccgtctcccgggctcaagcaattctcctgcctcatcctcccgagtagctgggattacaggcatgtgccaccacgcccggctaatttttgtatttttagtagagacgtggtttcaccatgttgggtcttgaactcctgatctcaggtgatccacccgcctcgcctcccaaagtgttgggattacaggcgtgagccaccgcgcccggctagtatttgtaattcttatctatcacattaaggctcttgtccggtgtggttgtgttccggggcggtccccgaccccgcccctcacaagccccgccccccgcaccgggccccgcctcctgaactccgaagctcccgaccccgcctccgcagggtccaggcttcgcccctggtgacaggtggtgctggtgtagtcaaggaggagggctcgctttttttggttcaggttgtcatggtggcgcccaagcccgccttgccggccttgtcttttccggtctcagtccggcgtggcagcggaggcaggcaccgttaggtcttccagtccctctctgtcatggcgacgcccagcctcttcttccggccacagcctgtcatggcggcacccgaagtagtccctgccggggccagcctgttctgttgccctggctcttcctagtccaggctgccatggcggcgctcagggcttaccggaagtaaaacttcggaagtgaggcgttcctctgcccggaagtgagcgcggcgctaggaaagatggcggcagcggcggcggtgggcaacgcggtgccctgcggggcccggccttgcggggtccggcctgacgggcagcccaagcccgggccgcagccgcgcgcgctccttgccgccgggccggcgctcatagcgaacggtgacgagctggtggctgccgtgtggccgtaccggcggttggcgctgttgcggcgcctcacggtgctgccattcgccgggctgctttacccggcctggttgggtgccgcagccgctggctgctggggctggggcagcagttgggtgcagatccccgaagctgcgctgctcgtgcttgccaccatctgcctcgcgcacgcgctcactgtcctctcggggcattggtctgtgcacgcgcattgcgcgctcacctgcaccccggtaagtgtgtacacgcgagcccgacccccagcacggtcgagcctcgccgtgggtcccagctgcggccttcctgtcggtcaccatcgcgacctgggccactcatctgcctggcctggattcccaggggcaccctctacactttggcgcaggcttaatcatgaccccactgctgacttgctgtgcatgcctggtgcgggttatttcctttttctgaagtcctccctgttatggtcatttagattcagtgatgtaatacttgtaaaaggcttagcgcagggcccagcatacgtcgcccaggtcaggtaggagttgtttatactagttcccatattagcgactactcttgttctggaaacggccctaccttccatctcatctgtctcctaccttggttttcaaagtgtaaggcgagatcactgggataggtttcccccatctatgaagcttagttggttcttagactgaaccaagtcttgctgtccagtgcttagtggtcttccatactgtgatggaaaggagcatgaaatgcagttaattacagtgttgaagagaggcagaggtgtttatgagcgagtcatttacatgatgtctttccgcaaaatgag

SEQ ID NO: 7900 - DNA, 6000 bp, Homo sapiens
atacttaatgaatgtgactaatgtgatgaaagaatgagcgattaaaatattagcacatctgaacttctcctccctggctaatctcctccctagggttatcatctttcaaagaagtaggggcacagaattacagaaacgggttttatggaacacaaatgccttttaaatggcttagattaaggacagtctgtgcagttctcaagcggctgtctgtcttcacatctcgctgctcaagtgagggacgtgggctgtggggagaggctgaaactgtcaagatggctgcaactggaaatgggaagccaggcatttcccggggtaattgtgtggaaacaggagacaggcgtggggtcccttcagcagggaggcggttgcctttctgtgtaggcactaggtgagatgaaagtggctgggaggcatgttccctggggatgaggcaaaggcatcttactggctttgcacattatgcaggatcacaggcagaactacctagggaccaattttgttttgaggatgacgaatgcagaatcccagcacatttgccttagagctcccctccctatgccccctcaacacacattgcccagatgaacacatcaaggcagtagggaagagggctgggggcggtggtttgcgcctgtaatcccagcactttgggaggctgtggcgggcggatcatgtgaggtcaagagtttgagatcaccctggccaacatggcgaaaccctaactctactaaaaatacaaaaattagctgggcatggtggcatgtgcctgtgatcccagctattcgggaggctgaggcagaattgcttgaacccaggaggcagaggttgcagtgagccgagatcacaccactgcactccagcctgggcaacagagcaaaactttgtctcaaaaaaaaaaaaaaaaaaaaaaaagactgtagggaacaggaagtgtctagactacaactcacacttggaactaggagattcccctgcatatcagtgttctgctactctccggaatcaatcgatcatgcttgtgcaaggaattatataaacctgaggtcccaaactcgaggcctcagcagatgggcaggtaatgtaactgaatggacacagtgggaaaggacccagaccaccaagcaggtacctaccctggctgacagcaccccaccgtctttctctttgttgaggacatgggcctcgagtggcttaaaataatgcaattttattattttacaattctggaggtctgaagcctaacacaggtctgtagggctgcacttcttctggagactctaagggagaaggtttcctttccatttccagctctatctctgcctgcaggtccctcctctggccccaccctcaaagccagcaatgtggcatttctgtcctctcacctcttgcttccctcttctaagaccctatgaacatgccgcacccacccggacactgcaggaagactctctgatatggtttggctctgtgtccccacccagatctcaccttgaattgttacaatccccttgaattgtaacaagggggggaccaggtggaggtgatggatcatgggggcggtttcccccatgctgttctcatgacagtgagttctcatgagatctgacagttttataaggggttcccccttcgctctgctcttattttctctcctgccaccctgtgaagaggtgcctcctaccatgattgtaaatttcctgagggcgcccccccaaccagccgtgctgagctgtaagtgaattaaacctcttttctttgtaaattacccagtctcaggtatttcttcatagccgcatgacaacagactaatacactctccctatctcaatctccaatcacagctgcaacattcctttgctgtgtaaagtaacatattcccaggttccagggattaggctgtggacatttttgtggggaggcattattccatctaccacagtttgtatgtgggagtactcacaatttgtaaatgctagcaaataattctgaggttcatagcactgtgtatgccagatcaccaggtgtctctgggcagaaatgagtggggagagaatgaatctccagtccatgacttccgacctctgatttaaacagtgtttgttaaaaggaaggcttggtgtcatgcttcctcctgccttgttcatacatacacattgcgtgtcagacttccagggaactgagaagcttaccaagcatttatgttcccaggcctgtggctatttttttccctcagtttacaaaactaacaatgtttattaagctctcattgtatgccagtgtgctaaatatctcacatggattctttcttttaatttgcacagcaatgtcatttttatccctgttttacaaataagaaatctgacactcagtaacgttgcccgatgtcacacaggtagtaaggggcagagctgccatgaaggccaggctgtctggctccagagtgagctgatacatgaaagctaaaacccccttcagttaaataacaaccactgaggggttgcagtggtgtgtacctgtagtcccagctactctggaggctaagggaggaggactgcttcaggccaggagtttgagaccagcctgggcaacacagcaagacccccatctaccaagtggaacccaggttggcctacagaagtccaagttccagtatgcctgccactcctggacattggcctccttcttccacgagaagacagctgttcggccatacagttacccatctctctgctgcaacgctggactcgaacaccactaccagatgcgttcttatcaatgtgtctttgggcatgtcatttgtcttctctgagtcttagtttcttcatctagaaaatagaaagttattattattgcagatatttacatactgtgtgccaggcacagttctaggcattttacatgtattaatccatctcatccttaaaataactctctagggtagatcctgttattatctctgttttacaagagaaagacggaggcacacacagagattaaataacttgccctagggcacagctagtgagtggtgaaactaaaattgaacccaggaggtctggagataattcctattctgttcacccaactgggacattgtgaaggttttgtgaaggatcattcattcattcattcatttttcatttccttaccaactcagagggaattgtgatattatttcttgtgaagcactcaaaccatgcatgctgtgtgacaacttctctggaaatgtcttttatcctaaggttgttgccaagggagagcactgagccagctgtgtgatgagcctggctagggtggcccctgaggaggcagcctccaatcttgagagtacaatatagtcccttgggctataaggctggtcaaagcctaggccctaaggggagtcataggaaggtcaaaggggaaacctgtcagtacactttggacctggcatgaggaataacaacgagtcagcaaggatcaagggaaggcttcttagaggaggtggcatctcagataaaaacaccactagcaaatcctcacttggtgctgcctgtgtgctgggcctgcttgtagatgctttacacgttttagttcatttactcctcccagtaactttacaacacacatggcatcattactgcccccatttggcaggtgaggaaactgaggcacagagaggtgagggaacttgcccagatcacagagcccatgcacagcacagagccaattctgtgcactgcttatattaacatttacttaatatttaaattatttttgacctaaatgaaaaactttatctcagtatagtacagaatagaaaaccagtatggatagaaaatcaatactatgaaccatataatgaaatcactctagactcagttctctgctaagagcttctaactcaagatcttttctgttaaaagtgggagataagtgtagagaggaattaaagatatattaggatcaaactgaggccaagtgaatttgctcatgcctataatcccagtactttgggagggggagacaggactccttgaggccagaagttcgagactggagtgggcaatatagtgagacctcatctctacttttttttttttttaattaaagatgtattagcaccaaactgagactttctcattggtgcaatcaggattgaaaaacaaaacaaaagaaaacaaaactttctcactatgtgatggaacatgaatgagcgagctctgtgcatcctctaaaattctaaaatcctactttgggaaacagtggtggcactgaagagcatagactcaggagacagattaccctgcttcacatcttgctggctatccagttcctggaaaagaatctctctaaacctcggtttcttcatgggtaaaatgctgatagtaatagctctgacttcatagagaccttgataacaaatgaaagaacgtaggtataataaaacgcaaaaccaaatacacagtgaatacttaataaacataatccattagcattatcgagctttgcacagatgcctctggcctttttgttgttgttgttgttagatgaagataataaaaatcatcatagtaaacacatagcgattactatgtgctggacttcgtcgtagttgagatatattaccatcctaagttaaactataatcgtttattgttatctctaggtcttcctagatgaaatttttaccctaaaggatcgtaaagtcggcccaccggacgtcagtggggtcccctgttcagccctctcgttcttctggggatctctcgggacactgacgaggtggcaccgggacctacaggtgggccgcaagccccgcccccagcgacggcttgtagccccgtcccccgacgcagcgcctctccaagtttgccccgccctgcaggactgcagaatttcctttccggcggcgcgctgtcgtcacgcgtcccgcgcctcctcgcgcctgcgccgtggttggaaggtcgtccctgtgaccggcttggcggttggagcggctgtcgccatgttgtcggtagcatcccgctcaggcccgttcgcgcccgtcctgtcggccacgtcccgcggggtggcgggcgcgctgcggcccttggtgcaggccacggtgcccgccaccccggagcagcctgtgttggacctgaagcggcccttcctcagccgggagtcgctgagcggccaggccgtgcgccggcctttggtcgcctccgtgggcctcaatggtgagccggggcgagggccgcgagcagggctgggggtctctcggtgcccgctcctccggcccccagcagggagcggccgcgggcgcgcgagcggagcctgaatcaggtcgggctgggcggcctccgcaactctgggcctggcccccgggctcggggcgtctttctggtggccggcctggactcgcgtccgccggcttcgcctggttcctcctcggccgagttcacgagctctgtagtcccgctgttccagccacctctgaggggttttgttgcttgcaggtcgtttgaccttgggcgagtttctaaacgtacttcctgtgaaatggattcatatctttatcaattttgtaggggtgtcgtgaggcttaggtggaggaattctacgtaaagccgttagcacagtttgggcacttacatgcttaagaaatggaaacttactaatatttgggaagttggtcttctcaccactaccgatcccttcatgtccttccccttcatcacccccccaccaaaaaaaaaacaaaaaaaacatacacaaggtcagttacagtgtagtgtcacaacataatcagtcgtcaaggacgggcagagattgacgacatttacattttacagatgagaaaacagacgaggtagaatgactcgcaccaggatccgtggtgtggacatgtggtagcagggatttgacaagacgaattgtcgtagccactgagctcttcgcaggggctattccacaccctctgtccttagatccccgtttatcttctttgcctcgccttccatctttacttggccc

SEQ ID NO: 7901 - DNA, 6000 bp, Homo sapiens
cgcgtctgtgctgggtgctctgggccgccatccccttgttccacagtccacccgtgtgtcagcactctacagagggtatagatgagacagggagagtgcactgaggtgacagcattgctgccttgggtcatcaggagcctggagcatctatttcacctggtcaggagggtcctgagtattttattaaagaataattctttgaaagtgaagggtctgtgtgtagtatatgtagcataccagggctgggttgcaagcaacagaactatactgcccaatgttaagggaaagaaggaaatattttggaaatgtacactctgtggcttccaccatgttttgagaaggacagaagctggaatagccttggggtgagggtctcagtagttgaacaccgtcagcctaccctgtgcttcactcaggtagcaaatcctgggagacaatggcctcttggctgacctgacatcctgagccctcctgtgtggccagagaagtgaggtcttttggttggtagcccaccagtgtcccacagaaagggacagttccccccaagttgtggatgctgggcagacagaaacaagattacaaaaaatggtaacttcctatgttagagtctccatctgtcacccagactggagtccagtggcacgatcgtagctcactgcagccttgaactcctggactcaagcagtcctcctgccccagcctcccaagagtagctgggactataggtgcacaccatcatgcctggataatatttttaaattcttttcgtaaagacaggcgctcgctatgttgcccaggttggtctcaaactcctggcctcaaacagtctccctgcctcggcctcacaaagtgctgagattacaggcgcacagccacagcacccggcccccaaaatagtaactctttattaaagatgtttgatgacacagaaccctctttccccaaaatcagcagcgatcacaactttcatcatgtgtggccaccgtggttgagaaaagaggcagcgaccatgaatcgtgacgaggtcggtggggaagggagcaggatgggaagtcgtgttttgacagcatgctgcaactgtcttccccacgcaggttatttaatgcaaaaccatattacttggaacacataaaaatgatggacaaagttcgaaggcagaattgtactattccaatagttgttggatatatatagattgttcctagataagagttttgaaattatgtttatgctttccttgctaattgttttatggctagacagcacgtccctgacatcgaaaggctttgcacatcgctaactcatcacaagttcttctggttggaattcaggtagtaagggaacaaacaactcttctatctgtggtagtatgccagttatttctgtcttttgggtccccctccaaatccccaactgctaccgtcagcagcagtgggaaggaatacaagaccgagtgaacttaatgaataggagaaggtgaaaacttgaaggcaggtctggaacaagctttcagcggtaaaggaagattcagcctctgcctgaatgtttgcccaagaccttgcctctgtcacgaggacagtgaattagagaacaaggcacccagctgggcagcccagaggctgtgcagaaatggactgacactatgggattaaagacgtctttaaaaccatcacaggaggccaggtgcaatggcttacgcctgtaatctcagcactttgagaggctgaaatgggaggatcacttgagcccaagaggtcaaggctggagtgagccatgatcacgccattgcactctagcatgggagcaagagaccctgtctcagacacaaaccatcacaggagaaggaaatgttggggctcaggacacaccacccccaaaatatgactgtaggagactagatatatatcaccccaaattatacttctttggaatattttgagctggttattctgagaaactgcagacacaacaggtgtagctctgaaaagctgccctttgcaaaagaaatgtatgtcatgaaggaaatctacattagtacaagtatctgtaccaggaagagacaacttttattacctgagagacttatatctgcataacaagacgacctttattcgccatgcatttcctcccctcaccatcccattactagtccctacctgccccagaagccccaagcccctaatccttatatagctcaggatgctatatagggtttagtcatctggcccttcttcaagtctcttgttttgtgggactcagttgcatatacacataattaaaacagttttcctcccattagtctcaattcgaagcccaaccaaagaacccaaaagggtggagagaagcattttaccctccccaactgaaatcaaatgtgcaccaaatataagataaaatgtagatggtgtgaagatcttcacactgcaagcatttttgcaatcggaagggaaaaagcacgggttgaaaatgaaggtcaagagtctttagcagaaacttaagaaatagagtggttgggcgggtgtggtggctcacacctgtaatcccagcactttgggaggctgaagcgggtggattacttgaggtcaggagttcaagatcagcctggccaacatgatgaaaccctgtctctactaaaaatacaaaaattagccgggtatattgtcacacatgtagtaccagctactcgggaggctgagggaggagaatcgcttgaacctgggaggcggaggttgcagtgagctgagatcatgacactgcactccagcctgggtgacacagcaagtctcaaaaataaataaataaaatggtaaaaatgacagtaggatttgcgctttgggaggccgaggcaggtggatcacttgaggtcaggagttcaagaccaacctggccaacatggtgaaaccccatctctactaaaaatacaaaaattagccaggcatggtggtggatgcctgtaatcccagctactcaggaggctgagacaggagaatcacttgaacccaggaggcagaggttgcagtgagctgagatcgtgccactgcactccagcctgggcgacagagtgaggctccatctaaaaaaaaaaaaattgacagcagggaggtgaaacttcagtcacatggcagaagcactggatacacaatgaaccaatggtcttcaagaactgaggaaaattttgctttttaaatgaaatccgtattattttccatgaggaagagcttatgagaattacttgaatactttctgtgtattcaagggagggagagggtgggactgcggtgaaaaacacaactttaagaaacaggcttaagaaatgctcaccgtggacccaaaatgaactgaagtggaggtttctgacttaacaaaggaccctcacatcccgatgttccagactcggcacttggaagaggcccaggaagaccagagggctggtcccggacattcatggaacatgcaagttcagtgtgttccgtgaggaggcgcctgttgctcgccctgcgtcgcaggttcagaccctgatcctggcagtgctgcctgagcccatgtgggtagtgggtgaggttgcagggctgtctggccccagcgggggaccactgccccaccctgatgtcctcacgtggtctcctgtcagcctgccaggagcacttttgacccagggggtattctgtggtgttttgcaaacatggatgtgccaggtactatgatgagtgctgcaacattaggaggagtgaccccagcaagccggtgggcaggttctgtctagggtggcaggacctgccactagcctctctgctcagggctctgggcatggcaggcaggtaaacaggtgggccctcccaagatgggaggtgacgaacttctaaatcaggaccgtgcctctgggacaacaagggtccctgtgctctgcagacggctttcagagaaacctgtgcctctctcaggtctgcttgccccaaactgctcccaaactgacccccagagactggcccagctccttccatccctgacctttgcttccatctgatatctgggatgcagttaagtttggcccaaggcaaagctaccagagttttggctgaaggtaacagctacgatgcttcagatgcagtgcttatgctgtgccaggctgtctcataaggtctcataaggtgcttccttccctatctgaaagggcttcgtgctgacccctgaggctgccgcctgagcctaggtccaatcgcagtgcgggagaacctctgctccctcccagagagatccagaccctggcagccctggatgcggaccggagcttcctggccttgtgttgcctgtccccctccgtttccccgaaggggaaggttttgtgtcccttgtgatgagccaggacatggctacgtgaacagcaccacagccaaacctgatgggcatttggccgcagctgcagggaggacacgaggccctgcattgcctcaggcctgcttgtgattccaagtggtgaagccccatcactggtaaagaggagtgggacgggctcagccgctctcacctgctcagccagaggcaggcccttggcttgggggaaattcctgggcggggaggaaactgaccaacagctgagttacgcacacacagcggttcctgtttgagctgcctgacttgggttttaaatatagcctattaaggcaattagcgaattggttccaaagtttatctcctctgattcccaaagataaaagaaggcataatttattttatctttaggtaaaaagtgtagacgatttgggaccatctggttttaaaaaaataatctgacctagacacaaatgaacaaaacaaaaacggttttggagagaaattggtgttcctgaccctccccttttttgtgtggcgtatctaagcttcattgcaaaaaaaaaaaaaaaggtgtttaataattacccttattgacctctgtaccttctggacttcctttgctcctgggcacaagacatggccatttctagggttggaccgtgcaggcacgggcggtcagctgggccgcagctcctccggctctgcagggtcacggaggaaggtaagtaaggtcagtaggtgatagaaaggctcatggctctcctggccggggcctggacagataatttatttagagagagggtacaggagtgcatggttttctcctagttcagtctggaactgggtttcctcggcaatgttttctttcctttcatcactcaatgaaaaagtacctggccaggcgtggtggctcacccctgaaatcccagccctttgggaggccgaggtggaaggactgcttgaggccagccggggcaaatagcaacactcccgtctttataaaaaatattgtaaaaatttaaaaagtacaaagaaaaagtacctgtattgtggatctgtgatgtatgggagtgcctttaatcttgggaaggaattataagacagacactccttacctggacttgattctgataaatacattccacaatattttcattttttaattttttatatatatattttttgaaacagaatctcgctctgtggcccaggctggagtgcagtggcatgatcttggctcactgcagcctctgcctccagggttcaagtgcttctcttgcctcagcctcccgagtagctgggattaacaggcacccaccaccacacccagctaatttttttttttttttttttgcatttttagtagagacggggttcgccatgttagccaggctggtctcaaactcctgggctcaagtgatccacccacctcggcctccgaaagtgctgggattacagacctgagccactgtgcccagcccgggatgttgttaaatatttctttttacttttgaaaaaaaatgaagttgaccatagaggtagaatgactttcaaggcacaggcacgtgggccaggaggctcccggggcctgtctgggagagagctaagcaagcagctgagctttggagagcagcggggagctgtgttcccctgcctggacaatgttaa

SEQ ID NO: 7902 - DNA, 6000 bp, Homo sapiens
agcagaggttcagcagccaaaacaaaagtaagataaaaaagtgagcagggccgggtgccgtggctcatgcctgtaatcccagcactttgggaggctgaagcgggaggattacctgaggtcaggggttcaagaccagcctggccaacatggtgaaacccactgtctactaaaaatacaaaaattagccgggcgtggtggtgggcgcctctaattaccagctactcaggaggctgaggcaggaaaattgcttgaaccgggaggcagaggttgcagtgagccaccgagattgcgctaccgcactccagcctggatgacaagagtgagactccgtctcaaaaaaaaaaaaaaaagcgagcagtatcccatggccggcaggatcctgaccaaaccagtaaggggctgcgcttcagagatgggcatgtgcattggagagaaaaggtatccttaacataaccccgttatgataatcagctacttaaggttcatgcatatgagctgcatatcatgtatgtacttaggattatgggatggaggcaaggtgcaagcgcacgggggccaaagtaactaagcaacacacctgtcaatcaaaaagatagacactggctagagattaggcagccttgggaagagggggaaaaaaacaacatatagaaagacccaaagtacaccaaactaatgccgatctcatctcacaaagatcagtccactcttcctctccaagagtggaatactgcacttaatacactttttgctatctgtatatgtctcttccaattctttgttcaagtcgcccagatcctggaactgtgtggcaccattcagtaacacaaggataggcccgagtgtgctaactctcctgcatttctgattgcaagtttgtgggtgccagattggtcccttattatctcattcctcaggggcatcagagaatccctgagggtgatggggggtgctggcaggttgtacctgcacctgaagtgggaggaaaggtggcaaagccttgacaccaaggtgaggctaggggctggggaggtggcgtgatatccaagaggcatctaatacagagtggagatgctggatttggaggtactgccaaatggttttccaaactggtggtaccaactccacatccttgccaacattgggtgtgtaattttcaccattttggtggctactcagtggtatcttattctcgttttaatttgcatttccctgatggcccatgaggtttgagtgcctgttcaggagtttaacagtcattggacatcctcttttgggaagcacctatttaaagtcctttgttttttttttttttttttttttttttgagatggagtctcgctctgttgcccaggctagagtgcagtggcatgatctcagctcacttcaacctccgcctcgcaggttcaagcgattctcctgcctcggcctcctgactagctgggaccacaggcactcaccaccacccccggccaatctctgcatttttagtagagacagggtttcaccatgttggccaggctggtctcgaactcctgacctcaagtgattcacctgccttgcccttcccaagtgctggggttacaggcatgaaccaccatgcccggcctattttaaaactttttcctattgatttgatacatatttttcaatacaactcatatgcttatatttttagatagaagtcctttatcggccatatgtatggaaataacttctctcatatgtggcttactctttcctctttaatcatgtcttttgactgacagaagtttctaatcttaatgtagtccaatctgtcactttcttactgtgtttcttatgtctgtttaagaaaatgtatctattctctcccctgagttttcttctagcagctttgatgtttcacctttcacacgtacatttcacatgtacatcacctgggactggttttagggtataatggaagggtgacattaaaagggttttggtttttttcttcaatatatagatccaccaccacttattgaaaagcccgtcctttctccactgttctgcaatatcaactttgtcataataaaccaggatgggtctgtttctggatttctgttttcttccaccagtagatttgtttatctttgcatcaatgccacactgtcttccttactgtagtataagtcctccagatttgttcttcttcacatactctttagaatcagcttgttgagtttcatccctccaaaaaagccttgtaatcaacaacaaagttgtctggtgctttgatcaaaattacattggatgtatttatcaattctataaatcaatgtggagaccaacattttaaattccaatccatgaacatggtatatccctccattagcttatgtctttaacaatttctctcagaaatgttttgtagtttcttgcataaaaattgtacacatcattcactagaattatttttaggtatttgattttatgctattattaatttcattttctaattatttctagtatatagaatacaattagtttctgtatattaaacttctgtctagcgactttgctaaatgaacttatcttccttaaattaacctgtaattttttttctacatactgaatcacatcatatgtgaatggcagctttatctttccctttactatcttcatacctttttacttatttttcttgtcttattgctctggctaggacctccagtacactattgtatagaatattgacaagtgccaacatcccttctcattttcaatctcagtagaaaagcattcacactttcaccactaaacatgatgtcagctgtagggtttttgtttgtttcttggtttcttggagatttgtttttaggtagatacttttatcagattaaggaggttctcttctgtttctatttgctaagagttgtttgtttacatcacggatgactgttttttgcatctgttgaggttttccttttttctctctattaatgtggagaatcatgctgattggtttttggatggtaaaccaatcctactaaccttttgttcccattgaaatttgcaggttctagttcaattccacgaaaaggacctcctgagctatggggcctggctgacaacatacaaactccatcctgtgcaaagccctaggccgacctttcccccacaaacgcatactccacattccaggtcccagagagacaccctcgaaaaccacaggcttcagagctgcgaggcttgcgccagcccctgccccttggcaagctgcccctgattgcaccagccctggctagaccctctcccagcagaccctagaattgcgagggcaactggggggctggggagagtcaaaccagaaggtcgaggcctctggcccctaacacccgcgacaatcaggggtctccggagccagggctgcccctaccctgcgcgaggctcctttaagagagtcggcctctgaatggtctctggggctggaggtggagggcgccaagaatgccggtctccgacgacagaagcgagagggatgcagcttcgccgggtggcctccccctcggcgtcccaccagcacgtccaccctggatcctcccgctcctactcctaccccaagtccccgcccccaacttcgaagctcctgtgtgcctgcaaacgccggccccgccccgctcccacctccaggccctgccgctgccagggacccgcccctgccagggacccgcccccgccccgtcccaccccggtccaccctgcagccgtcggacccctggcagggccccagcaaacccggaggccgccactggggggaaggacggggcgcccggcgaggcctcatccacatgcaggggacggcgcgtcgcggcggccgccaggaagaaacaaaggctgttccgccgccggccgcacagtgccaggctcgccccgcccgccgccccggtggccccgacgcggcccccctggatcttttccgccggcctcggctgcacagtccggacggcttccgggaggaggcagcctccctcggatccccgcactcccgaccctctcccgcgaccacagcctccttctccgtgtctcccgggcattccaggtcgcctggccttcttgagccgggctggatcgcgcgggacctgcaccagagacccgagttctagtccgctgagccctcactctgacctgggacgaggagcctgtagtgaagatctcaggccagaggtggcccagagcctggtagggtgggcgagccgtgtccaggactcgtcacaggtcttgggtccccgtgatgaggatgagagcccccgggatcttcacctcgaccctcaggcctttgatccagggtgcataggacacccagacccctcagaggagttccagacctcaacccccacccctcctgaggttgtccgcctgggagcctcaggaggcacgagaaagggtttggtctcagccctgcacttgctcggcgatcgctactgatctctgggcttcaacttccacctgtagaatggactcaccctgggagctgtctcctacacacacacacacacacacacacacacacacacacacacacacatcgtgcaggcatagagtactaaagggagcacacactgcatccccacacgcggccagctgttattcttgccgtccccctcggcctccctgagagcagggattgtcttgtctcggagctctgctccccaacccggccccaagaatggatgtaactcaggcaactggagggtcccttccttcgcccaactgggaagtccttcctagatctgccccaagtcctctccttccttcccaggccgggactgggggagggggcgttccctttaagggaggtgggggagggggctgtgggccggccctccttccgcccctcccgggcccccgccgcccggggcccccagtcccgggcccggagccagcgcatgcgcccgcctgtgggcgctgtcccggctgcgagggccgtgagctcacggaccgacggaccgacgggcggccggccggacagacggggcagcgcagggagcggggacgcggcgggacagcgacatggccggccacacgcagcagccgagcgggcgcgggaaccccaggcctgcgccctcgccctccccagtcccagggaccgtccccggcgcctcggagcgggtggcgctcaagaaggagatcgggctgctgagcgcctgcaccatcatcatcggtgagcgggacccaggcgggcgggcgccgggcggaggccgaatgaggggcgcagccgctccgaacgaggggcgtcccctctccgggcgctcggacgggtctgcctggggaacctgcagtctggcctcagagagcgctatgaccgcggggaggtcaggggctgctggcccagggtgccaaagctccgtgttcccacctcccggccgcctgcacctgggggagttttgggtcccctccaccgctggactcttcctcctgactcgattttgctgcggggcttttgcaaggcagttaccctcagtttcctcatctgtgaaatggccatgactgcagtcctgcgattagcgcaggaacttgaccagtgtaggggctggtcaggctgcggcaggctgagctccccaagttctgtactgtgggtcagtctgagtacctactgtgtgcagggtccaggtgccacgcagtgcagtgactttattcttggaaagcaggagggcctatgagcagagtgagcaagcgcagcctgcgcagaagggacggaggttcagagcaggcaatgactgcagggtttggcagcaggacccaggagagggggcgggttagccagcaattgggggcagcagtgggcagacccagcctgcagaaggccagctgctccctgagctgggatcctggtgggcactggacactcgcctggtctggaggccctggactccaaagtccccacctgagaatgggtccatgtcctgcccccacataggggtttctgggcaggcagagagctcagaggtcatgggaatggcagtggtatttttc

SEQ ID NO: 7903 - DNA, 6000 bp, Homo sapiens
tattttttttgagatgcagtctcactctgtcacccaggctggagtgcaatggcgcaatcttggctcactgcaacctccacctcccaggttcaagcgattcttctgcctcagcctcctgagtagctgggattacaggcatgcgccaccatgcccagctgatttttgtatttttagtagagacggggttttaccctgttggtcaggctggtcttgaactcctgacctcgtgatccacccaccttggcctcccaaagtgctgggattacaggcgtgagccactgcgcccggccagatttttgtatttttagtagaggcagggtttcaccatgctggccaggctggtctcgaactcctgacctccagtgatatgcccgcctcagcctcctagtgctgggattacaggtatgagccactgctcctggaccaccgtccatttaatagtctgtcctctgcccctctttctcaagaaaagaaaatttttttcaattctgaccactaattgttctcaaaaaagtttccaacgttctgtgtgccccaggctcagagaaacttgcactactgtggaccatgtcacacttgcaacattcttgtgagaagtttctttgcccctgagttgtgctaggggttgtccatccgcctgaaatggcatcgtgcggtccacccaggctgcattccagggtgccaaagacttggaacacttcccaacttatccagatcctgcctgtggactaaggcctcagtgttcacctcccagagacaggggttagtattgcttagacacacggtaaaataataaatgacccaagcaaagaccttccccacaaaaacacacaacttgcataccatctgaagactgcaaaattaggggagtaggtaaaagtatttacccatgaacctagctgagcaggggatggtcagaatggacaagggtggctgggcgtggtggctcacacctgttatcccagcattttgggaggctgaagtgggcagattacttgaggtaagaagttggagaccagcctggccaacatggcaaaaccccatctctactaaaaatacaaaaattagctgggcatggtggtacgtgcctgtagtcccagctacttgggaggctgaggcaggagaatcgcttgaacctaggaggtggaggttgcagtaagccaagatcgtgccactgcacttcagcctaggtgacagagccagactccgtctcaaaaaaaaaaaaaaaaaaaaaggacaaggccttgggactggcacaggcatccactttaaggggttgggtgtgggaggtctggagtcttaggggaagtgctgggggctcaggcagtggctgtatttctttcaattactttaactaccagggcagctgggtgccagccctggctgtggcactgtcttgagtaaaaattaaagagggcatagaatggtttcctgatcactccctaaggctcttgagacccctccccaccatgtccaccctgctctagacaagttacagactccaaaatggggcatggcctgacacgatgatgctctggggcaggggatgggggggacacacatcccttctgtgttcctgccagcacacaacccgaacttaatcacgaagaaccagcagcaaagccacactgagcgaagtctacaaaatcactgaatcatactcttccaaaacgcccaggtcatgaaagacaaggaaagatggaggaattgttacgcaatggaggaagccaaaatgtgaggtgtggtcccggactggatcctggactaggaaaaggacattagtgggaaaactggggaaattcaaataaatcctccaaatcatgggtgtccaatcttttggcttccctgggccacattggaagaagaattgtcctgggtcacacataaaatacattaacactatcaatagctgatgagctaaaaaaaaaaaaaatcgcaaacaaatctcataatgttttaagaaagtctacgaatttgtattgggcagcattcaaagcagtcctgggccacatatggcctgcaggccatgggttggacaagcttgctctagattatttactagtgttttattaatgttaatttcctgaatttgattattagactgtgcttatgtaagaaaatgtccttattcatagaagacacatgcctaagtatggataaaggggatcctgtctccaacttgcttccaaatgattcagccaaaaatttaaaaaattctggccaggcatggtggctcacacctgtaatcccagcactttgggaggccaaggcgggtggatcacttgagaccaggagttctagaccatcctggccaacatggtgaaaccccgtctctactaaaaatacagaaattagctgggcatggtggcgggtgcctgtaatcccagctgcttgggaggctgaggcacaagaattgcttgaatccaggagacagaggttgcagtgagccgagatcatgacactgcactacagcctgggcgacagagaaagactctgtctcaaaaagaaaaaaaaaaaaaatctatcaatcatctatcatttatgtatccatctatctgtctaacatctcttatctatctatttttctatttttttttttttttttttttgagacagagtctcactctgtcacccaggctggagtgcagtggcatgatctcggctcactgcaactttcacctcccaggttcaagtgattctcctgcctcggcctccctggtagctgggattacaggcacacaccaccacatccagctaatttttgtatttttagtagagacagggtttcaccatgttgaccaggctggtctcgaactcctgacctcatgatccgtccacctcagccttccagagtgctgggattacagatgtgagtcacagtgtccggcccagtcctccttctaatgaacaccaaacaaataaaaagaaaacacagtgtcaggttggagtaggaggtgtaaatacagtggggtaaaggaacagaacacagtgtgcagtattacagaatggactctctgaagaggtgacatttgagctgagacctgaaagaggtgagaaagccagtgcagacatctaaggaagggggcccaggcagaaggaactgtaagtaccaaggtcctgaagcaggaacgaccttggtctgtgcaaagtgcagcagagaggtcagtgcccctggaaacctagcagcaacagaggcaggacaggtgaccagggccagatgttgcaggaaggagtgcagagtttattctgagtgggaagggaaggctttggagggttgtaagcagggggtgacacaagctgtttgacatacatggctcagagctgatgggagcccagtgagcgagtagattcactacaaggacagcatgtggccccacgccacctcttctttggaggtttcttctagcaggctggggatgaccagccgtgtgggtgcggggaggagctctggctgcccaacagctttgagtttcccaggtgacctgccccagtagagaaggacattgccagggcagttatcttatcaggcgcacgctcacctgctcctggagacacgctcaccccataacataccaaggtccccaccattccactggcccagcccctcgctgctgctgcccatggaggtccctacctgagggatgaggagggagtccccaggcctcctggcatctgtcacccaacaccaagatcaagccaagacccttggacacatcctttccccatgttgcaccttggtttccccatctagggtagggacggggaatggttgagagctgtaaagtctgtagctggatatgtgagtccctgtgagcctcagtttccccctctgcacaacaggaatgatagttctgcctgcacagggttttttgcaaagacccgtgaggtcacacgtgcagagcctggcatgtgtgtggtgctgctgcagtgaagtttgggtttttccattggtggtgccatagaagagctaggctctggggtcaagccctggggtcaagcccgggctggaaccctgtccctaattcttagacgttgaaatcttctgcaaagtccctgatgggggctaagaagagaatattgctttacagggctgctgttagatgctaaggaaaccatttgagtgacacacagagcacacccagcccatagtgaatagtcagagttcagtaaacattcagccaccatagagagtgttgtaagcatggcagggcatggtggctcacgcctgtaatcccagcactttgggaggccaaggcgggtggatcacctgaggtcaggagttcgagaccagcctggccaacctggtgaaaccccgtctctactaaaagtacaaaaattagctgggtgtggtggcatgtgcctgtagtcccagctactcaagaggctgaggcaggagaatcacttgaacccgggaggcggaggttgcagcgagctgagattgcaccactgcactccaacctgggtgtcagagtgacactccatctcaaaaaaaaaaagaaaaaaaaaaagagtgtgggagcaccctcctcttccagttgatcaggcacgtgctatttagactgaaagaggacactctgcagccagctgatctggttctcactccattatgtcctagcctgtgatggagccataggagaatgactcaacccctccatgcctcagtttccccatctgtaaagggtcttgtcccctcaaagggttattggaaggttaaataagttagcacatggaagccgtcagcacaatgcccagcgcataatgagcaccttatgtttgctcttcttgttgctgcagcggttcccaggggctccctgatctcagggcaggttgacatggggggatctgggcaggggaggggggggccagcccaggagggaatgcctgaggtgcccaggcctagaggtcaccccaaggagcctgtaatcagctgtggtcgggcggttctgctccaccccaccgccctccctgggtatatcaggactggtccgggcccaggctctgttgggtgggagcacaggcaccgggcaccatggggaaggccgtgagtggggcccaggggtccggggtgcagtggggacaggggttgcagtggaatctgagttctccctccctccatcctgtccattcccaggagaactatgagctctactcggtggagctgggtcctggccctggcggggacatggctgccaagatgagcaagaagaagaaggcgggtggcgggggtggcaagaggaaggagaagctggagaacatgaagaaggagatggagattgtgagctctgactggggaggggcgggagctggagggtaggctgggaaccaggcagtgggcggggagggggccaggagagcccagagcaagcaccctgccccaccccaccacacagaacgaccaccagctgtcagtggcggagctggaacagaaataccagaccagtgccaccaaggtgagctggagactgggagcgtacagaaaggggaggaggagagagggagggagagggagatggaaggagggagatggagagagggagagagagggagagatgaagagaggaagatatggagaaatagagagagggagggaggcagaaaaggaaagagggagggagggagagaggaaaggatggagggaggggaggagagagggagggagatggagagagggagagagagggagagggagagaagggagaaagcattagagagaaagggtgacacacagagacggagagaggagtagctgaaaagagacagcaagacagagaaggcagagacaaataaggagagagcagcaggagagagacacatagaaaggggagcgaggagagagagacaaagggagagatgaaggagggagggagagatggggtgggggcaggaaccaagagacaaagagatgagaaggagcaggacagaccaagctggagaagggaaactgaagcagggggctttccacggggtgtgcatgtggaggaaagcccccaggaccgcctc

SEQ ID NO: 7904 - DNA, 6000 bp, Homo sapiens
ttgagaaactcccgcggctgagacgcggatgaatgggggacgcagggcgggatcccccggcgggtgggcgcccccagctcaattggggtctgggagccggaacacctgggttcgaggagggagggggtcccggctgggttggacacctgcgccctgccggggttgaggggcaggcaaggggtgaggaggagggaagggagagagtggaagaaacttgctcagcccaggtcctagagggactgcgctcagtggaaactgagctataaatgggagctcctggggcctcgccagtttccgcgccctgggggatgcggggtccggggctcccccgggcctgcgtgtcgggaagagggcacaccgatacctgggggacagttgggacccctacctcgactcccccagcctcaaaacccctcctcaaaatatccctctgttcccttgttattgctgcaaactacagcacgtcctaagacccaggaatccaggccctcggcccctcctttcccaggaccccgcagtcccagcccaacccctctccccactcggccggccgggcccctcggcctggttgcccggcgacggctgggaggcggcggtgccgggccggggcaggcagggaggctgggaaccgcgcagcttgtcctgacggctccatgcagcccagctggggcgttcccacgctgcgcagctggccgagcaggtgggagggaccccgagcagcctgaaggagggctggggggctgggaccctgatctgacattcctggacctgtaagaactggagggtccacattcagattctccactgttcttaggctcagactccgtgtccctaaatgggggagtggggttgggagtgggggttggacttacagggttataagggactggtggttcaggcctttgctggctgagacgctgatggcctgatctcccggttccttgagaggctggagactcaaggtgcactcaagtgcatggtgcacttggaagagggtgacaggggtcagaatatctggtcttaagtcttaagagtcggtggatctatctgccaatctctccccacccccacacaggcccaggaggatttggaaatcagaccgtgaacatctgtcctaagtcctgtgtgtatgtgtgtgtgtgtgtgtgtgtgtgtgtgtgtgtgtgtgtgtgtgtgtgtgtatggggaggtgcgggggtgggtagtgtggccaggaggatcagaggcccaaattcccgagtccttggagagaagggactgagaccccagggtctgagaggggagggatctgggggcctacactcccggcttctgtgtggcttatctagtgcctggattttgaaataggatggacatggggctggaactcctgagtcttagggaggaactcaagtcatggggctgtttttccaggcacttgacgccgcttccccttcctggctctctggggctacggacatggaaagatggagagcccaaggtcccaggagcatgcagagaaggaaaacagccaaggtggagggtggaaggtttgtgcttattaaaggccccagcaagggacagctccacgctctggcacctagggacaccatctggcgagggcccccaggacagagccactcccccagctcggcatccagcccatttcccagggggtgtagagagcagttgggagaggggaggtgggaggagggcaaggagtcaagcatgtgagggaagatggaagtccagcatcgaggatgaagctgggggctgaggccagatgcctcatcttgttcctgggaacgatattggcgggggtcttggggaggtagggagaaaactagcatttccaattcccgcaggagataagcaggcagaagaagcttatcccaggcaagtgtatgtgcacgcggggagggcaggcccaccagcatatggttataaaatccagggatgtgatgagcagagccactcggagatggagagacacataagagaaagaggcgtggtcagagtgtggctgagaacaaatatttatggagctcctggtgtgtgtgagacagactgtggggtgaggggagcgacagaggtgagaacagagacagagaaacagaataacagagacatatagagatggagagacacagtgaaataaagattgactgagatttaacaacttaatatagagagcgagagagtctcaaacagatggagaaagatagaaagataaatcagctgggcacaatgactcacgcctgcaatcccagcactttgggaggccgagtcaggctgatcacctgaggtcaggagttcgagaccagcctgatcaacatggagaaaccccgtctttactaaaaatacaaaaaattagccaggcgtggtggcgcatgcctgtaatcccagctactagggaggctgaggcaggagaatcgcctgaacccgggaggcagaggttgcagtgagccgagatcacactattacactccagtctgggcaacaagagtgaaactccatctcaaaaaaagaaaaaagagaaaaaagaaaaaaaagaaagataaatcaagggccaggtgcggtggctcatgcctgtaatcctagtactttgggaggccgagatgggaggattgcttgagcccaggagttccagacaagcctgggcaatatagcaagactctgtctctgcaaaaacatttaaaaaaaattagccaagtggcggggtgcagcggctcccacctgtaatcccagcactttggggggccaaggcaggtgggttacctgaggtcaggagttcgagacctgcctggccaacatggcgaaaccccgtctctactaaaaatacaaaaattagctgggtgtggtggtcaatgcctgtattcccagctactcaggaggctgaggcaggagaatcgcttggacctgggaggcggaggttacagtgagccaacatcgcaccattgcactccagcctgggtgacagagcaagactccctctcaaaaaaaaaaaaaaaaaaaaaaaaatagccagagtggtgatgcgggcctgtagtcccagctactcaggaggctgaggcagaaagaacacttgagcctaggaggtttgaggcttcaatgagccatgatcacaccactgcactccagcctgggcaatagagaaagaccctgtctctacaaacaaattttaaaaaattagctggagtggtggtgtgcacctgtagtcccagctattcaggaggctgaggcaggaggatcacctgagcccaggaagttgaggctgcaatgaaccaagatcatgccactgccctccagcctgggcaacagagcaagattccatctcaaaagaaagaaagataaatcaagatagatagagggagggagagagagagacatggagaaggaaagaagagatgggagagagggcaagaaaaagagggagaagaaagctcatgcagtccttgccaaagggcgcccactttgggctcacactgcacccacactgggggccggtggaattggactctgccttttactcccgcccacaccctgtgcactcccacgtaagacactgtcacacacacgctctccacatgcttattacagatcgcagttcactctaaccttccccactctcacacccacgtacacacatgcatatcttccctctctcccacactctcccagcctgtcacactcactcttgcatcctccccagcagagatccctgacatcatttaggcactgatgtctactaaaaaaggaagggaggccaggtgcggtggctcatgtctgtaatcccagcattttgggaggctgaggcagatggatcacctgaggtcaggagttcgagaccagcgtggccaacatgatgaaaccccgtctctagtaaaaatacaaaaattagccaggcatggtgctatatacctgtagcaccagctacttgggagacagaggtgggagaattacttgaacctgggaggttcaagccatgggaggtggaagttgcagtgagccgagatgccactgcactccagcctgagcaacagagcaagactatctcaagaaaagaaagaaagaaagaaagagacttgccaaggtcatgtatcagggcaaggaagagctgggggcccagctggctgctcccctgctgagctgggagaccaccttgatctgacttctcccatcttcccagcctaagccaggccctggggtcacggaggctggggaggcaccgaggaacgcgcctggcatgtgctgacaggggattttatgctccagctgggccagctgggaggagcctgctgggcagaggccagagctgggggctctggaaggtacctgggggaggttgcactgtgagaatgagctcaagctgggtcagagagcagggctgactctgccagtgcctgcatcagcctcatcgctctcctaggctcctggcctgctggactctgggctgcaggtccttcttgaaaggctgtgagtagtgagacaaggagcaggagtgaggggtggcaggagagaagatagagattgagagagagagagagagagagacagagagagaggaagagacagagacaaaaggagagagaacggcttagacaaggagagaaagatggaaagataaagagactgggcgcagtggctcacgcctgtaatcccaacacttggggaggccaaggtgggaggatggcttgaaggaaagagtctgagatcaacctggccaacatagtgagaccccgtctctaaaaaaaaaaaaaagaaaaaaaaaagaaaaaagaaaaaaaagtttttttaaagagacagagaaagagactcagagattgagactgagagcaagacagagagagatactcacagggaagaggggaagaggaaaacgagaaagggaggagagtaacggaaagagataaaaaagaaaagcaggtggcagagacacacagagagggacccagagaaagccagacagacgcaggtggctggcagcgggcgctgtgggggtcacagtagggggacctgtgatggccctggggacgacgctcagggcttctctcctgctcctggggctgctgactgaaggtgagtgggatcccagccttgtacccagcgccaagtggcccccatttcccacttaccttccctagacaaaccctctgccctttccttgcaccgcgctgtgtcctcaggcctggcgcagttggcgattcctgcctccgttccccggggcttctgggccctgcctgaaaacctgacggtggtggagggggcctcagtggagctgcgttgtggggtcagcacccctggcagtgcggtgcaatgggccaaagatgggctgctcctgggccccgaccccaggatcccaggcttcccgaggtaccgcctggaaggggaccctgctagaggtaagggatcagagcctgagaccctcagccaccagcggaagctgcggccctgacttccggctccccctgcaggtgaattccacctgcacatcgaggcctgtgacctcagcgatgacgcggagtatgagtgccaggtcggccgctctgagatggggcccgagctcgtgtctcccagagtgatcctctccatcctgggtatgggtgagagacgcccaggacccatgagtctgggcttcaagccctcccctaccccgcaacccggaagtccaagcccccagcctctcctctcccagactctgggtaccgaactccaatcttcaagtccttctcagtgctggaagcttaccccagacccttctctcaccagttcctcccaagctgctcctgctgaccccagaggcaggcaccatggtcacctgggtagctgggcaggagtacgtggtcaactgtgtgtctggggacgcgaagccagcacctgacatcaccattctcctgagtgagtgtgggtgaactgggtggcagggggcagcatgaagcctctggagtgggaagggtgtgtgttcctgaccagtacccttctaagggccccagaaaagatgtcatccctgggatggggacc

SEQ ID NO: 7905 - DNA, 6000 bp, Homo sapiens
ataatttttgtgtttttaacagagatgtggtttcaccatatttgctgggctggtctcgaactccttacctcaggtgatccgcccaccttggcctcctaaagtgctgggattacaggagtgagccaccacgcccggccttcacgtctcatctttagtgaagtgtctgttcaaatgttttggtcacttaaaaattaggctatttgtctgatttttaaattaaattaattaatttttttcttttttgagacagggtctcactctgtggcccaggctggactgctgtggcacaatcaaagctcactgtagcttctgcctccccaggctcaggtgatcctcccacctcagcctccctagtagctaggactacaggtaggtgccaccatgctgggctaatttttgtattttttgtagagctgggattttgccctgttgctcaggctggtctcaaacttctgggctcaagcaattcacctgcctcagcttcccaaagtgctgggatttacaagcttgagccatcacgcctggctcccaggctggtcttgaaatcctgaggtcaagtaatatgcctgccttggtgtcccaaagtgttggcatgacaggcgtgagccaccatgcccagcctatttttaaaaatataattagagctgggcacggtggctcacgcctgtaatcccagcactttgcgaggcggaggcaggtggatcacctgaggttgcgagttcgagaccagcctgaccaacatggagaaaccccatctctactaaaaatacaaaattagccaagcatggtggcgtatgcctgtaatcccagctactcggcaggctgaggcaggagaattgcttgaacccgggaggtggaggttgcagtgagcggagatcgcgccactgcactccagcctgggcgacaagagcaaaactccatctcaaaaaaaaaaaaaagaattagagacagggtctcgttatgttgcccaggctggttttgaactcctggcctcaagcgatccttctgccttggcctctattcatctgatgttttacaaagcttccagctgctttgaggaggacaggctgtggaggggccagtgtggaagctgggagagtggggagggactgtagcttccacagaagtgagctggtcacaggccaacacactacctggtttctgggaaagtcagcgttggcttccccaactcttggcctgctgcccagagagggtgagacactcacctcttgatcttgtgtggaggccctcagctcagcttccaggagtctggcagtgtcttggggcagcgccttgttgctgggtgccctgaatctcagcttcttccttcatccaaagagggagggtttttttgttttgttttgttttgtttattttgagacggagtcttgctctgttgcccaggcttgagtgcagtggtgcgatctcggctcactgcaacctctgcctcccaggttcaagcgattctcctgccttagcctcctgagtagctgggattacagatgtgtaccaccacgcctggctaatttttgtattttttagcagggacggggtttcaccatgttggccaggatggtctcaaactcctgacctcaagtgatccacccgcctcagtctcccaaagtggtgggattacaggtgtgagccactatgcctggccaaagagagtgttttatccgtcctctagcccagaggccagcccagacctgccacctgtggtctgcatcagcacagttgtattggttgctaaaatgttgaaacattccacttctggttagtaaagagcccacatagcccacagatgtctgctaccacccgagtccattctttggggaccccttggactttcccacatctcagcaactaaaggtggcgctctaggaccctgattccagcccctatggccacatccgtatgactggatggtgcttggggaatatcttctggggacagcccaggcctggctgaagtggggaggatgagactaggaggctgatgctgaaggactgagggaggattttttttttttttctgagtcaaagtctcactcttgtcatccaggctggagtgcaatggcatgatcttggctcactgcaacctctgcctcccaggttcaagcgattctcctgcctcagcctcccaagtagctggtattacaggcgcctgccaccatgtctggctagtttttgtatttttagtagagacagggtttcaccatgttggccaggctggtctcaaactcctgacctcaggtgatccaccctccttggcctcctaaagtcccaaaatccaaaatcacgcctgggattacaggtgtgagccactgcacctggctgagggaggatttttatcaagctaagctgagaactcgagactggacatactaatttttagcatggaacatatccaagtcacacggtaccgaagtatgttcgcagcagtgaatccataggggtctgcagcaacctcaatccttgcctcctcaaaaaagaatttgaccaagggacataaggcagagtgagaaaccaaggtaagttttagagcaggagtgaaagtttattattattattattattattattattattattattattattattattttgagactgagtttcgcttttgttgcccaggctggagtgcaatggcgcaatctctgctcactgcaacctctgcctcctgggttcaagcgattctcctgcctcaggctcctgagtagctggaattacaggcacgcgccaccacgccaggctaattttgtattttttagtaaagaccgagtttctccatattggtcaggctggtctcgaactgccgacctcaggggatccgcccacctcggtcttccaaagtgttggattacaggcgtgatccaccgcgcttggccctttattattattatcattattttgagacagagtcttgctgtgtcgcccaggctggagtgcagtggcgcgatctcagctcactgtaacctccaccttccaggttcaaggtattgtcttgcctcagccttctgagtagctgggactacaggtgcccaccaccatgcccaggtaattttttgtatttttagtagagaccgggtttcaccatgttggccaggatggtctcgatctcctgacctcgtgatccgcccgcctcagcctcccaaagtgctgggattacaggcataagccaccgtgcccagcctaatttttagtagagatggggtttcaccatgctggccgggctggtcttgaactcaaccaggcattattctaatagacctcacaatatcctcacaaatatcccagcagcctggcctccctgctccagtccctgcctccacagtctgctccccacctgcggccggagggaacctgtgaacccctgagtcaggtcagggccctcctggctcagagccctgctctggtctctgactgccccctcgcccactctgctccaacacattgggtggcctggtgtgcccgggaggacctacagggtctgttccctccatgctcgctctagacacaatgggagaggcttgggtttttaagggaggggactcagccaggcctgaacagtggtgaccgtgggctgagctgggacctgaccctcctccaggctccaaatctcctctcctcccttcccccacaggccactgggcatctgccctgtgaccagaatccagtttccccttttttctcctaagcccaggcccaaggagcggtgggtgtgacgtgtggatgggggaggggggcttcctgcagctgtctcatcctccagcaccctaacctcaggttcctccttccccagccccaggctccagctgggggctagaagtccccgtctccttggggtggcctcccttgggccttgctcccagccacttcctcattcagcaggagagccagccacctgcctctccccaagccgccagccgtgcctctgtgtctgtgccactgccttactctcacctttctcagctttgccgctgttttctccttccccatctttcatctttgtttttccccctgactcttccctagtcaaaaacctgattttgggtcttgggttccatttccaccttgatttgctgtgcagccttaggcaagcgtctctacctctctgaacaatggggatgataagagcatgtgccctagaagggcattgcggggactgaatgatttaacgcttgggacagagtgcctgcatgtcattagtgcccacatgctgctggctcttttaatatcctttaaacagcacaagtttctgatgattaaataatcatcatcatagctgatgcttttaaaaagctgacaagggtcagaccctggtctaggaactttaattcatttaatccccacaactctaaaaagtaggtcccattttactcccaattttacagatgaagaaactgaggttggagctgggtgcggtggctcacacttgcaatcctagcacttcgggaggccaaggtgggtggatcacctgaggtcaggagtttgagaccagctggccaacatggtgaaaccctgtctctactaaaaaaaaaagaaaaaaaaatacaaaaaattagccgggcatggtggcaggcgcctataatcccagctacttgggaggctgaggcaggagaatcacttgaacccgggaggcagaggttgcagtgagccgagaccgtgccattgcactcaaggttgaccagccaggaagaggcagagctggtttcaatcagccagaggaaggtcatgacactgaccctcctgttaaaacgatgtctgacccctgactggggacggaggtgaagtttgtgcttcacgtaccctttgcccttcacgtctagttgctgggggcctgtggcatggcccctgggtgtctgggcctgattctttcttgggttttgtttctgtctctcctcccctgtctcctcctcccttctgccaccacccgcctcagacttcctccttcacttgcctggacgctgcgccacatcccaccggcccttacactgtggtgtccagcagcatccggcttcatggggggacttgaaccctgcagcaggctcctgctcctgcctctcctgctggctgtaagtggtgagttaggggcttccgtggctgcctcccgggtccctgggctcagcttggggcagggcagggagtggggtggaacgagagaaccaaaagtgggtgttgggatgggagcaggtccccaacctcccaaagcctgtgggtttctcccagagcccaagcccccaagttttgtcgtccgctacaagcaggggagaagagacatctaagtgtgttgccacaggacaagttgtgcagaagtaacgcacatagtccggtggcccagacgccagccccctgagtcccgccagacacgctctcccccttgctaacctcttggctgtcaggatccaccttccctggcttctaaacttgcctcccccacccccgtcataactctgtgcctcagtttaccttctttttcctcctcaggtctccgtcctgtccaggcccaggcccagagcggtaggcctagacccagcagtccctctctctacctcccagagacctccctgtctccgtctctcccacaccctttccaaacctccctgccgctgacccccctccccacagttcccagcacacactgacctcccctgacccctgtgctgcagattgcagttgctctacggtgagcccgggcgtgctggcagggatcgtgatgggagacctggtgctgacagtgctcattgccctggccgtgtacttcctgggccggctggtccctcgggggcgaggggctgcggagggtgagtggggctagcaggggacatcctgaggacttgcctagatgggggtggggggctgggtaaactcccagatctcaaacatccaaagggatggtaatggaggtgctgatttggaatgacaaaacaccctcaactcaccactctgcctgtctctgcaccccacaacacccctcacctccagcagcgacccggaa

SEQ ID NO: 7906 - DNA, 6000 bp, Homo sapiens
tcccagcctctcttccctttcacttggactgaccctgacacccatcaggctcagcaaattacctgggctgtactgccgcaaggcttcacagacagaccccattacttcagtcaagcccaaatttcatcctcatctgttacctatctcggcataattctcgtaaaaacacatgtgctctccctgctgttcgtgtccgattaatctcccaaacctcgatcccttacaaaacaacaactccttcccttcctaggcatggttagtgcggtcagaattcttacacaagagccaggaccgcaccctgtagcctttctgtgcaaacaacttgaccttactgttttagcctagccctcatgtctgcgtgtagcggctgccactgctttaatactattagaggccctcaaaatcacaaactatgctcaactcactctctacatttctcataacttccaaaatctattttcttcctcacacctgacgcatatactttctgctccctgactccttcagctgttctcactttttgttaagtcccacaattaccattgttcctggcccggacttcaatccagcctcccacattattccggataccacacctgacccccatgactgcatctctgtgatccacctgatgttcatcccatttccccacatttccttcttccctgttcctcaccctgatcacgcttgatttattgatggcagttccaccaggcctaatcgccacacaccagcaaaggcaggctatgctatagtacaagccactagcccgcctcttagaacctttcatttcctttccattgtagaaatctatcctcaaggaaataacttctcagtgttccatctgttattctactactcctcaaggattattcaggccccctcccttccctacacatcaagcttgagcatttgccccagcccaggactggcaaattagctttactcaacatgccccgagtcacaaaaactaaaatacctcttagtctaagtagacactttcactagatagggagaggcctttcctacagggtctgagaaggccaccacagtcatttcttcccttctgtcagacataattcctcagtttagccttcccacctctatacagtctggtaacagactagcctttattagtcaaatcagccaagcattttttccagctcttagtattcagtgacagactaatggtctattaaaaacacacctcaccaagctcagccaccaacttaaaaaggactggacaatacttttaccactttcccttctcagaagtcagacctgtcctcagaatgctacaagctacagcccatttaagctcctgtatagacgctcctttttattaggccccagtctcattccagacaccagaccaacttagactgtgcccccgaataacttgtcatccctactatcttctgtctagtcatactcctattcaccgttctcaactactcatacatgccctgctcttgtttacactgccagtttacacagtttctccaagccatcacagctgatatctcctcatgctatccccaaactgccactcttaactcttgaagtaaataaataatctttgctggcaggactatgctgaatctccttaggcactctctaatcagatgtcctaggtcctcccaattcttagtccttttatacctgttttgctccttttcttattccatttagtttttcaattcatacaaaaccgtatccaggcgatcaccaatcattctatacgacaaatgtttcttctaacatccccacaatatcacccctttccacaagatctcccttcagcttaatctctcccactctaggttcccacgccgcccctaatcccgcttgaagcagccctgagaaacatcgcccattctctcttcataccaccccccaaaaattttcgccaccccaacacttcgacactattttatttttcttattaacataaggcaggaatgtcaggcctctgagcccaagccaagccatcgcatctcctgtgacttgcacgtatacacccagatggcctgaagtaactgaagaatcacaaaagtgaaaaggccctgccccgcattaactgatgacattccaccattgtgatttgttcctgccccaccttaactgagtgattaaccctgtgaatttccttctcctggctcagaagctcccccactgagcactttgtgaccccttcgcccctgcccaccagagcacaaccccctttgacagtaattttccattaccttcccaaatcctataaaatggccccatccctatctcccttcgctgactctcttttctgactcagcccgcctgcacccaggtgaaataaacagccatgttgctcacacaaagcctgtttggtggtctcttcacacggacgcgcatgaaataaacaaataaagaaaatgaaagaaaaacaggacaggcacagtgggtcacgcctgtaatcccagcactttgggaggccgagacagatggatcacctgaggtcaggagttcgtgaccatcctggccaacatggtgaaacctcgtctctactaaaatacaaaaaattagccaggcgtggtgtcgtgcacctagtcccagctacttgggaggctgaggcaggggaatcacttgaacccgggaggcggagactgcagtgagcagagattgcgccattgcactccagcctgggtgacagagcgagacttcatctcaaatagaaaaaaaagaggctgggcgtggtggctcacgcctgtaatcccagcactttgggaggccgaggcgggtggatcacgaggtcaggagattgagaccatcctggctaacacggtgaaaccctgtctctactaaaaatacaaaaaaaaaacttagctggacgtggtggcgggcgcctgtagtcccagctactggggagcctgaggcaggagaatggcgtgaacctgggaggcggagcttgcagtgagccgagatggcgccactgcactccagcctgggtgactgagcaagactccgtctcaaaaaagaaaaaagaaaattaagacagtcaaaaccatagtattaacttgtttgttttgttttgttttgagatggagtctcgctctcttgcccgggctggagtgtaatggcgtaatctctgctcagtgcaacctccgcctcccaggttcaagtgattctcctgcctcagcctccggagtatctgggattacaggcacccaccaccacgcctggctaatttttgtatttttagtagagacggggtttcaccatgctggccaggctggtctcgaactcctgacccaggtgatccacccacctcggcctcccaaagtgttggaattactggcgtgagccacagtgcctggcccccatggtattaactttgtgttagagaatctgtgaatacttggtattttaagaatttgtaatatttaaggtaaactggcctattcaaataacaggtcaatcttgtaattccattgtaaaatgtggaattcagctggtgactaagacttacttgaaatctgtttatgtacagtttatgaattttttattcataaaagttatttaagaattgaagaaagagtcatctgtttatctggtaagtcagcttttttttttttttttttctgagacagaatctcgttctgtcacccaagctggagtgcagtggtgcaatcttggctcactgcagcctccgtgcctcttgggttcaaacgatttttgtgcctcagcctcacaagcagctgggattgtaggcgcccatgaccacacctggttaattttagtatttttagtagagacagggttttgtcatgttgaccaggctggtctcaaactcccagcctcaagtgatccacctgccttggcctcccaaagtgccgggattacaggtgtgagccaccacgcccagccctacttgtggctcttaaatggaaaaacctaacattaaatttacaagcatagtttgaaagtgttaggggaatttaataatcataaaagccctctttaaaagagaccgtggctggaagcggtggctcaggcctgtaattccagcactttggaaggccaaagtgggcggatcacctgaggttgggagcttgagaccagcctggccaacatggtgtaaccccatctctactaaaaaatacaaaaatgagctgggtgtggtggcgggtgcctgtaatcccagctgctcaggaggctgaggtacaagaattgcctaaacccaggaggcagaaggtttcagtgagccgagatcacaccactgcactccaacgtgtacaacagagcaagactctgtctaaaaatataaattaaataaataaataaaagagattgttaaaaccttttacaagctgggtatagtggctcatgcctctaattctagcactttgggtgatagaggtaggaacattacttggaggagttggagaccaccctgggcaacatagcaagacactgcctcaaaaacaaacaaacaaacattgtctgctggctgggtgcgtggctcacgatgaggccggcaaatttcttgagctcaggagttcgacaccagcctgggcaacatggtgaaacccagcctctacaaaaaatacgaaaattagttcgagcatggtggtgggcgcctgtagtcccagccactcaggaggctgaggcaggaggatcgctgaacccaggaggtcgaggctgcagtgagctatgaccgcaccactgcactccagcctgtgcaacagagcaaaaccctgtctaaaaaaaaaagaaaaaaaagaaaagaaaaagaaaaccttgtagactaggccaggatctttcctggttgctaaaaccattaggacaactgtgctgcaccccgttgactgccagaattagagagctataaatagatatgatgtgtttcttagggtaacataaaataccgttttactcccaaagactttagcttgtgtttcctaaaaacaaggtcatttaatgtctcaacaaatctctgagaaagatcctgccttagccctcacgttacagatacggaaacaggctcggaggtgcaatctctggctgtgtagacagaacagggagttggaacacggccttatgcgtttcctcactctcacataccagcgggcagggagagatccggggaggagttgcacttgcccccggcggaaatctccaaaaatctgcaaaaatgtattccctggtaccgctttgggctccggtgggaccaagcgaaattccgagaccgaaacggatgcgcgctgcggcccagggtgcgggtctggaccgcctcctccgtggtggacgaatccgaggagcaggactccccgcaacccagccccagccccagccccagccccgccgcgtccccagctgtcacgctgcgcgcagcgggtggggcctggggttcctggacagaggaggactacgcgtgtccttgggcggagaagggaggtgactccggcggaagaggacaaggcagaatgcaggcccttcgggtgaggcccccatgggctgggccggagccccccacccagaaaaccccgccctaatacgcgactctccaagtgcccccgcatctagggccttggaacgtgagccaccttcagggcctgggactccccgctaaacagcctgggtcccttcccccacaatccactcttcggagacaactggggacccccaccccggcccaaagccccgggtttgaacttgacatctcgggaacccttaacactggcctcacccgggccttctcaggcagcctggacgctcccggggacctccattccggtccccacgttcccgggacctggtttcctccctttaatccaggaaaccctcccccaacaaaaatctcaggacttaggccccccagaacaaagtccttctgggtcctctcccttccaggaccctctaggcagcccggtcacccccaggccagactccagggcgagtcccctcccaacccagctggcagttcgcgggtaacagaatccaagctattaccctcctcgcctt

SEQ ID NO: 7907 - DNA, 6000 bp, Homo sapiens
aggaaggagggagggaaggaagggagagagaggaaggaaggaagaaagaaaggaaagagagagaagaaaaaaggaaggaagggaaagaaagaaaggaagaaagaaaagaaagaaaggaagaaagaaagaaaagaaaggaagaaagaaaagaaaagaaaagaaaagaaaagaaaaaagagttaccgctctgtggctgtgtgactctaggcaaggtacttaacttctctgagcctcggggtcctcacctgtaaactggaacagtaacagtatctgccccaaagaactattgttctggtgggcaaggaaacagcaagggtcactgagagagagaccctacaacattttcagggatctctaagctgctgggtttggctggaaggaggaggaaagcagtaaggtaaatgacaagactggaagggtccgcaggggccagggcatataggaccctggatgggggacttaactctgaagatgctggggagtcatgaagtaaaaggatcccttcactaggtgggtggcatcgtcggggaggtgacactggaggccaggagcccaggatcccaggggtggagaatctggggagggacggagcagctgttgggagggaagaggcactcaggaggcccagcagacaggctgtgggactgacaaggcctggaggaggggtctcagaccaggctcagggctctaatcaggggactgggagacactggggccatccctgagatggcaactggggagagaagcaagtctggggttggggctgaggccaaggagggacccagggggtgcaagaggctggggagacacccaggggaaggcatggagctgcccgggccctgggccgggagctcaggagagaggactggggtgtgggggtgggcgtgaacggtgggatcgagggagacaccagtgtcccttggctggactgggtggggcggagtggctaggccacgcagggcaggccaaggctcctgcttggctcagactgagtctggagagggtggtccctgagaagaagcgtccacctccttccctagcctcacaggatgtcctgtgtttactgcggtggccacagccggaaccaggacactggggccacccccaacttagcttcccgtggccacacccccttgggtgagggaaagcatgacagagagagagggagagagaaacgcacagacagaatgagacagaaagaaactaggaaagagagacaaagaataaggacagagagaaacagaagaacagagagacacaaagatagagacacacagagagacacaccattcgtgataagaattcacaacagtccaggtgtggtgactcatgcctgtaaccgcaacagtttgagaggccaaggcgggtggattacctgaggtcaggagttcaagaccagcctggccaacatggcgaaacccccatctctgctaaaaatacaaaattattgcttcttggccttttggctaagatcaagtgtaaaatacaaaaattagctgggtgtggtggtaggcgcctgtaatcccagctactcgggaggctgaggcaggagaatctcttgaacccagggggcgaaggttgcagtgagccgagattgtgccactttgctccagcctgggtgaaagagcgaaaactctgcctaaaaaaaaaaaaacaaaagaaaaattaaaaaaaagaaagaaaataactcacagcaggccaggcacagtggctcatgcctgtaatgtcagcactttgggaggccaaggcaggaggatcgcttgaggccaggagtttgaggccagcctgggcaacatagtgagacccgcatctctcaaaaacaagaaaacaaaaaactcacagcaaactagggaaagaagcttccttaacctgataaagcgtatctacaaaacatggaccgctaacttcctactttatggcaaaaggttaaatgctttcccctaagactgagaacaagcaaagatctctgctctctgcgacaagggaagagaggggatgttgtgtaccagcctcccttttctgtttgaccctgagcagagagagggggattttcttccctatgctagcctggctgatagctcagcctctttctgccttcaggtacctaaaagctcagtgctattcatactttgtccctctgatagctcttcagggcccacaggacaaagtctgaggccctcctcatggccctgctgacccctggacctcctcttacctttccctcacactctcaccttaaccgttttctcaaagggcctttgcacagggtgttcccgctacctgaaacacactgtcattccttcaccacccatggctttgggttaacttctatatatcctccaggtgcaagctcaaatgccacttcctccaggaagccctccttgatttctcttcctaggctggggcagccaccttttctggacttccccatcaaggctttgacctctctgcctatgattgccccatcacaaccctcctctttctgggtttgttccctgctggactgtgaatggtgtggatgcaggcctgagctgtcccagtcacactgtgtccccagcaccatccagcctgggactggacagaagaccaggtgctcactgaatgtttgctgatggtgaatgaagacccgctccatttctcacctctggtcctttgcccacatttgtccctctgcctggaacccccttccctccttttttccttagctccctcctcctcaatcttccattttgacttccttttattatttattattattttctttttgagacagagtctcgctctgtcacccaggctggagtgcaatggcgcaatcttgcctcactgtaacctctgcctcctgggtttaagcaattctcctgctcagcctcccgagtagctgggatcacaggtgcccgccaccacgcctggctaattcagtttgactgccgatatcacctcctgcaggatcctttcctgagtttgccgcctcctccctggggtggagttagatctgttgatgtcccctgtgcccagcaaaagacctaccactaaacagggcttgtgagtgtttgttgaatgaatataggaacaaaagaatgtttgcgtgaatcaatgaaggagagagactgcaatgaagtgagggtctcctcaggcccatcgggagccccgaccataccatcccttctacccctcctgggaggagggctctggctggcttctggccacaccccaatgcttggttgctgccaggcctggaaggcatttcccagagctcagcacattcctgccttccccggtggctgagagtgggcagggggcatttcagagagaagggagggaggcccccagcattccgggatcctgccatcctggcctggtcccccacgccctctgaagtaggccccaaccctctggtgtgagatgggggacaggtctgcagaggggccacccaggctggtgtgaggggcgagggtgccgacagaggccagggcttggtgtctgtgcctggctggacaatggggcagaagctgctgacatgcgctttgggggtaatcccccagcctcagcccagcccaggcctggggcctgggttcagagagcgacgagcttccgaggcagcagccgggtgggttcaagtggcatgtgggggtacctgtgctccctgtgccgccccccggggtctggtgagtcagggcaggctgggggctggaccagggtccaggggttgggggtgaggcctggtagctttggcttgggagtcgggcaggtctgggttcaactctggacccctgccaatgacctgctatggtgatattgggagagtcacttaccttctctgagccttctggtctgcaaagtggaaggggcagaagagtgtagcagggtttttgtggtccaggagaacaggggttggacctcagcttcaccacctcctggccacatagctataaattgggcatagctggacgcggtggctcacgcctgtaatcccagaactttgggaggccgaagtgggaagatcgcttgagcccaggagttcgagaccagcctgggcaacatggtgaaactttgccattacaaaaaatacaaaaattagctgggcatgatgatgcatacctgtggtcccagctatttgagggggctcagtcgggaggattgcttgagcccaggaggtggaggctgcagtgagccatgatcacaccactgcactccagcctgggcaacagagtgagaccttgtctcaaaaaaaagggtggggagcataaggagcccattttacacccttgattcaaaagcagggcttcagcactgagcatggtacttagtatgtgataggtgtccccctaaacagtaactccattagacagagaactgggggtcccctgtgcccagccttactgaaaaggggccaaaaccccccagcaagatgagccagccacctaatttgtgtgaaaaataataccaaatacttattagtaaccctcattatgtgcccggcattgtcttacattttcagtctcttttaactcgtttaatcttcaccacagccccataaggtgggtactcttactatccgcaaagagaagctgtgactggcagcaggtcacccagcgaggaagtggtcgcgctgcgatttgaacccaagttgacagggagagggagtgaaaggagtttacagtagaggcagttggccaggcccgggtcctggagccaggaaacagtggggctggggtggggtcctgattctccaagtcgaggaagccaacgtgcaaatccttgaagctgagctcatggcagagatctcggcccaggcaagagagaggcggctggtggctgtcccgtggcccccaccccttggggatagatgtagctggaggagggggatgtttgtttctccaccacccaccctctggtgacgtcacacccccgcagccaatggctggggtctctctctcctcccccctccccattccttttcccccccagcctagggctagggctgacagacgggaccaggagctctcgaggtgtctggaggctcagcggtaagagatcagccggccggtcccttccctggccaggctgagacactgtgggaatgaggttcagggtcccgggaggtgctgggagggggcctgggggctcaggaagccgtgtggtgtaggtgttaaaggtatagactttggagctggtggttcaaatcccctttcctctcctttctggctgtgcagccttgggcaagatacttcatcctttgtgcctctgtttccccatctctaaaatgggctgatgtctggaggccacctcacagggctggtgccgagtaaatgagttgctgcttttaaagagctagggcagccaggcatggtggctcatgcctataatcccagcactttgggaggctgaggcggcaggactgcttaagcccaggagttcgagaccagcctgggccacatagagaggcccccatctctacaaaacaaaaaaaaattttttttaattagctgggcatggtggtgcatgcctgtggttccagctactctggaggctgagatgggagattgggttgggcccaggaggttggggctgcagtgagccgtgatcacacctctgcactccagtctcagtgacagagggagaccctgtctccaaaaaacaaactaacaaacaccagagctggggcaggaggcctggggtgggtccctggagtagggtgctagggaggcagcatggatcctgttgggaggctggtgcctgagctgggttttgtctctcagccaaagctcccctttggtagcagagaaagtgggggccactgaggagcaaaggttggatgtgcaacactgtgagaagcacagctccctccctccatactctccctgttgctgtcagagacgagtttatattaatcaagcatttactatacaggagggatattctaagcacctgctgttctctcacaaatcttcaaagcctttcttattggctccattttacagatggagaaactgaggcccc

SEQ ID NO: 7908 - DNA, 6000 bp, Homo sapiens
tttcactctctgaccacaaccactaataccccaactcccccactgcttcattgccaatggcatgagggctatactggccaactaggtctttgcttaaggttccaaagagtgcaaacactatagaaggtcaagtctccctcctattaaaagactttttttttctaacattttgaaatcttttgttacatgtttacacggaagtatttgaagaaatacaagggagtacaagcagtttttctaatgtttcataaagaaaaacaggtggggcctagcagtccaaagtggtgattaacagcatgaaacttacattcacagccaggcgtggtagctcatgcctgtaatcccagcactttgggaggccgaagtgggcagatcacctgaggtcaggagtttgaaaccagcctgacaaatatggtgaaccccgtgtctactaaaaatagaaaaatgagctgtgtctggtggctataatcccagctactcgggaggctgaggctggagaatcacttgaacccaggaggcagaggttgcagtgagccaagatcgcaccattgcactcgagcctgggcaacaagagcaaaagagcgaaactccatctcaaaaaaaaaaaatttaccatcacacaagaccatactaagactctacactcattagctgtgaaatgcagaagcaagtcacttatgaccggctttgggggaacttatctaactcatttgcaaaatggagatgataaagctaacctcagtcttgcaatcaggagttcaattaagattatgctcataaaaagcttcctgcagttctgggggttttttcaagcagataaatggagctgggataggactgttttaatccaaacacagatgagcacaggaaaatatcacatgttcacgtgtatgcaacatggcccacaagtctgcacacacacaccagaatgaacacatgaaaacatccacgtactggccgggcacggtggctcacacctgtaatcccagcactttgggagtccgaggcgggcggatcatgaggtcaggagatcgagaccatcctggctaacatggtgaaaccccatctctactaaaaatacaaaaaattagccgggcatggtggcaggcacctgtagccccagccactcagcaggctgaggcagatgaatggtgtaaacctgggaggcagaggttccagccgagaccatgccactgccccccagcgtggggacagagcaagactctgtctcaaaaaaaaaaacaaagaaaaaaacatccacatacttatatgtagtcacccaattgtgaatgtatacacacaaatatgaatatgcagcattcatcttgttctacacagaaatacacatcgtagacacccctaaatcatgtgtgcacacatgctgtatgcagagacagacacaaagattggcaagcattgagaaacagtgccacaccctgtcaggcacacacacacatgtgcatgtgcagacataagttggaatggatacccattatcaagcacaaacatacacaccacaaagcctggtgcacacataaattcatgtatcaacatgaacatgctgaaacatacatacacgtagacactaaaagcatgcacccagaatgacacacacacagttgtataaatgaggataaacatggcagaggcatccaggagaacccactggacaaaatggcacaaaacacaaagatgcatgagcacacagggtgattgaggggaacactgacttgcagggaaggagaaagagaaagatagaaagatgggatccaagacaagcatagacagacaggtgggcaaagtcctgtgcagggctccagggccaaccagaataacctgagagtctaatgctggcctgtccttccgcagatactgcctaactcagcaccacactccaggaggccatgaaggattaatttcctattcacagctccatggggtaaagcttggctgtgctgaggaagggatggcgaaggaggttcccaaagactctgtccctttcctccttcccaaaggaaaagatttgtgagctttagactagagaatgtaaaagcaaggaatgtgcttagggaacatctcatccatccgcttcatcctacagattaaagagaacaactaccattcattgagcacttactgccatgtacctcatctgcattaacacttatacttctcccctaaatagccaaagaggtaggagctgttcttggctccataagactcagagagatgaagtcagctgttcaaagccacacaacaaagaaaggataaggttaggattccaatccaggccttaatcattgcaccatccattcagaaagggaaactgaggcccagcaaaggaaagggatcttcctgggctcgccactaactcactctgaaagcctgttcccaagacactgcccactgggacaagtccctcccacatgatttcagacaccattctctcactccatgctctagggtaatcaacaagtccaaaattcattgacctctatgtccacaaatactagagttctcccaacctgtctctccccatcccctccctggccaggtcatggcaacctgctgatcactcagtgcacttcctagtgccaaccccagtgagaaacaaactccccagatttctgtctcccacctttttaagaaacacgaaggaaaaggaggagccaggcccaggtgcagactggtgaacaggattagagcgattgatatctgccaagctggtgctaatcttccttcccacctcttcccctccaaaatcaacaaacaactttcctctctctgccttgttctctgacctttgttccctccacacaggtctcagagctcagcatcctagaacagtttgagcaagatgtcagtcctgggggtgccaacctcacccacctccacttgtccaaagttggtgacccagaggacaggtgcaaccctaaatggtccaaccaccacagcctgtcctgtggccatctggggcccctctcagggtctggctgaggctcatctcagacccacataggaccaatatcagcacctgcctcatgctcatgtcacagcccactgggaccaacctcagaccctatatggtgccacccttacgccctcctgaagcaggacactcttatgccctcaatgacacctgagacaacacacagagccctcttggcaccaaacatgacttcaatattctcctggtgtcaagttcagtgccaacttgtttcccatcctcgcatacacctgggggcagtcccaaagccaacacgatgcctttccctccctggccatacctgatgctgatatcagaacccaccaatgtcatcagtgtgtccactgctgatgccagtcccagcactcacctcctgctaaggctggcctgcacttgactcccagggtgatctaggccagtcaatgaaggggggtgaggagaaagttcacatcccagctccctcacttactccctgtgtgacctcactcaagaggatttatggagtctagatctgctcatcttcaaaatgaggatgatcatgatgaaccaacctcattgttacaaagattcaaccagatcatacacacctagacttaatcttcccgtatacgaccatgctcaccaaagggtaactgtcctgtttactaaggaagaatttccctgagggaaggacaggagggctactcatcccttctccactcacacccaccccaggatctgcctctgtgcctaatactggagtttaccccaatctcttctgccactgttccctctgcctgctaatagtagtagcccctgacaaagcaggaatcattcttaaaggagacttaactcaccctcgaatgtgatcttctcttcccaaacactccctttccactggcaggaaaaccaaatccagaaaggggaactaagtacacagagcaggagagatgggagttcagggccactcacacatgtcccctgcccactgtctgttttctgtcctctgtagatctttatataaaatgagaaacataaacaacaatcataatattaatagggatgatacaatcaatctagtgggtttccctgaggatctgggttggaaaccagcggacaacccttgggacacttgagatttttccaccatttgggggttgttattactatttctccagacctagccaatccctctgccaaccgctaactccaggtactcttctccaggtgtggggaaagttcccctgaaatatggctctggtcttcctccccttcccaatcagagatgggcagtggaggttctatggcacccatcctggcctcactctgaggttccaatgaggattctgggcatcaagagacagctctgggcaaaagcaaaatcaagtcagcccctggacccagtgctgggctgctgggctttctgggagaacccgctgggcttgctacacactcctcctcccagaaactccacacccacagccctgggtcttcctagccccgagactttcaagtccatatgcctggaatcccccttcctgagacccttaaccctgcatcctccacaacagaagacccctaaatgcacagccacactttgtcttaccctaataaaacccagacctttggattcctctcccctggaacccccagatccacaactttggggtgcattctcactctcagaccccaaatccaaagcccaagtgctcccctatgcaaatattccaaactcctcagttctacagcttatctgttgccccctcctaaatccacagccctgcggcacccctcctgaagtaccacagatttagtctggaggccccctctctgttcagctgccctggggtccccttatcctcccttgctggctgtgtcccaagctaggcaggattcatggtggggcatgtagttgggaggtgaaatgaggtaattatgtaatcagccaaagtccatccctctttttcaggcagtataaaggcaaaccaccccagccgtcaccatctatcatcccactaccaccatgctggcctcagggatgcttctggtggccttgctggtctgcctgactgtaatggtcttgatgtctgtttggcagcagaggaagagcaaggggaagctgcctccgggacccaccccattgcccttcattggaaactacctgcagctgaacacagagcagatgtacaactccctcatgaaggtgtcccaaggcagggagatgggtggcacggggtgggggctgcctagttggctggggctttgtggcagggggttgaccagtgtggaccagagtcttaggaaatggagttttggagtttcagcatcagaaagacaggatcttgggatgtccagctccctgactgtgagaacctgggtgcgaagcatcccagcacatgacatctcggtgctgggccccattcagagtggaggcttctccctctaaccactcccacccacctccatcagatcagtgagcgctatggccccgtgttcaccattcacttggggccccggcgggtcgtggtgctgtgtggacatgatgccgtcagggaggctctggtggaccaggctgaggagttcagcgggcgaggcgagcaagccaccttcgactgggtcttcaaaggctatggtgagggggtgcccaagagggggaaggtggccaggtggacacgaaggtctcagtgttcccagccttctccctgactctcctgccaactggaggctaaggcagagtccccagtctggtcttccctccccatctcccttcattgtggcctctccatgtgtatccctcacctgtctccagcgtccctgtcctgattcctccctgcctctctctgccccacctccttattctctctcactggagtctcctctttcccctctctctccatctctaaggacatcctgggtttctgttttccagccctggttctctgtcttcatttgtctttttgtccctcttagcttctgggcttctctgtgtttctcatctctccgcatccctttctcacttcttcctctgtcttagg

SEQ ID NO: 7909 - DNA, 6000 bp, Homo sapiens
ggcagcatatagttgcatcatgtttgtttgtttttgtttgtcttgtttttgagacagagtccctactaaaaatacaaaaaattagccgggcgtagtggtgggcgcctgtagtcccagctacttcagaggctgaggcaggagaatggcatgaacccgggaggtggagcttgcagtgagccaagattgtagcactccactccagcttgggcaacagagcaagactccatctcaaaaaaaaaaaaaaaaaaagattgcaccattgcattccagcctgggcaacagagcaagactccacctcaaaagaaaaaaaaaaaaaaagctgttcatccctatcatctatccaacttctttcccatctctgaactctaagtcctgccattttactggtagggaggaacttcatggccatggatgtgagctatccaaacactcagaaaaaaagaatcttgactgtcttctcttctttgaccttcttcactctattttcagccaacattcccacagccccaccccccaaatccttgtcatcaatctgaaatgtgaaacacagacatttcactctctggccacaacaactagtaccccaactcccccactgcttcattgccaatggcatgaggggtatactggccaactaggtctttggttaagcttccaaaaagtgcaaacactacagaaggtcaagtctccctcctattaaaagacttttttttctaacattttgaaatcctttgttacatgtttacatggaagtatttgaagaaacacaagagagtacaagcagtttttctaatgtttcataaagaaaaacaggtggggcctagcagtccaaagtggtgattaacagcatgaaacttacattcacagccaggcatggtagctcatgcctgtaatcccagcactttgggaggccgaagtgggcagatcacctgaggtcaggagtttgaaaccagcctgacaaacatggtgaaccccgtgtctactaaaaatacaaaaatgagctgcgtctggtggctataatcccagctactcgggaggctgaggctggagaatcacttgaacccaggaggcagaggttgcagtgagccaagatcgcaccattgcactcgagcctgggcaacaagagcaaaagagcgaaactccatctcaaaaaaaaaaaaatttaccatcacacaagaccatactaagactctacactcattagctgtgaaatgcagaagcaagtcacttatgaccggctttgggggaacttatctaactcatttgcaaaatggagatgataaagctaacctcagtcttgcaatcaggagttcaattaagattatgctcataaaaagcttcctgcagttctgggggttttttcaagcagataaatggagctgggataggactgttttaatccaaacacagatgagcacaggaaaatatcacatgttcacgtgtatgcaacatggcccacaagtctgcacacacacaccagaatgaacacatgaaaacatccacatactggccgggcacggtggctcacacctgtaatcccagcaccttgggagtcccaggcgggcggatcacgaggtcaggagatcgagaccatcctggctaacatggtgaaaccccatctctactaaaaatacaaaaaattagccaggcatggtggcaggcgcctgtagccccagccactcagcaggctgaggcaggagaatggtgtaaatctgggaggcagaggttccagccgagaccatgccactgccccccagcgtggggacagagcaagactctgtctcaaaaaaaaaaaaaaacaaagaaaaaaacatccacatacttatatgtagtcacccaattgtgaatgtatacacacaaatatgaatatgcagcattcatcttgttctacacagaaatacacatcgtagacacccctaaatcatgtgtgcacacatgctgtatgcagagacagacacagattggcaagcattgagaaacagtgccacaccctgtcaggcacacacacacatgtgcatgtgcagacataagttggaatggatacccattatcaagcacaaacatacacaccacaaagcctggtgcacacataaattcatgtatcaacatgaacgtgctgaaacatacatgcacgtagacactaaaagcatgcacccagaatgacacacacacagttgtataaatgaggataaacatggcagaggcatccaggagaacccactggacaaaatggcacaaaacaaagatgcacgagcacacagggtgattgaggggaacactgacttgcagggaaggagaaagagaaagatagaaagatgggatccaagacaagcatagacagacaggtgggcaaagtcctgtgcagggctccagggccaaccagaataacctgagagtctaatgctggcctgtccttccgcagatactgcctaactcagcaccacactccaggaggccatgaaggattaatttcctattcacagctccatggggtaaagcttggctgtgctgaggaagggatggcgaaggaggttcccaaagactctgtccctttcctccttcccaaaggaaaagatttgtgagctttagactagagaatgtaaaagcaaggaatgtgcttagggaacatctcatcaatctgcttcatcctacagattaaagagaacaactaccattcattgagcacttactgccatgtacctcatctgcattaacacatatacttctcccctaaatagccaaagaggtaggagctgttcttggctccataagactcagagagatgaagtcagctgttcaaagccacacaacaaagaaaggataaggttaggattccaatccaggccttaatcattgcaccatccattcagaaagggaaactgaggcccagcaaaggaaagggatcttcctgggctcgccactaactcactctgaaagcctgttcccaagacactgcccactgggacaagtccctcccacatgatttcagacaccattctctcactccatgctctagggtaatcaacaagtccaaaattcattgacctctatgtccacaaatactagagttctcccaacctgtctctccccatcccctccctggccaggtcatggcaacctgctgatcactcagtgcacttcttagtgccaaccccactgagaaacaaactcctcagatttctgtctcccacctttttaagaaacaagaaggaaaaggaggagccaggcccaggtgcaggctggtgaacaggattagagggattgatatctgccaagctggtgctaatcttcctttccacctcttcccctccaaaatcaacaaacaactttcctctctctgccttgttctctgacctttgttccctccacacaggtctcagagctcagcatcctagaacagtttgagcaagatgtcagtcctgggggtgccaacctcacccacctccacttgtccaaagttggtgacccagaggacaggtgcaaccctaaatggtccaaccaccagagcctgtcctgtggccatctggggcccctctcagggtctggctgaggctcatctcagacccacataggaccaatatcagcacctgcctcatgctcatgtcagagcccactgggaccaacctcagaccctatatggtgccacccttatgccctcctgaagcaggacactcttatgccctcaatgacacctgagacaacacacagagccctcttggcaccaaacatgacttcaatattctcctggtgtcaagttcagtgccaacttgtttcccatcctcgcatacacctgggggcagtcccaaagccaacacgatgcctttccctccctggccatacctgatgctgatatcagaacccgccaatgtcatcagtgtgtccactgctgatgccagtctcagcactcacctcctgctaaggctggcccgcacttgactcccagggtgatctaggccagtcaatgaaggggggcgaggagaaagttcacatcccagctccctcacttactccctgtgtgacctcactcaagagggtttatggagtctagatctgctcatcttcaaaatgaggatgatcacgatgaaccaacctcactgttacaaagattcaaccagatcatacacacctagacttaatcttcccatatatgaccatgctcaccaaagggtaactgtcctgtttactaaggaagaatttccctgaaggaaggacaggagggctactcatcccttctccactcacacccaccccaggatctgcctctgtgcctaacactggagtttaccccaatctcttctgcgactgttccctctgcctgctaatagtagtagcccctgacaaagcaggaatcgcccttaaaggagacttaactcaccctcaaatgtgatcttctcttcccaaacactccctttccactggcaggaaaaccaaatccagaaaggggaactaagtacacagagcaggagagatgggagttcagggccactcacacatgtcccctgcccactgtctgttttctgtcctctgtagatctttatataaaatgagaaacataaacaacaatcataatattaatagggatgatacaatcaatctagtgggtttccctgaggatctgggttggaaaccagcggacaacccttgggacacttgagatttttccaccatttgggggttgttattactatttctccagacctagccaatccctctgccaaccgctaactccaggtactcttctccaggtgtggggaaagttcccctgaaatatggccctggtcttccacccctttcccaaccagagatgggcagtggaggttccatggcacccatcctggcctcactctgaggttccaatgaggattctgggcatcaagagatagctctgggcaaaagcaaaatcaagtcagcccctgggcccattgctgggctgctgggctttctgggagcacctgctggcttgctacacactcctcctcccagaaactccacacccacagccctgggtcttcctagccccgagactttcaagtccatatgcctggagtcccccctcctgagacccttaaccctgcatcctccgcaacagaagacctccagatgcacagccacacttccatctcaccctaataaaacccagacctttggattcctctcccttggaatgcccaaatccacaactttggggtgcattctcactctcagaccccaaatccaaagcccaagtgctcccctatgcaaatattccaaactcttcagttctacagtttatcggttgccccctcctaaatccacagccctgcggcacccctcctgaagtaccacagatttagtctggaggccccctctctgttcagctgccctggggtccccttatcctcccttgctggctgtgtcccaagctaggtggcattcatggtggggcgtgtagttgggaggtgaaataaggtgattatgtaattagccaaagtccatccctctttttcaggcagtataaaggcaaaccaccccacccatcaccatctgtcatctcactaccaccatgctggcctcagggctgcttctggtggccttgctggcctgcctgactgtgatggtcttgatgtctgtctggcagcagaggaagagcagggggaagctgcctccgggacccaccccactgcccttcattggaaactacctccagctgaacacagagcacatatgtgactccatcatgaaggtgtcccaaggcaggaagatgggtggcacagggtgggggctgcctagttggctggggctttgtggcaggggattgaccagtgtggaccagagtcttaggaaagggagttttggagtttcagcatccgggtcctagccaggaaagacaggatcttgggatgtccagctccctgactgtgagaacctgggggtgaaggatcccagtacttgacatctcggtgctgggccccattcagagtgggggctgctccctctaaccactcccactcgcctccatca

SEQ ID NO: 7910 - DNA, 6000 bp, Homo sapiens
caaaaattagccaggcatggtggtacatgcctgtagtcccagctacttggggggcgggggctgaggcaggaggatcacttgagcctgggagattgaggctgcagtgagccaagatcatgccactgcactccagcctgggaacaagatgagaccctgtctcaaaaaaaaaaaaaaattaagatcacattcaatgtgaaaaccacacataggctatatgttgtttatgccatataatttaaaaacactacggaggagtttccgcatcagtggctaaaacaattccctgttggttacatatctgcctcatattccattgtgtaaatgtatataacctgtttaactatgctaatgtaaatgtaggttgttttcagtattttgctgttaagccatcactgccatgagaaaccgtgattaggtgtcatttttcatgagtgtgtgataaattccttgcagtgcagtttgggaggcaaagagaatgcatatgttaaattttgataagtgttgacaaatttgatgccacacagttggtacaaattttcatgtcacccaacaaagttaggaagtacaatttttaccaaagttcttcccacacgttgtgttatcaaatggaatttttcagcatttaaaaccactgggccatattatgatcctcacctttccaggataatatcaatgtccgtttctcctgcatgtgtgcgggtattttgttcatatgtctacgaatcattcaaattgttttttcttctgtaaactgtttatatatttgcctacttttctactagacttcagtctttttaattttatttattctttaagtattaacagatgtgaaagttgtcagagtcaaaatgagtcactagtgtgaaaaaaaactctgacaaatagagccagagaagaccatgaagagaggatcctcatgcctgataacaaaactatcacaaaagactctgcaaaagccacaagtttatacaaaggccatcacaaccttatatgaaaactacttctgcaaggacatctgcccagcaactgcctatagaacctcacagtggcatcattctggctattgatctttgtagctagttttttttttttttttcaaaatgactagataataatcccaattttttcctttaaaaactcgaatatgtagatcattttactatggcacatgcatttccattgaaatgtgctactcccaaataaacatcagtttctcatagaaagcctcactctgtttgttaccatatatggtgtcagaagtgggatctgggaaagatcactatcagaagaaatctgtgatctttgaaccagtgtgcactactcacttgagaagtttgagctctctgcttccacactcacctttcctgccctgacaagtctttgctcaagcagagcctctttttggtagaagctcttgactttatttggaatctgatttggataaggctgccttagtaaaagaccatacatttctcctgggatgataaaaaaaaaaaaaactttttgtcttttctagcaagtcctttctgagagaaaggcgtatatctttctagatcacgtactctggattctacaaaatttacattctgcctgtgaggcaagtctattctggtgaatttacttccattttggcctgtgtgcctaatttaaatactttaaaaatctgcatgcctgggttaaaattcttgtgaatgctcttatctggatttctttttatttggtttgactcttttccccttgcttgcttctgaaaatcatcccagaacacaaaaaaatagacattctaaatgacgggcacaaaatggctgattaacagccactagcgtggttgccaccatctaaaacactggtacaaatgcctgacattctctggcaggatttgtaaaattttcttcactttcaagagattaataagaaatggaatggggctctcaagcattaaggcatgccaggttttctggggctccagctggctacattttatggttctttcttgtgcacattttaaagtttatgagcaaaattacatcaaggaaaattcagtactcaatgatcatcattcaacctgttttaaaaagccctgcatctatagggtggaaatgtagagtcttctaaattctctatttttttttctctacctactttgaatctgctgacttttctactggtgttgagataaaactcactgcttatggcattctagcccagagttttaaaaaagaaatcttgaagggctttaaaattaatggctttacaaattaaacaactccatgataagaaacaacttagacagctttaggaaatgtaaatttaagtttgtctaactaataattgcttataatggagcacaattaaaaatcaataattaaaaaaatacatggttataaaagttaggctctcagatcatacaggtcaaaatcttgaactcagagcaataatttaaggtgtctctgtccgacataaacttttttcttcttttgccatgcagaggcaaaaaagaaaaagccaggaaaaaaagctaaaatccttcctcatccacatttgttaatcaagcaaaccacatcaccaccacccgcccccctccaacccacacaaaaaatctagtttaaggctagttggagatttttttttcttatacaattcagccagttctagctaaagtgtaagcaattgaaaatttaatcctaaactcatgtgaaacagaaaaaaaaaagatgctgaaactgtagaggtttcatttgtttatttgtttataagttacactgccattagaaactgctttacccaaaatatttcccccagccttcattatattacctataggggcaaataaagtttatccatgttaacgattccaatttgtcagaaatacaattggatccagttgactttaatcaactagtgagtttgtattactatctcatcactaaaattctaaaatgaaagctgtaagatttttatttgtttgtggatatgtgtttaggtgtgtttttgcatatgtacatgtattatggtctatattgtgtctacatgacaaaatccaccttagttggccagaaacgccttaataaactctatttgcattaccttagagaaatgagcataagaacatggcttttaccctagtagcatcgggagggaattcagggtctttctaacagtgaggggcaaacccaattcattccctgacatcattcactgacattccctccaggctctaacatatgtctttctcacaaacacaccaaaactgacacaaactccggatattcgatcccaggtggatcttccaccagggcagaatgaccacaagaaagtcagggagtgattccccagcctcgagatccccagtatttgggacatctgcctatggtccctgcagacatttcaccaggggatccaggggaacttctcctgcaggaggggacaggataacccaggatctgcctttgtttccatctcagagggactgagggtcacggggcctcccctgctctaatacaggaaccaggtatcccttgcagcctgcaggtaggagctgccccagctcctgggccctgtggagaggcctggggcaggtgacagacagggacacagatgacctggaggcggaactcccagtgttgtgatggaggaacacagaacacaccgaggaccacctcccaggccagtgccctctctctaaacccccagagacacctccctgggcccttcttttgaaaccttggggacggatggctctttctgaggcagcccatccgcctgcaggacagttctcccaaatcaggaccaggagtgctctggacaactctcgtcctctccctgagctcatcctgcactgcatggagttggacatcctggggacccacagtgaacaggaccaaggatgacctgaccctgcagtctggaggtcagagcccacctctgcccaggggccagggccaactcataccacgtggaccctggtcagcatccctggggaagcccctgacttttaccacagggttcctcttgctctccaggggcaacattgcacgcagacaacacaggaaatggattcccctggacaggaatctggctttgctaaggaggtggaggtgaagcctggtttccatactttgctccagcaggcccttccagtccctcccatgtgcctgctctgtctctcctgatccttcctggagcctctgaggatcctgctctgccaggattctctgctcagttctccactttctcctggtatcatgcatggggaaggtacagtgacaacaggacaatcaccttcacagaggacagaggccacccgggatggtaagggagaacatgcacaggccctaagccacagctcagccaacagaaacggagagggaggatctccctgaatccctcctcaaggacagcagaacccagagccacccacctccctccaccacagtcctctcttcccaggacatgcaggacacctccctccacatccaggagctggggatcctcctgagacccccaggcctggatctctgtccctgggtcagaggcaaggctggtgacactggagagagaggactggtcccccccgtagtcgccccccattttctatcccacagagccacctctgtcaccttcctgctgggtatcatctcacactccctgagtattggggagcatgaggagacctgggggcccagctgggtctctgtgtcacaaaaggaaacagttccccaagtttgggagaccccagagtacctctgtttgtggtgacattcccaaagggtcagtgcagaggtgacaagtcaccctctctggggacaggggactccaccaaccctgcttctcaaagtgtggttaggaaactgtaatgtacacagaagagaaaggggaaggagggacaaaaaaggcagaaatgagaggggaggggcagaggggtgacctgggaagagccccgcctctgcccctggccctgggaagtgcttctgcccgggaggaggctcagcacagaaggaggaaggtcagcagccccgacagccgacagtcacagcagctctgacaagagcgttcctggagcccagctcctctccacagaggacaagcaggcagcagagaccatgggccccccctcagccgctccccgtggagggcacaggccctggcaggggctcctgatcacaggtgaggggaggactctctgggagtggtgggaagagggagcacagagactgactggggtctcttgggtaggaggggatagagggcttctggctggggtctcctggggctctgagaggggactgagggcctctgttggaggctggataagggagagaacatcagagaggggcaggggtcacaacaggaaaatctcagtgaactggaattggtaaaaggcaggaaaatctcaagtgttctctcgtcctggttaatcatcactggccactacattttgaaaaatgataataactataccagatgacacttcaaataaaaacataaccagggcataaaacactgctcttagccaacaacctcagacactgggaaataaacctcaggacttggaggccctgagaatgctcatgaactcatctacaggagtctgcagcctgtgccaggcactggggtgcaaccaagatcacacaagtccccgccctcacagagctcacgctctcatggggaggaagacaaacacctaaagagatctagaatgtgaggtcaggtgctgacaagagccctggagggaacagagctgggaaaggtcagaaagggaagacccagggtctctagaggaggtgtcaggggaggggtctcccaaaaacaccctgatgtgagcaggatctgagggcagtggggagggagccgtgcagacccctggggaagaagattccaccagggaaatgccaaggtccaagctgttgaaggaatgggggtcatgctgctgacccagggacacacacacacacacacacacacacacacacacacacacacacacacacacacactcca

SEQ ID NO: 7911 - DNA, 6000 bp, Homo sapiens
atcaattcaggatatgaatgagaaatttaccagaaagatagatattaaacaaacaaacaaatggaacttctgaaaataaaaaaaaaattgaaggaattacaaaatgcagttgaaagctttaacaacagaccagatcaagcagaagaaagaatctcagaacttgaagacaggtctttataattaatccagtcagagaaaaataaagaaaaaacatttacaaaggaacaaaacctttgagaggcatggggctaagtaaaacatccaaacctaggaattataggtatttctgagggagaagaaaaactgtaaagtttggtcaacctatttgaggaaattattgaggaaaacttagctagtctagcaagacatctaggcattcagatagaaaaggcttaaatagaaccaggcagatacattgcaagaaggacctcaccgcaactatagttatcaggctgtctaaggtcaacatgaaggaaaaaatcctaaaatcagcaagagaaaagtgtttaatctcctataaaggaaaccccatcagactagcagtagacttctctgcagaatccctacaagccagaagggattgagaatctattttcaaagtacttaaagaaaaaaacaacaataaacatcaactttgaattttttatcctgcaagaataagcttcaaaatggagaaataaagtctttcccagaagcaaattctgagggaatttaagaaatgctcgaaggagttccaaacagaaaagaaaagtccataaactaaaaaaagaaacaagctacaaagtaactagctgacaattatcattatgacaggaagaaaacctcacatgtcaatatgaaccttaaatgtaaatggattaaatgctccacttaaaagatacagattggtgaaacagattaaaaatatgaaacagataaaaaaacatgatccaaacatatgctgcttgcaagaaactctacttattcataaagatactaacacactgaaggtatatacagatatatttatatctgtctctgaggaggggtctggggaggcctgaggggtgactggtgctcctgacactgaaacctgatgtctctgctaaaaatctctgggtgggtctgtaagggcccatcacgtttcttcatatgaggaggcccaagaattctgctgagggagaggagggcgaactccccagagagagagaggaagggaggaggaggaggcacagagccccagccccacccctggattctgatttcatcaggctctgctcccttgttctgaggacttttggggtcaagtggagccttatccacccagacaccctggctcttgtgaggatacacggacacgaatcctcccttctacccacacatgctccagccggccctcaagtgtgaatactgtgtgggatccctctaagtgcacacagaacttgacctgacataagaccacaatctaattttgatgattcgctgggggtagagtagagaagagcttgcgtgagagatatctagaatttaaagcgtcaagcaaacgtgatcaatgcttaatgatcacgttgagttaaacctatcctgatttttccgtctacactttcctcattgtcccccagagggcagcagagtccctcccggcctggcacctccccagcgtccgctgacgtccttcagctggactagagtcccccagggtataccctcaccaggatcacctcgacccacctcctcctcgccctccaagctccccagacgcactctgtcagctcctccttgcagtccagtggccgtccaccaagtcacaacttctgcgggcagctcctgcccccacatcgcctcctccctggggctcagccgaaaggcatctcctagggcagctccctgtgatcctcagagcacattcacagcccttctctcattagcattagctcttcagtcccatgatgttcactgagcacctgtctccctgttacagggaaactccatgagcacaggggccacgtctgtcctgctttttgtggaatcccagggcccagtccagtgtctgacatacaacagatgctcaacaaatactggttaaatgcgtgggcggtcacacaacagaagcacatcacctctgtgtgacccccggagtcagggtctgttctttgtggacacagaggcactggtgccagcatgggaggaggccaacaagtgcccaaggctgccccagggacagggcctgaaccctcagagcttcaagagggaggacagggccttctaagagaggggggtcagaatctgactcatcccagaacagtgacaccccttccccgtctctgacttgtgagtcatgtcacgactcccagggggcctgggccagcagcctatgtccttcctcttctcacaaagacacctgacctgctgcagactctggatcctccatcccagatggagtgaccaccaggggacctgatcacaaggaagttgggtgatgacaccccacccccgagggtccctggagatgggggctcctggctgtggtctctggagacctctaaccagcccaaggagacctggggacccaggggaacttcccctgcaggaggacaggataacccaggatctgcctttgtttccatctcagagaggctaagggtcatagggcctccccctcccataacagaggaaccaggaaacccctgcctgagtatccaggtgggaaatgccccagctcctgggtcctgccaggaggcctggagcagacgacagacagggacacagatgacctggaggcagcacccccagtgctgtgatggaggaacacagggctctctggggaccacctcctaggctggtgtcctctctctgaagcccccagagacacctctctgggtcctacctttgaaaccttggggacaggtggctccttctgaggcagcctatccccctggtggacagttctccaaatcttgatttgctgttctctggacaactcctgtcctctccttgagctcatcctgcactgcatggagttgggcagcctgggactctccatgagcaggacctggggtgacctgatcctgtagcttggaggtcacaccatgtggaccctcgtcaacatccctggaacagcccctgactttgaccacagatctcttgccttccaggggtgcacatcgcacacagagaacactcaggaaattgcagttgattctcgaataaggcaggggttaagggtgctgaggaccccgtagaaaatctttgtataacttttggcttcccaacaattgaaccactaaaaccctactcttgaccagaagccttattgttaacataaacggtaaatcaatgtattttgcatgtttatttatattatatactgtactcttacaataacataagctggggaaaataaaatgttactatgaaaatcataaggaagataaaacatatttactattcattaagtgacagtggatcatcataaaggcttttatcctttttttgtctccaggttaagtaggctgaggaggaggaaaggagagggtggtcttgctgtctcagagatggcagaggtagaagaggtggaggggaggcaagaggaggggacacactcagtgcaacttttaatttaaaacatctgcatgtggctgggcatggcagctcatgcttgtaatctcagcactttgggaggctgaggtgggtggatcatttgaagtcaggagtctgagaccagcctggccaacatggtgaaaccccgcctctactaaaaatacaaaaattaaccaggcgtggtggcgggtgcctatagtcccagctacttgggaggctgaggcaggagaatcacttgaacccgggaggtggaggttgtagtgagctgagatcgtgccactgcactctagcatgggcaacagagtgagactctgtctcaggaaaaaaaaaaaagcaaaaaacaaacaaacaaaaaacaaaaaacaaaaatcaaacaaacaaacaaaaaaacatcgacatgtaagtggacctgtgtgttcaaatctgtgtgttcgaaggtcagctgtaattcccctggacatgaacttggccttcctaaggtggtgaaggtggagcctggtttccattccttgctccaacagacccttcttgtctttcacgcgttcctgctgtgtcccacctcttccttcctggggcctttgaagaccccgctctgccaggggtttctgtgcagctccccattccctcctggcaccacccatggggaaggcggggtgaccacaggactgtcagccagacagagtcttccaggtcaggtagaacatggaaaggacctgagccacagcacatccaaaagacagggagagggagggtttccttgaagccttccccaaggacagcagagctcagagccacacacctccctccaccacagctctcttcccaggacacaccagacacctccctccacacccaggagctgtagctcctcctgagacccctgggccttggtttctgtgcctgggtcactggagacagagggctggtccctccccagtcatcccccagtgagcccctttctatcccccagagccacctctgtcaccttcctgctgggcatcatcccagcagaaacccaaggcccagctgggtttctctgtcacaagggaaataatccccctggtgtgacagacccaaggccagaacacagcataggtcagcactgggaaaggttggttgtcctcccaggggacaggggtccatcagccttgctactcaaagctttgtatcgggaactgaatatagacaaaagggaaagaggaagagggacaaaagaggcaggaatgagaggggaggggacagaggactcctgagcagagaccccacccctggaccatgtgatcttggaaagtgctcctgccctgggaggaggctcagcacagaggtaggaaggacagcagagctgacagtcacagcagccctgacaagagagttcctggagcccaagctcttctccacagaggacaagcaggcagcagagaccatggggtccccttcagcctgtccatacagagtgtgcattccctggcaggggctcctgctcacaggtgaggggaggacttcctgggagtgggtgggaggagggccagagagactggctggggtctccttgggaggacggggctctgagaggggacaaagggcttctgttgaagtcctttgggagaggacaccagacagggacaggaaaccagaacaggaaaatcacattggactggaattggaaagggtcaagaaaatctcacatgttctcttttcctggttaatcatcactagctgctacattttgaaatatgataataataactatatcatgtgacgcttcaaataaaaacataaccagggcataaaacattgtccctagccaccaacctcaggcattggaaaataaaccccaggatgtggagggagggccctgggaactctcatgaactcatctactggagcctgcagcctgttccaggcactggggtgcaatccagttcacacaagtccctgccctcacagagctcacgctctcatgcggcagaagacagacaggcaaagagatctagaatgtgaagccaggtgttgacaagagctctaaagggaacagagcagggaaatgtcagaaacggaacacccagggcttctagagaaggtgtcagggaaggggtctcccaaggatgccctgatgtaagcaggtccagcagtatggagggagccctgcagatccctggggaagaggattccgaacagggaaatgtaaggtcagaggtgctgataggggacatgctgctgtcattgatccagtaggacacacacacacacacacacttacttcaagatgggggtgggtgaagagacctgctcaggatccagggccccatctttccaccccaatacataggtcccaatattgactgatgttctctccccctcctagcctcgcttttaaccttctggaacctgccaaacagtgcccagaccaatattgatgtc

SEQ ID NO: 7912 - DNA, 6000 bp, Homo sapiens
gtgctgagattacaggcacgagccactgcacccagccctctagttatgtctttttttttttttttttttttgagacggagtctcgctctgtcgcccaggctagaatgcagtggtgcgatctcggctcactgcaagctccgcctcccgggttgacaccattctcctgcctcagcctcccgagtagctgggactacaggcgcccgccgctacgcccggctaattttttgtatgtttagtagagacgaggtttcaccgtgttagccaggatggtctcaatctcctgacctcgtgatccacccgcctcggcctcccaaagtgctgggattacaggcgtgagccaccgcgcccggcctttcttttttttttttttttttaagacggagtctcgctctgtcaccaggctggagtgcactggcacgatcttggctcactgcaatctccacctcccgggttcaagtgattcctctgcctcagcctcccgagtagctgggactacaggcgtgcaccaccacgcccagctaatttttgtgtttttagtacagacggggtttcaccatgttggtcaggttggtctcgaactcctgaccttgtgatctgcccacctcggcctcccaaagtgctgggattacaggcctgagccaccgcgcccagccctctagttgtgtcttttaatgacagatgtgcactctgttgggtacacgcgtgcctgggagtggaattgctggttcatgggatagaccatgtttagctttcatggacgttgccagaccctttccaaagttcgagtgccattctgcatccaacagtgtaaggaagcagcagctgctccacatccttcctccactgggagttgtcagtccttttcatttttgccaccttggtggggcagtgaatccatttccctcgaggcagccttcctaacacagctcagggaggcaagtcagaggaggggctggggccaggcctgggcctgcctgcctcccaatgccagtgtctgtggccaggatgctgagagtgagtgtgagtgggtgagtgtgcaagtgcatgtacacacccactgcacaagacaatggatgagggagaaactcccgaatctgagggggaaaggcagttggagggcaggggccatgtgcgctgggcacccctggtgaccccagagtacagcctggtcctggtaggggctacatgagcccagacctctcctaggaaacccacacatactgtttaatttttctggtgcaggggaagagacgctcccatagacaggtggggagactgaggcccagagacgggagggctttccttgaggtcacacagcagggacagtgacccacatttctggctgaatgtgctaaggtcttcctgctttcccagcaccgcttccttggggatcccaggagggagggaggagtcctcaggctggaggcacccatctttttcttttttttttttttttttttgagatagggtctcgtacagtggcacagtctcagctcactgcaacctctgcctcctgggttcaagcgattctcttgactcagcctcctgagtagctgggattacaggcgtgcaccatcacgccgagctaatttttttttgtatgtttagtaaagatggggtttcaccatgttgggcaggctggtctcgaactcctggccttaagtgatccgcccatcttggcctcccaaagtgctgagattacaggcgtgagccacacctggcctgggactcacaatcttctcaggtgccccctcatctcccagcacaccaaccccctacccccctaattcagggcccatctgccaaaggccccttccctcagggaccccatttctcaccatctcatgatgtctctgcctcaggccctcctctcccacattacccctgtgtccaggtcccatctcctgaaattcccttattcaaagtccccccccaccctcccactcctaggacccctcctgcaatgtccttgcccctcagactccactgtccccctccccgtctcttgccatggcctgcgctgttcgacacctccaggcctctgcctctatgttctctgctcagaacaaagaccagtgggttttggaatgaaattgctttcattcagttcctataaggaaacccaacagctctcataacaaaagtccatcctgaatctcctacggcctgccaccaaagaggcagctggagctctgtcccaattctattccccaagctctgtctttcggtggaggttcttccaagggctacctctgctgctttggccctttgaattcagatgctgctcccctattcctgctcggggctaattgtgctattgcactcctcctttggtgttttctgttttgttttgttttgtttttttctgagacagggtctcattctgtcgcccaggctggagtgcgatagcacactcttggctcactgcaacctccgcctcctgggttcaagtgattctcctgcctcagcctcccgagtagctgggattacaggcatgtgtatttttttttttagtagagatgggcttttgccatgttggccaggctggtgttgaactcctgacctcaagtgatccaccctcctgagcctcccataagtgctgggattacaggaccacgcccagccccgcagtcctcctttgattttcaagtttgaatcctatttagaaaacctgattccaggccaggtgtgatgggtcacgcctgtaatcccagcactttgggaggctgaggtgggcagatcacgaggtcagagtttgagaccagcctgaccaacatggtgaaaccccgtctctattaaaaatacacaaattagctgggcatggtggtgcacacctgtaatcccagctactcaggaggctgaggcaggagaatcgcttgaacccgagaggcggaggttgcagtgagtagacattgtgccactgtactccagcctgagcaacagagtgaaactccatctcaaaaaaaaaaaaaaaaaaaaaggaaacctgattccactaaaagcctgggggtgacaaagaggaaataaacagtaactagccaatctgatcttcaaagtgtaactcttccatcttcagtgtggggcccttgcaaagggcttccctgcctattgcgccaccagcccctcagacagggccatcttcctcccacctcctgggaacaccttccagcaggcctcaaagcacaaaccctaaactgctgtagatcttggaagacaagagctgggcctaaaagagtcacttggggccaggcgcagtggctcacacctgtaatcccagcactttgggaggccgaggcgggcaaatcacaaagtcaggagttcgagaccagcctggccaacatggtgaaaccccatctttactaaaaatacaaaaaattagctgggcatagtggcgggcgcctgtaatcccagctactcgggaggctgaggcaggagaatcgcttgaacccaggaggaggtggaggttgcagtgagccaagattgtgccactgcactccagccctggcgacagagtgagactccgtctcaaaaaaaaaaaaaagtcacttgaacctgggcatggtggctcacacctgtaatcccaatacttgggaaggccaggcagaaggatcgcttgagtccaggagtttgagacctactgggccaacacagcaaaatcccttatctacttaaaaaaattttcaaaaaaaaaaaggtcacctggttatcccatatagatattttccttccagccccacccagctgctttggaaaattaggatcccagtctgcttaagggagcccaggcttccctatacttccacacacatttcttgaggccctgttctggttcaccccattagaattcaattagaattccagccctgtgggccaggcacaatggctcacgcctgtaatcccagcactttgagaggctgagacaggaagatcacgaggtcaggagtacgagaccagcctggccaacatggtgaaaccccgtctctactaaaaaaatacaaaaattagctgggcgtggtggcgggcgcctgtaatcccagctactctggaggctgaggcaggagaatcgcttgaacccaggaggcagaggttgcagtgagccgagattgcgccattgcactccagcctgggcaacaagagcgagactccatttcaaaaaagcccacaaaacttctcaaccttttgtctttcccaacttcactcccttctctccaaaggtgtgtgtggcggggtcggaggtgtccctagccccaactcattcatctttgggactccacaaggtggggcagggggcaacctcagatacccctccagcaaccatggccccctcactagcctcaatctcttgaggaaggaatcaattcccacaaattatctaaatctttctactcaaaatgtagtccatggaccaggggcatcagcatcacctgggaactcagaaatggaaattatgggctccaccccagacttgctgaatgaaaacatctgggctagggcccaggaatctgttttagcaagccctccaggtgtttttttatgccctctagagtcagaaggacagctctgcacggtccccattgtgccttccctgggagagtacacaacgcccgcttctgccgttagagttcccataacgccctcgctcctgacagcccacatgcaccctcctgaaactacaactcctataatacccagaggcgcgcgccgtcactttctgggattatatctcccaaggtgttttgcgagtcagaccgccatcatagcgcccatcctcttagtcaccgtcaggactacaactcccacaatactcggcggcagaactacagtccccagctgctccggggctgcgccacgtcgactccgctgggtggggccggcgtcgggcggggccggcggggtcttcagggtaccgggctggttacagcagctctacccctcacgacgcagacatggcagcgcagaaggaccagcagaaagatgccgaggcggaagggctgagcggcacgtgagcgagctggctctaggccctcggaccagagacccgggagtccgggcccccggccccctcctccctcctccctcgagagcctggagtcccagccccgagccgcagaagtgttggccccggtctcctctaatgggaccctggagtctgggcccctagtcccctccctgcctgctgtacaggaatctggggtcccgggagggagtccaggcacccttagtccccttcttttgcgggggtctggggctccatcccggtccaccactgacccggccccaccccccgcaggaccctgctgccgaagctgattccctccggtgcaggccgggagtggctggagcggcgccgcgcgaccatccggccctggagcaccttcgtggaccagcagcgcttctcacggccccgcaacctgggagagctgtgccagcgcctcgtacgcaacgtggagtactaccagagcaactatgtgttcgtgttcctgggcctcatcctgtactgtgtgtgagtgcctcccgggccccgcacccgcactagccccgaccggctggacccctcctctcgccgctcaggccccgcccttcaccgcccggtccctcctctcaccgcccagggccctcttctcaccgcccaggccccgcccccaaggattggctctgctagactaccttgtcaccaaagggccaggtcccctaccccaccatcaccctggccaggatgcagtgtgactaaatgtcacctggccctccctggtctccaggatgtagcttgccgcccgccggtggagaaggccagggccgtcgggctggcccagccccagctgtctaaccgctgcctccctgcactcctcctccagggtgacgtcccctatgttgctggtggctctggctgtctttttcggcgcctgttacattctctatctgcgcaccttggagtccaagcttgtgctctttggtgagaaaccccctgcccagatgaatccttggtccctcaaatcttgg

SEQ ID NO: 7913 - DNA, 6000 bp, Homo sapiens
cctcagcaacggcaagctctactcggccggcgcgggcggggatgcgggcagcgcgcacgggggcccgcagcgcctcctggacgacccggggccccccagcggagcccgacccgccgcccccaccccctgcacccacgtgcgcgtctgccaggagtgccggcgcatccaggcgctgcgggcctcgggggccggcgcgcctccgcgtggcctgggcgtccccgccgaagccaccagcccgccccggccgcggcctggccccgccggcccccgggagctggcggagcacgagtgaccacgggcggggctgtgcgggcgcccggactgaccgaagggacggggcccgccccaggccccagcagtctccgctcccgcagcgggcgcgggacaggacttgtgcgccggcgccccggacgccgcgattttgcctttggttccccgcgaagtccgaggcctggctctggagcccgcctgcgccccccagtggactcgcgagagggtgccgcgggcgagaagggcgcaggaaccgaggactccaggggctggggacttcgggggcggctctgggaagcggaaagcagtcagcggagaggaccccattctgggactgctcaggctccccaagacttgacgcagccccccacgcttctggaggtggggagggcctctggacagatgggtgtcccctggtgcccctccactcttctcttcctctcttttttggggggagaaacctcggaatttctatgagacctcccccagggagggggtcagttgggcccccatccctccccttgccacatcgcagcccctgttggaataaaaaaaagaacaaaaccccagaactggggataccgtctctcatttcctgggggtgtgagggctttggaggcttgggtccccggggcacctgctgagaatcagagtgagcctcgatggttacttccatgctctctccaccctcagccctgcctacaggctgcaggccagcccgggtcccagcagctggcccctctccactgaccttctctcaggacagagggaggctgcgacagagaccctgagacagatggagagatgcagggatctggagacgcggagacaccggaagcggagacacagaaagacagaaaacagatggggctgggggaggggagggccagtgagctgttgagtgtggccgtgcctggggtggcgagtgtgtgcctgggccggggtgattcagtgacgttgtgatcgtgtgtgcacgcatctgcgaggccatcttcaactgtctgtggctgtgatcccgtgtttctgttgaaaatgtacctccccaacccccaagagaggaagtgaggaatcccagtagactggggggtgggtgggcgggcaggggtgggagaggctgaagggctgatggcgcaggagaaaggtgggtccgccttctgtccccgccctccctgccccgccggaggtttctgtggaaactgcagctgaggaaggacgagtgaaggtcacacagcaagagccaaaacgaggccgagcagaaagggagagatggagggatggcgagagacagagatggggagagacaacgaagggggcagagtgggcgggagggggatggggagagagagctagaggacacagagccggcgagacagggagagaggctgggtgaggtgagagaagactggagaaagaatagagggctgagaccagaggtgaagcgggagggtaagatacacccggagttggggtgagagacaggaagccataaaaaactaaatggaacctggaggggactggaacggaaaggaaagcctgactggaaaggtcccagagagagcgaggctgcgcccgttcctgggcggcggcccggggcttgggagctgtccgttcagcacccagttggccagcctgagcccagagcgcccgacttccctccagggcccgcctgcccagcgcagtcctggcaggccggccacaccctgggagacccctccccgcacacagcgccccccgtcgccacccgtccccttctgcgtctcagaccctggttgcgtgcccctcggacaggtgtgggggcaggcaccagcctctctctgttgtctcgcatctctatctccacgtctcttacacactccaatcaatgtctctgcccttgggtcggactctttgtcgaggtgactagaacatgattacagacatttctggtttctcccccttctctgtcccaatgcctcgaggccaattccctctggggtctcccccatttctgagtccccggtcccctaccaggtttctgctcagtctccccctggcctttatctctgagtctccctggtttaccaagcctgtctctgcctggctgtctacgtctctctgtctctgtcaccttcactgaactcttccgttgctctgtctccgtgttctcatctctgcatctgccaatctctgtctgtctttttcaatctgtttgtatccgcctctctctggttctgggctgcctgtttctccctctgtgtctctccttccgcctctcacatctagctcccctattcccctttatccctgtgaccttcccaggtctttccttctcaccgccccccctacttctgcagagcctcaccaggagcacgatgcacagtcatcagtctcatcaggctcgtgcctgaggagagagtgcatgaggggggacgtgagcttgtgtctgaggtgggatgggaagggctcaaggcctcccccggcccagctggagagcaagagcagacagagcctagaatctcctggaatccaggcctcccccacctccccaggcttccccatctccccagtcccattctccatggtccaggcccatgcctctaggccaaggtgtcaagagaaggaaaggaggatatgttgataggctctccctcccctaggaagagggcagagttggggagggggcgtctgggggtgaggcatctgggttaaaagatgtggctcctccccctttcccagtctccatggcaacagcccagtctgcaggcccaacctcctttgctgcagaagcagctccctgttaccatggcaacaaaggacagcgagaaagatggggacgggtcagaggacaggattgggatggggctctgggcactggggaaagcctccattcactctctggccttgtctctgtccatatgctgtggctctgaatctctgtgtttctgtgcctctctctggccttcagcctttcacacatttccctgcaccaggtcctcgaccttcacccacccaccctcatacaccaagctcactccctgtcccttgcctgcgtcccccacatctcctatcccataggtggagaggatacccacattctgagaaaactacaaggtcaaatgctctctgtctctctctctctctcttccccttctaccatccccagggagagtctggggtgttcctcatagaacaaagtggtgttggagtgagtggggaggcctcaacttcttgggctccagtggggtggctgatggggtgttgtgtgtcggcagcaggcctggggtgtgggtgccggctgtgcatctgtgtgtgtacatatactgtgacgagctctgtgtgtcatgtgggtgagggcgttggggtgtgtttggaggtgcaacaaagatgtctgcgatagtgctgcaataacgtgatgtgtgtatgtgtgggaggtgtgtgggtgtcgcgtgacttgtgtttgaattattgtgctatgtgtaagtgtgtgcacctttttgtctgtcattcacagttagcattggcaactttgcactgtgggccgttgctcatgcccaaacacactggggagcagtgtgtgtgaggatgtgtgcgacatcgtgggatcatgcaacgatgtccacaaaggctgatgtagtgtgtctggaggcagtgtgaggcctgtgcgtgtgtgatggtgctgagtgcaggtgtgtgttggtttatgggttgcacgatgtgggtttctatgtgagatggtgggaggtcaggtgtggtagagtgtgtgatgtgtgagtctgcgattttctgagtgtcggtgttagtccgcacagcactttgtggctgtgattatgagtctcttgtggtgtgatgggtgtgtaaggtgtgtgccctatgtgtgtttcactctatgtttgagactctgtgtgtggtggggtggtgttgtgtgtgtgagggtacatgctggcctatggtggaatatgagtgcaaccctgtggtgtgtgcgtgtccccagcatctgggctatcagtgtgatggtcctgtgtaactgtgacgctgggcattttctgggcctcctggggccatcctccaccgtgttgtgtctcccgtgtaccctgtgtggttgtggctcattggatagctcaggcgtagtgggggggcacccacagtgagggaatctcagggctcctcccgccagcacccctcctcaattgcaaggcctttcttgctctcttgtgttcccttccaacttcccctcctgcagggccctctccctgaacagcactaccccccgccgtctccagggtccctggtgccacactgcagtgattcaccgggcttccctcccaccccgtgtcactacccgccccccctcccccagcgtacccttctcggtgatggcacacccccacaatgagaggatttccggggttttctttccctgagcgccccttcttggaggccctactccatattgagggggtctccaagtcccctattgcggaggtctctgggaatccccccacccccgcagcgctcccccttcgcggccgcgccgccactttgcggagcccaaggggaggacagctgcagtaccaggggcggggccgcgggccgtccgtcagcacggcggcgcccctgattggccagcgccgcccccctcccgcggacgcgggcatatgaggaggcggaggcggcggccgccgcagcctctgtgcggtgggaccaacggacggacggacggacgcgcgcacctaccgaggcgcgggcgctgcagaggctcccagcccaagcctgagcctgagcccgccccgaggtccccgccccgcccgcctggctctctcgccgcggagccgccaagatgggggtaggtgctgagccggctgggcgccgcttccgtgtgacattgtggggccggtgacattgggtgtgcgcggggggcgggggcaccgggacccctgcgctccggggccaggcctgcgagacccggggagccggctgacccagccaatccatgtggtcgtggggccgcagggggcggcggggggtctgtggcgcacgttggcatggctttgtgtgcggagatccgcgaggttgtgggccagccctcagcatctccgcctgaccttgtgcggttgcatgtgcacagttgcatgtgcgtatgagagctgctggctctgtcaggccctggcagcgagtgtgtgggccccgtggtgtctgaaagtctgcgatcgcgtctgggtgtgtctgtgagagctcgtgttagtgcgtctggggttattgaggcccccctgcttccctggcagggtgcggataggtccacgttgtgggatggacaccagatgacctctctttctccttccaggcctggatggggggactccgcagtgtgtgtgtgtgtgtgtgtgtgtgtgtgtgtgtgtgtgtgtgtgtgtgcaggctccgcagtgtcgcagcctggggctgcagtgtgtgtgtgtgcagcccctcatgtaggggagcaggcatgggaggctgggaggaggagaggaacaggagagccacggtggggagactgagtgcacagctgagggtgtgcgtgtgcaactgtgtagtggggagcgtgcatgcctggctgtgtccttgcctctgtgtccgtgtgtccttgtctgtctgtgagtctctccagcagatgccgcctccctccctggctgaccacctgacccttgctgcagccctggattcctccctgtgtgtctggggcggggctgaagggagggggaatcaggagaggag

SEQ ID NO: 7914 - DNA, 6000 bp, Homo sapiens
gttgtcccagcatcattatttgaaaagattattcttcctccattcaattaacttggcacctgtactagtcggggtcctcagagagacagagaaaacgggataaagatatagttgtagatatagaaatagatctaaatatatgaggggatttgttagaggaattggcttgtgtgaatacggaggctgagaagtcccatgattagccagttacatgctggaaaaccagggaagctggcagcatggctcagttctgaccaaagaagccatggtgtaccctcagtccatggccaaaggccaaacaacctggagttctaatgtccaaagacaaaaggaaaagggtgtcccagctccaggagagagaaagagagaattcaccatccctctgcctttgtgctctatccaggccctcagccaagtggatggtgcccacccacagtgagtgagggcaggtcttccttactgagttcactgactccaatgccagtctcttcgggaaacaccctgacagtcatacccagatacaaggctttaccagctatgagggtgtctcttaatccaggcaaattgacacctaaaaaaccacagcacccttgtcaaagatcaactgactgtaaatgtgagggtttacttccagactgtcaaatctaatccactggtgtaagtgtatctttatgccagttccacactcttcagattacagtaactttgtagtaaattttcttttttaaaaaatgtgcataatcatagggtacaagtccaattttgctattctgatatattgcattgtggtaaagtcaaggccttcagtgcattcgtcactggagcaaggcacactgtacccaccatatagtaagttttcggataaggaaatgtgagtcctggccaggcgcggtggctcacgcctgtaatcccagaactttgggaggctgaggcaggcagatcacctgaggtcgggagttcgagatcagcctgactaacatgaagaaaccccgtctctactaaaaatacaaaaaattagccgggcatgttggtgcatgtctgtaattccagctactcgggagctgaggcaggagaaccgcttgaacccgggaggcggaggttgcggtgagctgagatcgtgccattgcactccagcctgggcaacaagagtgaaactccatctcaaaaaaaaaaagaagaaagaaagaaatgtgagtcctccagttttctttttcaagactgtttcagctattctatctgtctttattttttgttaatgtatttcaatagttcttaatggggaccattccctgacctgcttccagggaaatctggcaatctggagacctttttaggaacttgaactaagtagaaaaaatatttttttttcttttttttaagacagagtttcgctctagtcacccaggctggaatgcaatggcgcagtcttggttcactgcaacctccgcctcctgggttcaagcgattctcctgcctcagcctccagagtagatgggattacaggtgtccaccaccacgcccagctaatctttgtatttttagtagagacggggtttcaccatgttggccaggctggtcttgaactcctgacctcaggtgatccacccacctcagcctcccaaagtgctgggattacaggcatgagccaccgcgcccagtcaatatcctcattttatttgctgagttgctatgttaaagtgtgagttgcctgccatgaatgaatgaagagacacttaaagcacttgcctgcatgacgatgtgcaccaccttctctctccccctgtcctgtgccctcaggccctcttcacccaggcccaggtggccccatccagtggcctctacaaatggattcctcctcaagctggcccacagaccttccttccagcaagtgactcacctgcaacctcctccacacacctgagccagcggttctcagttcttctctgaggtcccccaggaagggtgatgatctcatgtaggttcactcgcattaggtgacacattctcacaaacaaactggtctgtgcagtaaagcacacagccacaactcctgaggatgttttgccattgccaagtgttgtcatgagatgagaggtaagaaaacaacatttcacatcatgatttagctctaaatgacttttttaattgtattttttaattgacacctaataattgtacatatttatgggtccatagcgatgtgatacatataaggtacagtgataaggtcagggtgattagcatatccatcatctcaaacatttagcatttctttgtgttaggaacattcaatatcccctttctagctacttggaactatatattattgttaactatagtcaggccggttgcagtgggtcacacctataatcttagcactttggaaggccgagacgggaggattgcttgagcccaggagctcgagaccagcctgaccaacataataagatcagtctctacaaaaaaatcaaaacacttggctgggcatggtggctgtaatcctagaactttgggaggcctaggcggaggatcacttgagcttaggagttcaaggccagcctgggcaacatagtgataccctgtctctttatttaaaaaaaaattgaaaaataaaacaaaaaattagccaggcgtggtggcgtgcacctatagttccagctacatgggagactgaggcaggaagatcacctgatcgcaggaggttgaggctgcagtgtactccagaccctgtctcaaaaaaaaaaaaaaatctgtagtcatcctacagtggtatagaacattagaacttattcctcctcctatctagctgtatttttttttttttttttttttgagacggagtctcgctctgtcgcccaggccggactgcggactgcagtggcgcaatctcggctcactgcaagctccgcttcccaggttcacgccattctcctgcctcagcctcccgagtagctgggactacaggcgcccgccaccgcgcccggctaattttttgtatttttagtagagacggggtttcaccttgttagccaggatggtctcgatctcctgacctcatgatccacccgcctcggcctcccaaagtgctgggattacaggcgtgagccaccgcgcctggccttatttttttttaagatggagtctcactctgtcgccacactgaagtgcaatggtgcaatcttggctcattgcaacctctgcctcccgggttccagtgattctcctgcctcagcctccaagtagctgggactacaggtgcccacgaccacacctggctaattttttgtatttttagtagagacggggtttcaccatgttggccaggatggtctcaatctcttgacctcatgatccacccgcctcggcctcccaaagtgctgggattacaggcatgagccactgtgcccggcctatctagctgtaattttatatcctttaacacatctttccctgtccctcccttcctctacccttcccagcctctggtatgctctgttctactttttccttccatgagatcaactgtttttaggttccacatattagtaagaacatgtgatgtttaactttctgttcctagcccacttccattcatgttgccacatgtgacaggatttcattctcaagcccccaaaggcacctcactgggcctttgtttttttgttttgttttgtttttgcttttgtttttcaaacctctgggacagatggctccttctaaggcagcccatccccctggtggacagttctctccaatcttgacagaagtcctctggacaactcacgtcctctccctgggctcatcctgcaccgcatggagctgggcagcctggggacccgcagtgaacaggacctggggtgacttgaccttgaagcctggaggtcagagcccacatctgcccaggggtcagggccagctcacatcatgtagaccctggtcagcatccctggggcagcccttgacaaggctgcaggccttgtcttgccctccagggggagacattgcacacagacaacactcaggaaacattcccctggtcatgaacctggctttgctaaggaggtgaaggtagagcccactttccatcccttgctccaaaacacccttccaggccctcccatgtacctgctctgtcccttcctgggtcctctgaggaccctgttctgtgaggggtccctgtgcagctccccattccctcctggcaccacctgtggggaaggtgcggtgaccacaggacaatcagcctcgcagaggacagagaccacccaggatggtcagggagaacatggacaggccttgagcctcagctcaagggagggagggtccccctgaagtcttccccaaggacagtagagcccagagccacccacctccctctatcacagtcctctcttcccaggacacacaggacacctccccctccatatccgggagctgcagctccacctgagacccctggacttgggtctctgtccctgggttagaggccaggctggtgacactagagacagagggctggtccctccccagtcatcccccagtgagcccctttccatcccccagagccacctctgtcaccttcctgctgggtgtcttcctaccttcccagcacactgaagagcatggggagacctggcagctcactgtgttgcaaagaaaataattaccacatttggatatgccagggttctctgtgtgctgctgacagacccatagccaggacacaatagaggtcagtgctggagaggggggatcctcctcccctgatggggacagaggtctcatcagccttgattctcaaagtgtggtctgggaaaccaaaatgtagacagaaaggaaagagaaagtaaggacaaaggtaggaatgagaggagaggaaacagagcttcctggacaaaccccgccccagcacacatgatcagacaaagctctgggccccagggaggaggctcagcacagagagtggaaaacagcagaggtgacagagcagccgtgctcgaagcgttcctggagcccaagctctcctccacaggtgaagacagggccagcaggagacaccatggggcacctctcagccccacttcacagagtgcgtgtaccctggcaggggcttctgctcacaggtgaggggaggacaccctgggaaggggcggaaagagggcgcacagagaatggctagggtcctctggggaggatggagctctaagaggggacagagggcttctcttggagccaaataggagagaggacatgaaagggatagagatcataaaaggaaagtctcagtgatctgaaactgttagtgaataaacaatctcccattttttaccttttccaactgaatcatcaatgagcaataaatttcaaaaactgctgacaataatcacaatttaagtcagcgtgacaattaaggaaaacattttaaaaggggcattaaacagagccctgagccaccaacctcagatattggcaaataaaccccaggacatgaagagccctgggaatgctcactaactcatccacaggagtctgcagcctatcccaggcactggggtgcaaccaacatcacacaaatccctgccctcacggagctcacgctctcatgggtggggaagacagacaagcaaagagatctagaatgtgaggtcaggtgttgacaagagccctggagggaacagagcagaaaaaggtcagaaagggaatacccagggtctctaggggaggtgtcagggaaaggatctcccaagagcaccctgatgtgatcaagatctgagggcagtggggagggagccatgcggatccctggggaagggcattccagagaaatgacaaggtcagaggcactaagggaatgggagtcacactgctgaccttgacccagtaggacacacacacacacacacacacacacacacacacacacacacactccaaggtggaggggtgaagacacctgctcaggacccaaggccccatttttctaccctaatgcataggtcc

SEQ ID NO: 7915 - DNA, 6000 bp, Homo sapiens
gattccaaggctgggaggcgggcggagggagggggaaggggacagtgctgaatgaatgacttcacaagaagtcattcactttctctctctcagcttcagcatgatgccaagtgacctcacccaggtgactgaagtgctcgtcattgttgggaacgggggtgcctcacagggtctggagaacagataatatctttataaacacgaccgctgcttgtctcgtcatcagacagtgagccagccccctgcagccgggtctgacatctgactctgccgcttcccttgctgtgtgaacttgaacagataccttcctctctctgggtctcagagtcttcctctgtgaaggagatcttcctctctaccccctcgttaggaattcaaggcaagattgcttgtataagagctgaccaccctgtgtggcacacggttggagctcaagaagtgagggctgttaataataatagttatactaacaatctatttattattattattattgagacagggtctcactctgtgactcaggctggagtacagtgacgtgatcacaacttactgcagccttgacctcccaggctcaatgcgatccttccacctcggcctcccgagtagttggatctacaggtgtgcaccaccacacctggctactttttgtattttttgtagagatagggtttcactatgttgcccaggctggtctcaaactcctgggctcaagtgatctgcccgcctcagcccccacaaaatgctgggattacaggcaccagccactgtgcttggcccttaacctattattagtaataaaaactaatgctttcataactcctagaatttgaccctattttaatcatttcacatatatttaacattgatgccctagcagtatagtatttcacatatatataacattgatgccctagcagtatagcacctagtatgatgtgggtactactaagaccctcattttatggatgaggatgagggcactgaggcacacaggggccaagtaattgtcaaagtttcacagctgatatccaatggacccatgtacctaattataggtactgttagttaagccagactgcctgagttcaaatactgtctcctagcattgtgacttcctagctttgtgaccctgagcaagttgttaagccccccatgcctgcctcgatttccccatttgtaaattgaccatcatagaaatctctcataggattgtgtgtaaagggtgtggaaagttgcctggcacagaggaagcactgaatgcatgtgcttttgtcatagtctttgtttagacaggaagcctctgaacatcaaagaattggagtcacttgatcaagtcacacagcagattaggggcagagttggtattcaaatgcatgcctgtctggctgtaaaactaagggtcattgcaaaatataatctcaggcctaaagccaggctctgactttggcaaatggcatgggggcctttggagacagccctggattcaaatcccagttctgccacttccaagcctctcccagtctcagttttcccatctgtgaaatgagacttagttctctctttgcagagctgtcgtgacattcagagaggattcacagaaagtgctaagcacagagtaagtggttaataaatgctaataaccatacttacaggtgaggattaaatgagataatgcatgccccctgttcaaaacagtttctgggaaacaaacacttgatactcagtcactgttgttattatgacttttgttaccattgttattaatgtcatgatgtggtttatggcaagaactgtctggaattagcttggaaacctcccacttcctcttccctcacattggatccatcagtaatccctacctgttcttcctcctaaaatattttagatctttccactcttcacctttcctttgggacacccttggctaagtacatctgctctggcctgtgtcaatgttctccaccagggacacacctgtggttgaacaagttgggtttattgcttcttgcaatgagggagaaaacacaccatgaggtaactgtgaggtgtctaagtaaaagggtgttagaaaggattgattttttttttttttgagtcaaagtcttgctctgtcacccaggttggagggcagtggcgcaaatctcggctcactgcaacctctgcctcctaggttcagcgattctcctgcctcagcccctactccccaggaactgggattacaggtgtgtgccaccacacccagctaattttttgtatttttagtagagacggagtttcaccacattggccagtctggtctcgaactcttgagctcaggtgatccacccccttggcctcccaaagtgctgggattacaggtgtgagcacctggccagaaaggattgattttaagatttgggcttgtgtgtggtggtcttgggaatggtgcaaggaagtgggacctcgttctagtttggatactgttaaacagaggaggagtaatgctgtggttgggcatttgcataaatctcatttatgaggcaggagaaataaagtgaggttaaagttgtaactttaatataatataagcagtcatttatattagccaggatatggggatgcttagtcattctgcggtttgcacaatgaccttgtttgtttctgtgttcagacatggctatggattggtcttgattttgtttttctttgttttttgtttttttgagacagggtctcactctggttgcccaagctggagtgcagtgtcgcaatctcagctcactgcagcctcaacctcccaggctcgggtgattctcccagctcagcctctcaagtagctgggattataggtgcacacccccacgcccagctaattttttgtattttcagtagagacgaggtttcgctgtgttgcccaggctattgatttgtttcttgatcctttactgtcgcagtgtggccttgtccaggttggtgctctgtgaaattatctaggcgcagttgaactccatggcctcactatgtgtgtcaggccaactcccagctgttaggggctgtttttctctttcttccatggaaaactacacggccccctgttggtttcctggccttctctctcaccccttctagagtcattttccttttttacacagagtccacagtgacattctttaccttgtttttattgaagaataacatacgtccagtgacaggcctgagtcagtgattctcaacgtatctgtacacacatgcagctgtcacctagatgaagatcgtgggggctcctccctgttgctccttctggggccatgccctcccaaaggtaacatgtgttctgatttctatcaccactggttagttttgtctgttctgaaacttcatatatattcagttacacagtatgttttgtttgtttgtttaaggctttctaaactcaacaccaagttttttctttttttaaaataaaatgagatgggatctcactatgttgcacagcctggtctcaaaacccctgggttcaagtgatcctcccaccttggtgtctcaaagtgctgggattacaggtgtgagccactgtgcctggccccaacacaaagtttttgagatatgttgctgcatatatcaggtgttggatcttttctattgctgtgtagtattccattggccgaaccaaccactctcttttgccattcacttctttttctttttccttttttaaaatcatatatcctactctcagatccatttacttttttttaatttttaaatttttaaatttttttttttgagacagggtctcactctgttgcccaggctggagtgcagtggcgtgatctcagctcactgcaacctccacctcctgggctcaagtgattctcctgccctacccttccgagtagctgggacagcaggtgcacgccactgcacctggctaatttttttaaatttattatttttttttaatagagatgaggtttcgccatgttgcccaggctggtctcaaactcctgatctcaagtgatccacccagctcggcctcccaaattgctgggattacaggcatgagccaccgcgcccggcctccatttacttcttgatggctagctgcactatttctcaggttgatcatattaggaagcaaatctattatgtcctccagctcatttagaccctcttaaaggttctctactattctcaaaattaatccaaatctcttgtcggggcctctgatgccctgagtgtctcggcctctgcctgactctttcatctcagttcctgcccttctctcatggacttctgagctcaggagcactgctctcctttccatgtttgaatggtccatcctacctcctacctccaggtgctcccacgtgctgttccctctgcttgtaaagggctgtgtccctctcttgacctgctctagctggctacatcctgcatgcccttgaggttgcatctcagataacctcaaggaagccctcaccgaccagcccccacttctagactgcacatctccttgtatcactacactttttccttcagtgtcttagtctctttggtaaacaccaatttgtacgattatttgattagcatctgtctcccccatcagactgtgagctctgccaggacaggcactggttctgtcttcatctccagcattacctagaccaaagccgggcacactgtagatgctcatttaacagttaccgaacactgaatgtcgagtagccccagcctgtctttaagccccactactctcccactccaaacacacacagactttctcccgcgagctgtcagggaacctcagctcccaccctttccctccttggcaacttcacagggcagggaccgctctcccttggatgacgcgcctaggggcggggccccgccccacagccgacgctgagttggcccggttgggcaaggctggggttgcctggggcgaggttactcatcctgggctcaggtaagagggcccgagctcggaggcggcacatccaggggggacgccaagggagcaggacggagccatggaccccgccaggaaagcaggtgcccaggccatgatctggactgcaggctggctgctgctgctgctgcttcgcggaggtgggtctgctgcccggagaggtggagggggtagagtgggggctcttagggaggaggctcctctggccccgtacagagaaggctgtgggaaggatccccacataagcagagggcactgtgggcaaagttcccccatcctaagcaagggaggcagagggaagggtcctccaccatgggccgtaggaagggttccccaccacggacaaggggagctgtgggcaaaattttcctatcctgaagctgcagaaagaagtcccctgttcctaggccgggcgcggtggttcatgcctgtaatctcagcactttgggaggccgaggcaggcggatcatgaggtcaaacgatcgagaccagcctggccaacatggtgaaaccctgtctctactaaaaatacaaaaattagctgggcgcggtagcgcgagcctgtagtcccagctactcgggaggctgaggcaggagaatcgtttgaatccaggaggggaggttgcagtgagccgagattgcgccactgcactccagcctggcgacagagcgagactccgtctcaaaaaaaaaaaaaagaaaaaaagaaaaaaagaaaaaagtgttccctgtcctgggcagagaagctgtgggtagtgttctctcatttgagcagaagggggctgtgggaagggatccctcactgagcacagtctactgtgggaaaagttctcccacacactgtgggaaaagttctctcattctgagcagaaaaccgtgaggaggtatccttcctaccccgggatgaggggcttcatggcggggatcgcctacagtgggcatacagggctgtcggaaggatgtgcccacagttggcatagtgggtgtgaaggaaaagggtccagtgattcccgtgcttccagatttgtggaaagcttttccctact

SEQ ID NO: 7916 - DNA, 6000 bp, Homo sapiens
tcacacctgtaatcccaccactttgggaggccaaggcgggaggatcactcgaacccagcagttcaagaccagcctggggaacagaccaaggctccatctctacaaaaaacacgaaatatgagaaaatagccaggcatggtggtgcacacccctaggtcccaactactcaggaggctgaagtgggagtttcgcttgagcccaggagttcaaggcagcagtgagctatgatcatgcctctgtctcaaaaaaaaaaaaaaaaaaaaaaaaagggaaattgggaaattgtggcttagagaagtgaggtcatcccaccaggaagtggtagcagcacagcacacagctccgcatgaccctcaaacctgagttttctcttcactgagagatgccccctacccaccccagacccatttcataggtggcaaagccggggattgatggagtgaagccatctgcccagggtcacccagaagcaagtggctgagctgggtctcaagcctgcttggaccaacaccccaactgtctatttccccacctcatgtacattccgatctagtttagttttcacaccagcccaagagggatccccttctccagctgagaaaactgaggctcagaaagaagaatgtcattggcccagggtgacccagccagggaagtgcccacttcagcagctgacgcgtgataactgttgacgtcagactcaatgacaggcctccatctcccttcctactccaggaagaggtgaatgtccagagttgcaacaatgataatactggcagctatcgcttttattgagcacatactatgtaccaggcactgtggcaagcatcttaggagcattcttctttttgtttgtttgtttgtttgttttagatggagtctagctctgtcgcacaggctggagtggagtggtgcgatctcggctcactgcaatctctgcctcccaggttcaagcaattctcgtgcctcagcctcctgcgtagctgggactacaggtgcatgccaccacacctagctaatttttttgtattttttagtagagacagggttttgccatggtggccaggctggtcttgaactcctgacctcaagtgatccacctgccttggtctcccaaagcactggtattatagacatgagccaccatgctcagtcattttaggtggattcttttacctccgcagtacaccagccctgggagggtgatacttgctatctctactttccagataaggggcttgggcacagagatagattaagtaacctgctagaggtgacacagccaatatgtagatgcaatttagattttcacaatctgagaccagctcccacactcttaaccattgggctatactacctcttaggaaattctctgggagttcttttttttttttttttcagtctcacttttgttgcccaggctcgagttcagtagctcgattttggctcactgcagcctcaaacccctggggctcaagtgatcctcccacctcaaccagagagtagctgagaccacaagtgtgcaccacgacacctggctaatttttctatttttcatagagacaaggtctcgctatgttgtccaggctgtaattttatttttttatagatacaaggtcttactatgttgcccagggtggtctcgaacccctgagctcaagcaatcctccagccttcgcctcccaaagtgctgagattataggcatgaaccactgtgctcaccattgggagtttttttgttttttgttttctaaccttatcttaaaatcattagcttacagcttcaatgagttagtaagaatcacatagtacaggctggaagcggtagctcatgtctgtaatttcagcaatttgggaggccaaggtgggtggatcacctgtagtcaggagttagagaccagcctggcagacatggtgaaaccccatctctactaacaatacaaaaattagggccgggtgcggtggctcacccctgtaatcccagcactttgggaggctgaggcaggttgatcatctgaagtcaggagttcgagaccagcctagccgacatggcgaaaccccatctctactaagaatacaaaaattagggctgggcgcagtggttcaagcctgtaatcccagcattttgggaggctgaggcgggtggatcacctgaagtcaggagttcaagaccagtctggccagcatggtgaaaccccatctctactaaaaatgcaaaaaattcgccaggcatggtggagaatgcctgtaatctcagctactcaggaggctgaggcaggagaacctcttgaacctgggaggcagaagttgcagtgagccgagaccgtgccattgcactccagcctgggtaacaagaaagaaactccgactcaaaaaaaaaaaaaaaatagccaggcatgcatgagaatcccttgaacctgggaggtggaagttgcagtgagccgagaccacgccattgcatccagcctgggagacaaagtgagactctgtctcaaaaacaacaacaacaacgacaacaaatcacatagtataatcattattacagcagtagaagtagctaccacttactcatcccctacgactctcttcctctcctaatctgttccagccacactgacatctcttctgttcctagaatctcatcaggcttccacctcaaggcctttgcactggttgttcctgctccttggaaaggttccctgcccatctgccctacttcttccctcactgcattcagcctctgcttgaatgccacttgctcagggaacccctcctggatcacccacctaaaacagctcacacctcatttgcacccagatacttccttcagcctgctttgttttctccagtttgcttatccctctcagacagtgaaagattagataacacatatctgctccccactgtcaacacaacaaaaggtgggaactttgctttgcgtcctgctgtgcccctagctcctggaccagtgcccagcacaaagtaggtccttggtagatgttaaaggaatgtgttgagccctccatttcggccagcagctattccaggcattgcacctacattaaattgctctgtttagttagatgcatcctaagacggggagacaattttatctttagtattttattttacttaaaaaaaaaaaaaacttggccaggtgcagtggctcatgcctgtaatcccagcactttggaaggacaaggcaggtggatcacctgaggtcaggagttcgagaccaccctgaccaacatggtgaaaccccatctctactaaaaatacaaaaattagccgggtgtgctggcgtgcccctgtaatcccagttactcaggaggctgaggcaggagaattgcatgaacccaggaggcggagattgcagtggccgagattgcaccactgcactctagcctgggtgacagagtgagacttcgtctcaataaataaataaataaataataaaaagaaagaaaaaacttattataagccttttcaaacccacagaaaaggagacagaatggcataatatgcccttatatactgattacctttatataattgatacaaccatttggctattttgcctttattttctactcaagtatttatttatttattatttttttgagacagggtctcgctctgttgcccaggttggagtgcagtggtgcaatcatagctcactgcagcttccagttcccaggttcaagcggtcctcccaccttagcctcccaactacctaggactacaagtacgggccactgcacccagctaattttattttatttttaatttcttttggaaagatgagggctctttatgtttcccaagctgatcttgaactcctggccccaagtgatcctcctgccttggcttcccaaagcattggtgttacaggcatgagccacctcatctgacctcttctaaaatattataaaataaatacagacatcaaaatgaaaacaaaagaaaaagaaaaaacaaaacaaaaatccccaaaacaacaacaacaaaaaatgcagacatcaataacattcaccactaaatactctagtaagcatctgcaaaaacaaacaaacaaacaaaaaccagaatcccacctaagcatacagccattgtcgtaacagtgatatctacttttttggctgaagtgtctttttttttttttttttttttttctgtgagaaggagtcttgttctgttgccaggctggagtgcagtggcacgatctcggctcactgcaacccaacctccgcctcccgggttcaagcgattctcctgcctcagcctcctaagtaacacacacacgccactacgcccggctaatttttgtatttttagtagagacggggtttcaccattaagtgttttaatgtaggtgcaatgcctggaatagctgctggccaaaatggagggctcaacacattcctttaacatttaccaaggacctacttcgtgctgggcactggtccaggagctgggggcacagcgggaagcaaagcaagggttaagtgttttaagtgtttaagagatgcatatttcaggatgcatctctagataaggacattttccaaaataccagtatccctcctgacaaaactaacaaaaatcctgttagccaaataatcagccacattcatatttaccgtcaaagtttttatcctcattttacagcagtggagagcgattgccccgggtcccacgttaggaagagagagaactgggatttgcacccaggcaatctggggacagagctgtgatcacaactccatgagtcagggccgagccagccccttcaccaccagccggccgcgccccgggaagggaagtttgtggcggaggaggttcgtacgggaggagggggaggcgcccacgcatctggggctgactcgctctttcgcaaaacgtctgggaggagtccctggggccacaaaactgcctccttcctgaggccagaaggagagaagacgtgcagggaccccgcgcacaggagctgccctcgcgacatgggtcacccgccgctgctgccgctgctgctgctgctccacacctgcgtcccaggtaggggctgggtcccgaacgcctgcgcctggaacagggtctaattgagggggttgggggttgtcagaggatgagttggaggaatgcggttcagtcctcagcatcctccctaatcaaataatagtaattctcgtgctttgtgcaacgccacgcggcgcagtacctggcactcagtagctaaggaaatattagtggagcaaaggcatttagctttacataatttagtgagtgcttttttttttttttttttttttttgacagagtctcactctgtcgcccaggctggagtgcagtggcgcgatctcggctcactgcaacctctgccgcccgggttcaagcgattctcctgcctcagcctcctgggtagctgggattacaggcgcctgccatcgcgcccggctaatttctgtatttttagtggagaccgggtttcactctgttagccaggatggtctcaatctcctgacctcagatgatccacctgcctcggcctcccaaactgctgggattacaggcgtgagccaccgcgcccggcccaagtgttctttttttaaatggagttcttcgaagcctcttccttgcaatttcaaactaggcgatgggactttattaatttcgtttcgcagaggaaactagggcacagagaggttagataactggcctaaaatcacacagccagtgcttgaatacgcaggatctgaccctgcagcgccccccagcgctctccacgctgctgggtctccccctctgagaaacggggggacaggacccccttttacaaaaggcccaaagggaggctgactgagcggcgcagagccagtgctggagacccgggactgtccctcaggacctttccctctcactgaggcgactctcacttacttccccggaaaatgtggggggctctgggtcgaggaattcgagaaggaactgagtcagggcggg

SEQ ID NO: 7917 - DNA, 6000 bp, Homo sapiens
cctggacttctatctacagaactgcaaaaggataaacttatgttgttttaagctgccaagtctggaggcatttattgtggcagcagatagaaaactcagttatttaaatgcaggaggcagggaatggctccttgggactctgcctgcattttttttttttcagaagtgaattaattcttagaaacctccaaatgtatgtacattttgccctctcacctccttcaagtcgttgcttaaaactccatggggctacccagactgcctgctttagcattgaatcctgcgtgcccactctggcactctgacgctgcctgccctcatcccccatggcacacatcactttccaacatcatagatagtttagtaattttccacttatttattcatttatttatattagagacaaaatcccagctactctgtcacccaggctggagtgcagtggcatgattatagctcactgcagcctcaaactcctgggctcaagtgatcctcctgcctcatcctccctagtagctgggagtacaggcacacatcaccatacccagctaactttttgatcttgtgttgaaatgggttctccttatgttgcccaggctggtcttgaactcctgggttcaagcaattctcccacctcaacctcccaaagtgctgggattacagtcatgagccactgtgcctggccacatttcctaattattatttttttatttttaatgtttctgcattcttaaattttttaaaagcatttatttatttactttgaggtgagatcctgctatgttgcccaggctggtcttaaactccaggcagtgatcctcctgcctcagccttctgagtagctgggagtacaggcacacaccaccatacccagctaactttgatcttatgtagagatggggatctccctatgttgtccaggctggtcttgaactcctgggctcaagtgattcttccacctcagcttcccaaagtgctgggattacaggcatgagccactgtggctggctacgttttctaattttttaaaaaaaaaattaattttaatattttcatgtttttaaatgtttaaaaaagcacatttatttatttactttgagatgggatcttgctacattgcccaggctggtcttaaactcctgggttcaagtgatcctcctgcctcagcctcccgaaatgtcgagattacaggcatgagccactgtgcccagccggttattttccacgtatctcaattattatctgtctccctcctcccctcccagcactcattacatgtcatttctataaaggcagagatctctgtttgtttcatttgctggcgtgccctgatacctgaaacagtgcctggcacatagtagggccatacaaatctttgctgagtgaatggcctcagtgagggcacagtcatagggcagcatcctgggctgggaggtcagtcccatgggaagacacaattttgagccagcctgcatggctgagacctggtaggtaagggtgggaagtggagaggacctggtttattttcacctgttggaaataattggaagttgtgctacagggaggggcccagaaagtccctttctttccttggggcagcaaaaaacagaatctgccctgggggctgagtgggtgagttggtgggaatttcaggagaggaaaccctgcttttgcatgaaggggcagatttgggaagtccattccagcagcagctctgttgtcttggatggggaggaggggaagaggggagagtgcctcagggcagaggtggtggggagggaagctggcttaggagaaggtgggtggtcagaaggttcagacattctgggaagaacgaggtgggtggcagaggccttgaatgctgggctggtctgggtcaggcgccttcagtacagggacccatagagtctgaaggcgtggcggggtgatgtggccacattggtgttcattgatctgggtgtacagaaaggtgtggctggggaatagcgaagggcccttggaaaaaggcacacgcacatggaggttgagggccagggcctgagatgtcctgtgactttatccaagtcatctcacctctgtgagcttcagtgtttttaactatgggatggaataatcatattccttaccccactcttttttttttctccttcctttcttccttccttccttccctccctccctcctttctttcttttctctttctttctttctttctttctttctttctttctttctttctttctttctttctttctttctttcctttctttctctttctttctttctttttcttttttttttttcagagtcttgctccatcacccaggctggagtgcagcggtgcgatcatggctcactgcagcctcgaactcccagacccaagcaatcctccctcttcagcctcctgagtagctgcaaccacagatacgcaccactatgcctattttttttattttaatttttttgtagagaggggtgcccaggctggtctcaaactcctgggctcaagcaatcatcccaccttggcctcccaaagtgttggatttatgggcatgagccactgcacctggcctcgtctgatggtctcattacctgctatgtccccagcacctagaacaggcacagtagacactcacgaaatatatgttgagtggctctcggtcagttcgggctgctagaacagaccacagaatgggtgatttgtaaagaacagaaagctatttcatgcagttctggaggctggaaggcctatatgagggtggtagctttgtcaggttctggtgggggctctcttcttgggtgacagactgctgtcttcttgttgcattccccacgtggtggaaagtgaacaagagagctctctgaggtcccttttataagagcactaatcccattgggagggacctgattacctcccaaagtttctgcctcctaaaaccatcacgtgcaggatcaggatttcttcaacatctgaatgacagagagacaaacattcagtccacagcagtaacagagtgaatgaatgcgtaccccctcacagggctgcagtgagattatgatgcagggcagtcatgacatccagtgggaattcacatttgttgatggcttacgctgtgccaggcattgctctgagcactttcctggcactcactcattcgatcctcacaaccgtcttgtgcggggagtctgtgatttctcccagtctgcagatggagcacacggaagcatgcaagggtgacaaatttttcccaatgaaccatggctgggatgtaaaggactgtcttgccagcccaggcagccagctagcctagtgcttgtaaatggtgccacaagcaagggtgacagatggcctggcacactgaggtcaagtgctcataaccacagagcttcctaggagacaaaagcatcatcatctactctgctttattattttattttaattgagatggggtctcactatgttgcccaggctggtcttgaactcctgggctcaagtgatcctcccaccttagcctcccaaagtgctgggattacagatgtgagccagtgtgcctgggcatcatctccattttagagctgaggaaagtagtccctagagaggggagctgacctgctgaggccacccagttagcaagtcggggagtcaggatttgaacccatgcactctggctccagagccagctggctcggccttatgctttatcagggcagatactttgtgactgcctgtagcaggagcaagacggaagcagggcagcaaaacgaggcagctgagtgagtcacgatctctttcttgcaatgccaagctgcccctcataccctaagtaacagttccagagttttctaagccgcctgttgaatcatccatcctctctcacttcctctattctagacccacctgaccttccttctgtgccccaatttcaaaaacttttcacatgctgctccccctggctcacccctatgttgttcaggtctcagctaccatgtcccctcttccaggaagctctccctgatcctgaagctgagccaggcgccccctttgaattcctccatcccagccctgcccactctgggttgtcactgtctggggacagttctgtctcccccactggactgtgagcctctgtgagaacagggttggggctgtcttagtcagagctgtgtccccagtaccaccaggagcaggggtcagcataggagagaattcaggactgggcgcgacggctcacgtctgtaatcccagcacttcgggaggctgaggcgggcggattgcttgagctcatgagttgaagaccagcctgggctacgtggtgaaattccgtctctactaaaaatacaaaaattagctgggtgtggaggcgcacgcctgtagttgcagctactaggcaggctgaggcaggagaattacttgagcctgggaggtggaggttgcagggaggggaaatcatgccactgcactccagcctgggcaacagagcaagactccatctcaaaaaaaaaaaaaggaagagaattcaggaagtatttgttaaattaatggatggatacatggattaatgatagttccctcagctggtcggttctgttaaatcttctgggtctaggtctatacactgtcaaagaccaccagcttgtcttgtcatagagatttttttttaagtaacttttatatatggaacctttactatgttctcgaagtttcagctcagatgtccactcctccaggaggccctccctgccccttctcccaagaccacgtcaggctcctcctggaggtcccccagtcctgctcagtctgagattcctgccggtctgactccagagcttttgtttatgaccaggatctatatcacaagcatgattccggctcatttaatatttattggctgcttataatgaacttggcactgggactggttattaagctctcggggacaaggagctggtcattgttgttttttattatcattgctattgactatcgtaatcgcagttcccggtctccagggttcctggacttcccgctctttgtgctgggcagggaaggaaagtgagccctgggggtagagggcagaggtggggtcaaagttactttcctgccaccacccctgtctgtcctgggagctgcagttactgcagtgtgtgtgtgagtttgtagcagggtgggagaggagagaagggaggtggaggggctgcacctggagtgaggactgtatctgtgtgtgcaagccggggcgacagacggcctggcacactgaagtcaggtgccgggacccatggggcctgctgactcatggggacaccactggatgggaatcctgctttcaggtgagtgccctgcttccttcagatgcgggaggagggaggttgtatgcatctatttgtcagcggtgtgtgtgtgtgtgtgtgtgtgtgtgtgtgtgtgtgtgcactcgaggaaaaagagatggaggcagagaaaaaaaatagagacacagagacagagacagaaataaagacagatacagatataaagatagggccaggcgtggtggctcacatctgtaatcccagcactttgggaggccgaggtgggtggatcacttgaggccaggagtttgagaccagcctggccaacatggcaaacccccgtctctactaaaaatacaaaaattagctgggtgtggtggtacactcctatagtcccagctatttgggaggctgaggtaggagaatcacttgaaccttgaactcggaggtggaagctgcagtgagctgagatgacaccatagcactctagtttgagtgacacagcaagaccctgtctcaaaaaaaaaaaaaaaaaaaaaaaagaaagaaagagagaaatacagaaataaacatagatacaaaagagatagaaggagacataaacagagaccagagacagagagacaaagatatatgtatatttgtcagtggtgtgtgtgtgtgtgtgtatacttgaggaaagagtgacagaggcagagagagaaacag

SEQ ID NO: 7918 - DNA, 6000 bp, Homo sapiens
gtctcctggcacctcttccttttcctttgagggaccaccatatcccatctcacaatccattaaggtttgaatggagtggaccccaaccccaagtgcgaccccagcctggccaatcagacacagtgactggtcagcatgtgacctggtgtggccaatgagaaccagcccccaaagaccactgctgcaactccggggaaattggcaaactttctccactggggaggacaggctgctggggtgtaagcctggagctgcaagtctccgctaccttaggaggagaccctgaaaggtaatgaagccaactcggagaaaataaaaagagaccattcatgatgacatcatctgacaactagatgcagccatgccttaagactctaaactcttcaattacatggcccagtaaattccctgttttgttttcccagcttgaattgggcttccatctctcacgactcaaagaaaactgacaaatacctccttcagctactgagaaattgtcaacaatcctccctcatcaacatgataatcaccaaactcccacctctgccatgcaaaggccttggggctctaaacccagcttcctccctcccatttcttccctgatgccactccatgccttggtccaccactatacatctttggatatctccaaattctccttagctatctgggccccattacagcttctcttgtctaagacctggatcatactcatgtatgtcctgatggtatctgctgtgcgtctaggccttagaattggtcattagcattccctgaatgtttccatcttattcttggatgtgggaagcacttgggctgatggggcactgcagagcgttgccggctcacatttcttggaggggaatcacagtctcttctctgcatctgcgtctccctcctcatgccttgcacaatgcttcagggctgggagtaggaatgtattaatatagcaagctggctgggttgcagtggctcccgcctgtaatcccagcactttgggaggccaaagcaggaggatcccttgagcccaggagtttgagaccagcctgggcaacatagtgagacccagtctaaaaaaaaagagagagagaaaagaaaggaaggaagaaaagaaaaaaagagaaagaaagaagagaaaagaggaataaaatatatcaggcaaatcccttatcctcactggcttcaatttccctgtcactaagaggggtgggcgggggggcgtcccctcctaagagaaacactggagaacacaggatccttacctctccgcactcttctgagacctggcagatctgagaataaacttcagcaatgacagtggccctggagagcacaggaaggccctcaggaggggactctcctccttccaccccaccctcattccaccccacccttcctcaccccaactcacttgcagtccagccctcccccaggaggtaaatctgggatgtcctctgaggccagagtcctgaaaactgtgttcaggctggggggcttctgagcagaggcacacagttctgagaaagagtcaagagttaggctgggcacagtggcgcacgcctgtaatcccagcactttgggagaccaaggcgggcggatcacttgaggccaggggttcgagaccagcctggacaacatcgtgaaaccccgtctatactaacaatacaaaaattagctgggtgtgattgtgcatgcctgtaatcccagctactcaggaggctgaggcaggagaatcgcttgaacccggaaggcagaggttgcagtgagccaagatcacgccactgcactccagcctaggagacagagcaagactccatctcaaaaaaaaaaagaaaaaaagaaaaagttatggcacagccttcactggccaaccacccctccagctgggcccccagagtctgctcaccagcgattctgcagcccagggctgcgtccagtgctagctccctcctgatcgcctcctcagaaggcctaggggccccagggaagcagaccaggatgcaggtcatgttgtccaggctgccctgaagccggtggagaaaaaggagcccggtgggggagagtccaaggcagagcttcccaacaatccccaggttcaagtcccccacttcattctacttatgcccatttctttcgcgtcccacccacctgccaatcctctcttactgggaccaaacccggtcctaggcgctcccaattgagagaacaatgccttttccctaaagctccgcccgctctgatgtttacctgctcttccaccttccagcactaatcaatacttccggcccggctcctacgacccagaatcgcccctttccaaaagaccacgccctttctcttaagtcccttccactaactctcccgtgcctcaaagcatccctcaggctccgcccctgtattttggccctgcccacttcaggccacgcccttcgcttgagtcctatcccctcctttgctagctttactcttgcctctctatcaaagccctcctccccaaaaccccgaggctctctccctctgctgcaccaagccccaaaggtaccacgccacgcccccaggaccttgcacagacacgtgtccaacagctgcgcgcagagaagctctggggccaggcccaagcggaggcgtgaagccaccagtcccgccagggcagcaccagacacagtgtcccagacgccatcagaggccaggagcatgaactcgtcctcagcctggcgtgccagtgcggccacctctggctccgcagaaacgagctgtagctcggggggcctccccggagcctccttgtaggtaaagtcgcccaacgctcgcgacacggccagagagccctcgacgcggcggcggcggatggtgccgccagcggcgtggatgcgctcgcgttcccggggtcgaaggggccggtggtcctctgtgctgaaggccacggcgccagcgcggctcagcaccgcgcgggagtcaccgcagtgcgccaggtacagaaaccgcggggagaccagcaacaccacggccgtgcagccgcccgtttccacgcggggccagagggagcgcaggcgctcgtcggcgctcaagaaggctcggcgcagcgcctcgcgcacgccctcgggctcgctaggctccgggcccagctcctggagcacatggcctggcaaatggcgtgcaccgaagcgggcagctcgagccccaccgtggccgtcgaggacggcaaacaaggcccagcccgggggcagaccaggtaacgaaagccaagtgcagtgagcatcctccatgcgcgcgcgccagccttgcgctgcgctcgccccgaagcgcaggcccccagacgcctcggcacccccgtgcggccgctgggcgcggcgcggcgctgtcaacagagaccgaggcccttcgggggccctgcgccccgcctcctcctcctcctcttcctccctcccctccttctccctctcctttttcttgcaagcggtccagaggagacgctgcagctggcgggccaggaccgccatccttcagccctgggatcaggaaggctccaccctgtacacctgcccgccccctccattaatcccctccgctgtgagattttaaaccatctaaatctccttcctgtcctttgacctgctctttaggcgggtcactagaaggaattacacttctgggtctcctgtttcctgcacctacaaagcggggtttgggatctgaatcaggaaaaaaaaagaaaaaagataatactgtaccagtggcaaactattacatagtactaatgtgtcacacactgttatacatcatcatctccagtttacatatggaagaagaaacagagtcacagaagtaaccggtgttccagggaaactaattctagaatctgtgttctcaacacaacactcagtccaagctcctcccacctcagtggtacagcccccagcctcaaaacctgtaaataccatacttggccgggcgcggtggctcacgcctataaccccagcacttagggaggccgaggcaggcggatcgcttaagcccaggagtttgagaccagcctgggaaacatagcgagaccccgtctctacaaaaattaacatttagccaggcgcggtggaacacacctgtgatcccagctactcaggaggcttaggtgggaggatcacctgagcccgggaggtcgaggctgcagtgagccgtgatcgtatcactgcactccagcctgggcaacagagcgagaccctgtctcaaaaagatatatatatatatatatatatatatatatatatatatatatacatattttttttttctttactgtttttagttcgacccctcccctctggggcttcgcttattttctcttccaggccccgcccatccaggattcaggcacacagctccagacccttctaattttcgcagacctggaatcgcctggaatccgaccccacccagttatatttgaataattccctgttgctttagccctgcccacgtttgagctcctccgcgtgccccaaaagtttctgaatcgtttcattcggccccctttctcgctccctctgcaaatctaggctcggaccctacctcagagcattagaatctttccaccccctcctcaatggcaccccgagcaccaccccaacccacccagggatccacgctctcatcctctctgccgtggctcgttcaccatcctctcccaagtccctcgccagactccaggcctccttccctcttcccctaaaggctgcgccctctgcgatctaggccccgcccttcaggccgctttcccctccttcctggctccgtagcccaccctcttggttccgcccctttagtaagaaggccacgcccctccgcctgatcctcggcgtttccccgcccctcaccctccctctggtaccgccccgcccgtcttctggccccgcccccggccgcgcgctgcagtgccttccccacctcggccccgcccgcccccgccgagccgagcaccagggcggcggcggcggcggcggcggcggcggcggctggagcagcccgggaggaggaggcggcgagaatggcagcggcgtcgtgggcgcggcggagatgagcgcccgcgaccccgggcccagggcggcacagccggagtgggcgggggtcccgatgcaggcccgaggggggccatggggcaggtcctgccggtcttcgcccactgcagtgagtagaggaagactggggcctggtgtgggccccagaggttcaggtggggtactccccggtgtcccctcggcgcttgcccgcaggagagccgggatggggggaggaggcataggagacaaaggaagctctcccctcccccgcgctctggcggcgacgggggtagcctgacccggaggacctggacgaaacagggcggaggtgagggggcactgagacagcaggcggggggcgcgctgcgctctgggacgtaccgcccggccccgcccgggagcgaggacgcgcgcggggagctgtcccctggctctggtgctggccgcagctggcggggagggggttgaacggagggtagagccaggatggaaaacaggggtctggctcccaatcacttgccttcgcatcccatccccgttttctgtccaagaggcagccccgacctcgcccaaactgtccaaccctgtcccgggaaaacagccatccgtggtttgggggcaaggactcatgggttcttagcggtctttaccactggttaatggtaatcctggggaagacccacaccattccaggcctcctattccccagctgaggaaacgaggtgagggcacagggcgtcagatttcaatttccaaaccgcattgagcatcatctatgtgcaaagctctgaactagctctaaggggctggattcccagctgaaaacgcctagcctcacaatctctgagctcacagctataacagtccatgtctaccgttctctgtcccacacatgggggttctgacagctggggatttcaacacccttagatctagccatttccat

SEQ ID NO: 7919 - DNA, 6000 bp, Homo sapiens
ctctggctctggatgctggaaccagccaaggcgagacaggtctgggacacacatagcagtttctcaaagcagtgagagggcacagcaggcagacgggaggcctggcaggcacgagcagctggtggtgcgtgtgtgcagaacatgagataaggcccacttcctcccagggccagagccaggaggacggaaaccagggagtccggagagggtcaggcccagggcaagccaggatcttaggtctgcggcacttccagatgcaggcctgggctgggcgtgatgggtcaagcctgtaatcccagcactttgtgaggccaagttgggcggatcacttgaggtcatgagttcgagaccagcctggccaacatggcgaaatcccgcctctactaaaaatacaaaaattagtcaggcatggtggcgggcacctgaagtcccagctactcaggaggctgaggcaggagcatcgcttgagctcgggaggtggaggttgcagtgagctgagatctcgccactgcactccagcctgggcgacagagcgagattccatctcagaacaacaacaacaaaaaaaaacagatgcaggcacccctgctcaggatccccacactgggtggacaaacctgtttgagaacactcttcctgggctgtgccctctgagcccctctgtgtccccagctcttagcacacagtaaactgctggttacggtttgttgaatgaataatatcaacagctatttgagggcttcctgggaggcaggcagggggaactgtctcttatcttcacataacaccccaacaaggtcaaggcagccatttgacgaagaacatcaaagctttgctaggggaagtcattttctcaggtcacatggtgactgactggtgagtggtggagatgaacttcaaaacccatcctcagccaggcgcggtggctcacgcctgtaatctcagcactttgggaggccaaggcaggcagatcacttgaggtcaggagttcaagaccagcttggccaacatggcgaaatcccatctctactaaaaatacaaaaattagctgagcatggtggctcgcacctgtagtcccagcaacttgggagactgaggcaggagaatcgcttgaacctgggaggcagaggttacagtgagcggagatggcaccactgcactccagcctgggcaacagagtgagactccatctcaaacaaacaaacaaacaaacaaacaaaaaaaccaaaaaccattctcggccaggtgccatggttcatgccagtaatcccagtgcgttgggaggccaaggtgggaggatcacttgagcccatgaatttgagaccagcctggacaacatagtgggatcctatctctacaaaacaataaaagtattagctgggcatggtggtgagcacttgtggtcccagctatctgggaggctgaggtgggaagattgcttaagcctgggaggtagaggttgcagtgagctgagatcgtgccactgcactccagcctgggtgacagagtgaaaccctgtctcaaaaaaactaggttgcgcacggtggctcacacctgtaatcccagaactttgggaggctgaggccggcggatcacctgagatcaggagtttgagaccagcctggccaacatagtgaaatcccatctgtactaaaatacaaaaattagctgggcgtggtggcaggtgcctgtaatcccagctactcgggaggctgaggcaggagaatcacttgaacctgggaggtggaggttgtggtgagccgagatggcaccactgcactccagcctgggcaaaagagcaagactccatctcaaaaacaaaacaaaactacaacatagctgtgtgcccatgtgcacacagagtcccacgagctcacaatacacatatacacacaatacacacgcaaacacaatcaatgctgagaaaaatgctcacttaggtcacatgggccgcactaactctacagagagtcacaatccggttacacacccacagtccccagcacactagcctcaatctctctcccctcccgggtgctgtgtgtgcgtccctaatctcagtggtctctgagctgtccttcctctttttccctgctgcttcagggtccccctcagggaggcctggtcctgttcctcgccatgggtggagagagtgtgagatggaggctacggacccacgcccccagggcagttccttccatagctccgcccaccctggaagctgcccctggcacaacgcaccgtgggtgatttctcaccccaaggcacctggctggggagtggaacccccgtgtggaccctgctgtgggcttggcccggctagctggggccacggccaagcaggaggctgggtttcagggcaaggtgactgaggcatgtctggcgccagtacggactctggggaactcagtcccctcattaggagggagtcacagtcactgccacccctacctgctcctgatgcaggaacacagaaccgatcctggggttgcgagggctcatgactcctagtggcatcggcggggaaactgaggcctgaggccaggcgtggtggcctataatcccagcactttgggaagccgaggtaggcagatcacttgagtccaggagtttgagaccagcctgggtgacacagtgaaaccctgtctttacaaaaatacaaaaattagctagcgtggcagtgggtgcctgtagtcccagctactcaggaggctgaggtgggaggatcgcttgaaccccagaggtagaggttgcagtgaaccgagattgcagcactacactccagcctgggtgacagagcaagaccctgtctcaaaaacaaacgaacagccaggcaaggtggttcacgcctgtaatcccagcactatgggaggccgaggcgggcggatcacctgaggtcaggcgttcaagaccagcctggccaacatggtgaaaccccacctctactaaaaatataaaaattgggcgcagtggcacatgcctgtaatcccagctactcgggaggctgaggcacgagagtcgcttgaacccgggaggcggaggttgcagtgagctgagatcatgccagtgtactccagcctgggtgacagagcaagattccatctcaaaacaaaaacaaacaagcaaaaagaaaaacaacaacaaaaaagaaactgaggcctggaagggacaagggtttgactgtggtcccactgggcatgggagcagaggggacttcctgaatgttaaccgtccttgtaacaggaagcgagagagggagtctccgggaaccagaggcccccccgatgccgaaacaagatgcacgcctgccaggcatcatccttcattaatatgatataacttcctgagttccctctggtctgtctggggacctcacggcatgaggcgggacaacgtggcaggacctggagcccacatgtacaggcacccccagagcagggctggggggtcccttagggagccacggtggggctggaacttgggcgtccatcctgctggaagctgcgggtgccagctgggcaagggtgatagggagatgggggggaggggcaaaggggttgtggtcacacaccggggtacagagggcaagacggcagctgcccacagtccagtccttgggttggacacatccctcctggccttggacaagagacacccgcacagcctctctccttgttacaaagaccaatctgggatgtgctgcaggccgaggctggccaccaggtccctgaggcccgtgttaccccacgcacagagaaggaggctgaagtctaccagctccctctcctcacctgggaccatctcgcagcaagaaaaaaggtggtcagatggaaacaggaagccaagtcgaatggatctgagaccgtccccctgagaaacagcggggctcagagagggtctctgaggttttatctggcccttttgggctgggaggctgcctgggaagccaccgactccgtgggaagggagacccgtgaacgctgtgcgggtagcgggaacatgtgggtctgtcacactggcccgaggctgcagcggtggtggcttggctgtgtttggggagggtgggggacacatggcagcaatgttggagctgtggacagcttcctgtgatcaaaatatgattcctgaaggtcaaggtcaccagagcttggcctggggcctaggggtgctgtgcgagaagtcggacggtggcccagtgctacctttccatcatgggccatggaagtctcccaagcctgtccctgacaactggacaccaaatacaccccttcatgctttcttctcgggtctctgcagggtgagctgggtgcccagggacaggctcgagggactggcatgtctctctctggccaagcctccttcctcagctttctggaaggagtgaattgtgtccagggaccagaactctcagtggtgtctggaaaacactacatcagagaggaatttcctggtcatttctcaatccctgggcaatgtcctcagccccggggcctggagcccagaatagatcccagaggccaccctgagacagcccaggccaagaccaccccactgaagcctggtcaactgtgctcttcaggtccctcctagaggccccctactaccccgggaggctccaagcctaagtgatggtgactcaggaattccccacccaggccagagagggagacactgggggagggaggagacctgtgtgtggggaggtggcaggtggctcagtgatgggaaccaagagaggatgtggggaggagagtggaggcagcgatgggagatggatgtcctggattgggcgggtggacggggagtggggagtgtgccagggggccctctggagaacagtgagggagggcggggcagagagaggaaatgaaaaagctggggtgagcaggcaagctgaggagggtgggaaggagggagggacggagggaggagggaaggagaagctgacacacagaccgacacaggcagcgagagacacgaggagcaaagcaagtgaaggcacagacgcacgggacaggagagcctgggcaagactggagaggtgcggtgaggggctggggatgcagcaacacagagcaggagcaggtagagggtgtggggttagagggagaaaggtacggggaggacaaggacaagggaggggacagagacagggagatatcagcaagagaccgagagacagggagggaaagaactggcaatgcccggatgttctctgtctctttaatggcagaaacagagctagagaaggaaagaaacaggaggtggtgggggggtggtgggtgtcaggcatggtggctcacacctgtaatctcagcactttgggaagccaaggtggatggatcacctgaggtcaggagttcgagaccagcctgaccaacatggtggaaccccgtctctactgaaaatacaaaaattagctgggcgtggtagtggacgcctgtaatctcatctactccagaggctggggcaggagaatcgcttgaacccaggaggtggaggttgcagtgagccgagatcatgccattgctctccatcctggacaacagagtgagactctgtctcaaaagaaacgaaagaaaagaaagagagaaagagaaacaggaaggtggggagagacagagagagatactggagaagccagaggggagaggactgcatacccgcacacacaggagaactgggggttggctgggaggccccagctgccaaaaggactggccagcagggacatctgagtgggctgggtggtgggggtagccctggctccctctgaccccccaccttgggaaccctccagcccagacctgggatggcggattcgtgcaggaacctcacctacgtgcggggctcggtggggccggccaccagcaccctgatgttcgtggccggtgtggtgggcaacgggctggccctgggcatcctgagcgcacggcgaccggcgcgcccctcggccttcgcggtgctggtgaccggactggcggccaccgacctgctggg

SEQ ID NO: 7920 - DNA, 6000 bp, Homo sapiens
tgagggaggccactggggctgttcagagagtaggggtggcccagttagatctgtgctttgaaatattccagactcttctgaagtctgggattttttttttttttttttttttagacagagtcttgctttattgcccaggctggagtgcagtggtgcaatcttggctcaccgtaacctctgccttctgggttcaagtgattctcctgcctcagcctccagaatagctgggattacaggcgtgtgccattagtcctggctattttttttactttttattttcagaagagacagggttttgccatgttggccaggctggtctggaattcctggtctccagcaatctacccgcattagtctcccaaagtgctgggattacaggcgtgagccaccatgcctggccagaagtctgggattttgcatgtgctattctctttgtctggaatattctttccctgggattggtccaactccttcatatcccagctccgatgcctcctcctccaggaagctctccctgacccccaagcctggtcaagcatcccttctgggctcccccatcccagccctgcccactctgtatcatcactatctgtgtccccccctgaactttgagtcccagcagaacggggccagaactgtcttgttcgccactgggtccctggtatcacccatcgcaggacccaacactgggctcagaatacatgactgtcccttgaaggaaatgtctagttggagacagccgagtgcaggggtagccagggtgtctgataggagatgcagacaaggatcagaaacatctgagttcagatttcttgcttatgcctggggtttgggccacagcaagcctcattacccttatctgcttccaaatcaggaaaatgggagtgtgagctggtctcctggattagtggggataaaaccatgtctgtgagcactgctaacagagatggaaacctctctgttgcctcagggcttcacacgcgtcctttgaatgtttccacattatgccatgggctccttcttatctttcagatctcagtgcagatgtcacttccttccagtggctgaactgttcactctgtcactcataggatgcttttgctttctcccaacgcttagttccagctgacagcccaagtttattgtcttgtctcttccgcactagaatgcacgctctagcagccaaggattttgtgtgtgtgtgtgtgtgtgtgtgtgtgtgtgtgatacagagtctggctctgttgcccaggctggagtgcaatggtgagatctcagctcactgcaacttctgcctcccaggttcaagcgattctcctgcctcagcctcccgagtatctgggattacaggcgtggaccaccacacccggctaattttttagtatttttagtagagatggggtttcaccatgtcggccaggctggttttgaactcctgacctcaagtgatccgcccgcctcggcctcccaaactgctgggattacaggtgtaagccactgcacccggccaagcccaagtttattgtcttgtctctctgcactagaatgcaagctctagcagccaaggaattttttgtttttttgtttttttttttgatacagagtctcactctgttgcccaggctggagtgcagtggtgtgatctccgctcactgcaacctctgacgcctgggttcaagcagttctcctgcctcagcctcccaagtagctgggactacagccgcccgccaccacgcccaactaatttttgtatttttagtagagacagggtttcaccatattggccaggatggtctccatctcctgacctcatgatctgcccacttaggcctcccaaagtgctgggattacaggcatgagacactgtgcctggcctattttcatgtttttgtatttttagtagagatggggtttcaccatgttggccaggctggtcttgaactcctgacctcaagtgatccacctgccttggcctcccatagtgatgggattacaggcgtgagccaccgctcccagcctaaatcttttttccctttagactgagtcttgctctgtcacctaagctggagtgcagtggtgagattacagctcactgtagccttgacctcctggctcaagcgatcctcccgcctcaccctcctaagtagctgggactattggcgcataccaccacactcagcttattttttaatttttttgtagagacggagtctcgccatgttgcccaggctggtctcaaattcctgggctcaagtgagcctcccaccttggcctcccaaagtgctgggattaagggtgtaagccactgtgaaattttttttttttttttttttgagacggagtctcgctctgtcgcccaggctggagtgcagtggcgtgatctcggctcactgcaagctccgcctcccgggttcacaccattctcctgcctcagcctcccgagtagctgggactacaggcgcccgccatcatgcctggctgattttttgtatttttagtagagacggggtttcaccgtgttagccaggatggtctcgatctcctgaccttgtgatccacccgcctcggcctcccaaagtgctgggattacaggcgtgagccaccatgcccggccgaaaaattttttaaaatatttatttatttattttgagacggagtctcactctgtcactaggctggagtgcagaggtgtgatcttggctcactgcaacctccacctcccgggttcaagcgattctcctgcctcagcctcctgagtagctgggactacaagtgcatgccaccatgcccaactaatttttgtatttttagtagagacagagtttcaccatattggccaggatggtctcgatctcctgacctcatgatctgcccactctggcctcccaaagtgctgagattacagacatgagccaccatgcctggcctattttcatgtttttaaagataaggtctcactatgttgccccggatggagtctagtggctaaatgtgggcacgatcatagctcactgcagccttgaactcctggcctcaagggatcctcctgctttagcctcccaaatacctgggactacaggtgcatgccactgaatccagcttgttcttcagtaataataacaataacagcaatcgcagcagtagtatttgactttcttctgaagggcatttttgttagaaacaaaagaagagagaaagaacaaaaaattttaaagcacaaataaataacttttttttttttgaggtggagtctcactctgtcacccaggctggagtgcagtggtgagatctcggctcttcgcaacctctgcctcctggattcaagcaattcttctgcctcagcctcctgagtagctgggattacaggcatgtgccaccacacccagctaatttttgcattttcagcagagacagggttttgccatgttggccaggctcgtctggaactcctgacctcaagtgatctgcccgcatcaactcccaaagtggtgggataacaggcgtgagccactgcgcccggccgtattatctcatttgaacccttgcaacactcaaggcggtatgacttattattattcccatttacacatatgaagactgagcctcatagaggttgtaaattacctgaggcctcacagctgctgtaggaggaagcttctgacattaccactacaatctttgagcaagcatgaaagcctgaaatgtcacagaacaggctagagatgggaaaggaatgaggatttcaacactgtcaggtggagtaaggaatcataattcattgttaacctcccaaacggccactaacagagaatttggggaggcagcagagtgggtgcggttaggggcttgggaggtgggcatgcacgtgtcatcctctctaggtgtggcctcaaggtgaatgacttcctctgcctctggggttcaagcgattctcctgcctcaggcttccagtagctgggattacaggcacgtgccaccacaccaggtaatttttgtatttttagtagagacgggtttcaccatgttggccaggctggtctcgacctcctgacctcaagtgatccgcccgcttcacctcccaaagtggtgggattacaggcttgagccacggctccctaaataaatacatcaattttatttaaatcttacagcaatcatatgagacaaaagcttttaacacctgcactttatattcgaggaattaaagttctcagaggcgactaaagaccaaactcagggctgaggagttccaaagctgagttgagttgcaaatgaatcaccgaggaccaccggagctttctagcgaccctcgcaccagggaacgaacccctgtggtttaagggctccaacccacaacccagttcctttggcgggaaacagcaccctcccaaggccccgccccttcctggccccgccccgtcgtctctgggcccggctcctggagatgggtattattaatctgccttctatgggggacctggcccatctcgggtatcagccccgcccctactcgtccagtctccgaacgctctgcagccaatcggcgcccgagggtcggtccccgccttctcaagccccgccccctacccttatccctggcagcttccgctaaacgggctcagagccacgcggcacgcccgggaggctttctctggctggtaaccgctactcccggacaccagaccaccgccttccgtacacaggggcccgcatcccaccctcccggacctaagagcctgggtcccctgtttccggaggtccgcttcccggcccccagattctggcatcccagccctcagtgtccaagacccaggcagcccgggtccccgcctcccggatccaggcgtccgggatctgcgccaccagaacctagcctcctgcagacctccgccatctgggggcactcaacctcctggagccaagggccccacgtcccacccagagaaactctcgtattcccagctcctagggccaaggaacccgggcgctccgaactcccagctttcggacatctggcacacggggcagagcagagaagcctcagcgcccagcctggggaatttaaacactccagcttccaagagccaaggaacttcagtgctgtgaactcacaactctaaggagccctccaaagttccagtctccaggtgctgttactcaactcagtcctaggaacgtcgggtcctgggaaggagcccaagcgctcccagccagcttccaggcgctaagaaaccccggtgcttcccatcatggtggccgatcctcctcgagactccaaggggctcgcagcggcggagcccaccgccaacgggggcctggcgctggcctccatcgaggaccaaggcgcggcagcaggcggctactgcggttcccgggaccaggtgcgccgctgccttcgagccaacctgcttgtgctgctgacagtggtggccgtggtggccggcgtggcgctgggactgggggtgtcgggggccgggggtgcgctggcgttgggcccggagcgcttgagcgccttcgtcttcccgggcgagctgctgctgcgtctgctgcggatgatcatcttgccgctggtggtgtgcagcttgatcggcggcgccgccagcctggaccccggcgcgctcggccgtctgggcgcctgggcgctgctctttttcctggtcaccacgctgctggcgtcggcgctcggagtgggcttggcgctggctctgcagccgggcgccgcctccgccgccatcaacgcctccgtgggagccgcgggcagtgccgaaaatgcccccagcaaggaggtgctcgattcgttcctggatcttgcgaggtcagctcccgctcccccgggaggtggggaagagtgttacggatggcgggagtggtcacgtggacaggacggggctttggggcccctggagcagagacttccctctagagtcttaggaaaactcgacaggatattgaggggaggctccagccctcgggagtgtgagtctagtctcctggggaagg

SEQ ID NO: 7921 - DNA, 6000 bp, Homo sapiens
gccacctatggacaggtgggacctgacagttggagccacacccaccggcctccctccactgtccccccatcaacctgtgtgacctgattcttcacccccgcaggaactgctgtgttataagtaccggggcccagagtcggggcttcctgaggcccagcacgggttccatctgctgtggcagcggagcttctccagtcccctgctggccatggctcacgtggacctgaccggggatgggctgcaggagcttgccgtggtctccctgaagggcgtgcacatcctgcaggtatccccagctcttggggtgggaggggagtcgacctcagcagtttcgagcagggggtgcaggcctcctcctgggggagggaggaactcatttcagggaggcagttcctaccagtcaggacaactcccaggagaaaggggcagctgtgagcgctcacagcagctggggtgggggcaccggcctggtgaaggagatttatttatttatttattattttatttttgagacagagtcttgctctgtcacccaggctctagcgcagtgactcgatctcagctcactgcaacctccacctcccaggttcaaacaattctcatgcctcagcctctcaagcagctgggaaatacagccgcacgccaccacgcccagctaatttttgtatttttagtagagacggagtttcaccatgttgcccaggttagtctcaaacttctggcctcaagtcatccgcccacctcggcctcccaaagtgctaggattacaggtgtgagccaccacaccctggcctttttttttttttttttggtttttttgtttgtttgtttgttttcgagacagagtcttgctctgtttcccaggctggagtgcagtttcccaggctggtgtgcagtggtgtgatctcagttcactgcaacctccaccttccaggttcaagtgattgtcctgcctcagcctccctagtagctgggatgacaggcacctgccaccaagcttggctaaattttatattccttttatattccttctaatctcacttccttacatttgggtctaggctttgtccctcccactagaaattcgcttaaggccactccccttcacccctgtcacagaggcccattcccatcccacacactgtggtctgctctctgccctcccacgtgggccgagctcctggcctttggagttgcttcactccagacggtcccgctgtggtcccacagctcttcctcagctccatccccctcattctcttgttccccacagcacagcctgattcaggcctcagagctggtcttgacccggcttcgacatcaagtggagcagaggagacgtcggctacaggggttggaggacggggcaggtgcagggcctgctgagaatgcagcctcttaagcacccatgcacccactcttcccagacctggggcgactcatggcgtgctcacctccagccgctggtggggggtgtcctgaaggacaggatgctctccccagacctccccagggtggtgaagctgtgccctggggccccagctaacccactcctctctctgtacgtcaatgtccctatttgaaagcagggatgatcccattccaccctgtccactctggatgagaattggccacctgatggttatttatacgtccagaagaacatcatttcccagttgtctcgattctttttttcggcaagcatttggtgagcacctgctgtatgcctggctctgtgttggatgctggattcacccagaggaattgagggagagggatttgggggagagggaatccaaggctagacccagatacaggccggaggttagatcccagggtagaacccaagagaaagaaatggggtgacaccttagcagaaaggctaaaagttaaaccactgtggaacagattacgtaaaatggaagggaaagagctgaggttagaccctagtggagagagctgacatgagaccccagtggaaagatctagatctaagggtagatcccagtggaaaggtaaggagcttgagcgtttagaggaaaacttgtgggtagaaagggctgctgtgggaaagcagtggtccatttgtagcagagggtctgaggctagactccctatgaataatgctgaggttggaccccaacaaaaaattgctatggccagatcctgtgcaaggggccagggttaaaccccagcagaaagtgagcttagttcccagtggagagcactgaggcaagacccagggagaagacccaggctagaccatgctggaaagggctaagcttagacctaatctaaaaagcctagggggttgggggcccagggagtgggagacaagcctgattctcccagcctgtggtggtaggagttgccttgcctgtggtcttttgtgtgtgtgtgagagacggagtctcattctgatgcactggttggagtgcagtggcgcgatctcggctcactgcaacctccacctcctggttcaagcgattctcctgcctcggcctcctgagtagctgggattacaagcgtacgccaccacgcctggctaatttttttgtatttttagtagagacagggtttcaccgtgttggccaggctggtctcaaactcctgacctcaggtgatctgcccgcctcggcctcccaaagtgctgggatgacaggcgtgagtcactgagcccggcctcctgtgctccgttctgtattaccaggagaaggaatcagaggcctgtgtctctaggatcagtggagggtgggaacgatggaagtcttgtcctccgtccactgcaggccaggaatagaatctgggtcagcagggttgggggatgatcattccctgggccgtatccaggctgggggcaggggttgggcaggacatctgcttcctgggggttcaggggagaggcagacaccgtagtcattttggccatctgtctacctcccgctatggaggtccactcagaagtctgaccaccagcactgacagggaagacccagccaccagttctctaccgagcgtttatgggagttaggagctcagcaactcctggccacccctgtcttcaccctctttcccagaagccaggcccaggcgtgggaagttggaggaagccggatcctctccctcccctggccagcaggcctgacggtgtccagccaggactggcagtgggcaggaccggtggcacgagcaaggccccctccctcccactgtccgcctctagagaaggagcactccacaccgactaacacgccatcaccccctgttgtgggggggagcaggattgggggtgggtgtagtgctggtgtgccttgcagaggtgtgtgcttgcgtgggggtatgtgtgtgggcccatcgcagggtgcatgagtttgtgtcttcaggagcccaggccacctgcctggccctttgcagttcatttctttcttttttttttttttttttggagatggagtctcactctgtcacccaggctagagtgcggtggcatgatctcagctcactgcagcctccacctcccaggttcaagcgatttctcctgcctcagcctcccaagtagctgggattacaggcgtgtgccacctggcctggctaatttttgtatttttagaagagacagggtttcgccatgttggccaggctggtctccaactcctgacgtcaagtgatctgctcgcctcagcctcctaaagtgctgggattacaggcgtgagccaccgcacccagcctgcaagtctcttcttgacctgacccgtcctcagcctggggaattgtgcggtgcagcagttaagggtgtagaatctggagccatatttaccacctcatgccttggtttccctgtctgtaagtgaagctcataatagcatttacctaaatttataaaaaacattagaacatgccaggtgcggtggctctcacctgtgcggtggctctcacctgtaatctcagcgctttgggaggccgaggcagaaggattgcttaagcccgggagttggagactagcctaggtaaaatagtgagaccccgtctcttaaaaaaaatgaagagaaaaaaagcctggcgtggtggtggtgggcacctgtagtcccagctactcgggaggccaaggcagaaggatcgcttgagcccaggagttggagaccagcctgggtaacatggtgagatcccatctcctaaaaaaaaaaaatggagggaaaaagcctggcgtggtggtggcgggcacctgtagtcccagctactcaggaggctgaggcaggaggattgcttgagcccaggaggttgaggctgcagtaagccaagatcgtgccactgcactccagcctgggtgacagagtgagaccctgtctcaaataataataatgtgctgccgatgccaggcacgtggtcagggctgcctgtatgtatggcagctgttgttattcttattaatgggtgtctttgtggttgtttctggcctcctttgtgaggctgtgcaggcacagtatgtgaatttggatctgactccagctaaacattcttgccctccccctagttctgtaagtctgtaactatttgtagctgttggcccttgtatggctgggagactgcgtgcgtgtgtgtgtgtgcgtgtgtgtgtgtgtgtgttggggggcgggggctgcttctgaaacacacaggagcgccctccggtgctgtcccctgcctctggtgctgaacccggaggctggggaggaggctcgggctccctgctcccccaggcccctccccgggcctccccccgcctcccgcaccgccttccctctgcccgcctccgcctcctccccctctctccggctcctccccctccctcgctccctcgccgcctccccctcccccgtgtccctcccctctcctcttctcctccctctatcccctctccctcccctcctccccggctctccctctcagtctcaggcttttctctctctcaatctctctctctctttcgggcggagtcgcccaccactgccagcccagcgctggggggacctgctccaggctgtagccgcaggtaagagaccccattggtggggaggtgggggcgtgggaaaaggacggggttaccccaggtgcggagtgggggcggttcgggaagcctggagctggcttccctgggctggtttatggaggtggggggctgcctggcccagcacgcgtaccttctgtggggtgggagtgccaccagccgccccaacaccttcagtccctcctggttctcgggcggctggggagggggaccgcctgggtactggggggcgaggacaccccgcccccaccccgtctggggcaccccccctcgcgctctctacctctgcccccgccttcctgtgtctgggtctcatctttctgtctctccacatgtctcaggggtctctgtctagcagagtctggccgcctctgggagtccctgtctctcagtctctcactcctgtctccctctctctgtgtctctgtgccggggtctgttcggagtctctctggggctctgtctctaagtcctgggtttctctctcctttcctcttgcgccatctctgtttctctgtgtctctgtgtctctgcctctctcccttgtctcagctttcctgtgtctctctctgtctctgctttctctgtgtctctgtctcttcccatgtccgcatgtctctctctctctctctctctctccctccctccccatctccccctcgtctccatctctgtctctggatatctcagtctctgtttctctctctctttcctcttctctggctctccctgggagccagtgcaccctcctcccacacacctttgtctccgcccctggcaggggggacctggaggaattagacccccccacccgcagagtgggctcccccaggcctggagtcctctaaactcctctccccacttcagcagagctcccctgctctctccactcctcccagccggcacccaccccagctctcccctgaggaccgagcccacctccccctgccttgttt

SEQ ID NO: 7922 - DNA, 6000 bp, Homo sapiens
gctctctccactaatcccagcactttgggaggccaaggcgggcggatcatgaggtcaagagatcaagaccattgtggccaacatggtgaaaccccatttctcctaaaaatacaaaaattagctgggtgtggtgccacatgactataatcccagtgacttgggaggctgaggtaggaaaatcgcttgaacctgggaggtggagattgcagtgaaccgagattgcgtcactgcatttcggcctggtagaggaagactccatcagaaagaaagaaagaaaagaaaggtaggctccgcagtggctcacacctgtaatcccagcactttgggaggtcaaggtaggtggatcatttgaggtcaggagtttgagaccagcctggccaacatggtgaaactccgtctctactaaaaatgcaaaaaaattagccaggcatgatggtgaacacctgtagtcccagttactcaggaggctgaggcaggagaatcacttgaacctgggaggtggaggttgcagtgggccaagatcgcgccactgcactccagcctgggcgacagagttgtcagtggctcacacatcagtgggaggtggtcaaggaaaggacagatcaaggccagcagggcaggtttgagcctgagcagctgtagttgatgccattagctcagatggggaattgactgcagaggattgattgcatcagggtgtgatcgtgtctatgatagggtgagccgtgttctgaagagctgggaaagtagacggcagcgtgagaaggtttcacagagggcccacctatcagctaaggcttaaagattggctgggagtggggcagaggtggacgctgagtttgaagcagttggaacactgcagttaagggaaagggttcaggtgtgagatgaacctcaattccatcctggctcctcttacctccttgtaaactagggcgaatcactttccctgtgggagcctcagttttctcaatctgtaaaatgggatgaaaattgcccctcctcaacccccgcaacctatcagttaaataaaatgtaaattatggccaggcgtggtggcttacgcctgtaatgccagcactttggaagtccaaggtgggcggatcacttgaggtcaggagctcgagaccagcctggccaacatggtgaaaccccatctctactaaaaatataaaatacaaaattagccaggtgtggtggtacatgactgtaatcccagctacttgggtggctaaggcacaagaattgcttgaatccagaggcagaggttgcagtgagcagagatcgtgccactgcactccagcctgggcaacagagcaagactccatgtcaaaataaataaataaatagaaataaaatgtaaattaagcacttgggagggtgcaccataagaactgaatggctactagttaacaagctctcatgtgattgctaatattgtttggatcccatcctaaataaatccaatgaactctggaaatggaaaaaaattccctggttgaaaaggctgaggggttatattatctgttgctgcatgacaaattaccctgaaatggaacagcttaaacagaagcttttacatagtgttgctttgacagacatggaaccaaaaccgcttgtggtaatccaggctcacccccacctgctctgtggtcaggacacagtggcaaccacaagtaggtggtccaggcaagtctattcatgtatgaagagagttgggggaaggcttcttatgccttgctcggctcagccaaccccctagataatagcggtttctcaaactgtggtcccgggattatctgcatcctaattttacttttttttttttttgagatgagacagggtctcactctgttgtcccggttggagtgcagtggcacagtcatagctcactgcagcctcaaactcctggggtcaaacaatcctcccacctcagcctcccaaggagtaattaaaatttttttaattttgtggagataggatcttgctttttgcctaggttggtccttaactcctaggctcaagcggtcctcccgccttggtctcccagagtgttgggattacaggcatgaaccaccaggtctggctgcatcctaattatatagggttctgttttttaaaaatgcagattcctgtgacccaccacagactcagaattggaaccattgtgggtacggccttggaaactgttttatttaaagaagatttttaggatagttttagatttgtagaaaaactgcaatgacagcaaaaaaaaattcccacataccccagtttcccctatgattaacatcttatattagaatggtacatttattaccacgtatgaaccagtatggcacaatattattaactaaacttcatagtttatttagatttccttagtgtttttgtttgttttgagatggagtctcactctgtcacccaggctgtagcacagtggcacaatctcggctcaccacaacctccacctcctgggttcaagcaattctgcttcagcttcctgagtagctgggactataggcgccctccaccaggcccagctaatgtttgtatttttagtagagacagtgtttctccatgttagccaggctggtctggaactcctgacctcaggtgatccacccgcctcagcctctcaaagtggtgggattacaggtatgagccaccgcacccggccaatttccttggttttttaactcaatgcccttctgttccaggatcccaccgaaggtaagacattacatttagcagtcacgtctccttggctgtgatggtttctcaggctttccttgttttgatgacttgacagtgttatttgtttgagacggagtctccctcttgtcccccaggctggagtgcagtgaggcaatctccgctcactgcaacctccacctccagggtacaagtgatcctcctgcctcagcctcccaagtagctgtgattacaggcatgcaccacctcaccgggctaagttttttgtattttcagtagcgacggggtttccccatgttggacaggctggtctcaaactcctggcctcaagtgatcctcctgccttggcctcccaaagtaccaggactacagatgtgacacactgcacccaccaacagtgttgaggagtactgggcaagtattttggaggatgtggctcaactggaatttgtctagtgtttttttcatgattagattgaaagatcccagaagtaaagagccattttaatcacatgacttatcaatgttgaggttaacctcaatcacctagatgtcaatgtcaggtttctccactgtaaatttaggctttttctcccctttcttgtaccctcttctttgaaaggaagtcactatgcacagtccatacttacagaatggggaggtatccttcaccttcttgagagcagagtatctacgcagattatttggaattcttctgcacaaactatttgtctattctcccccctttatttatttgttctatattcatctatatgaccataggctcatggatactttatgtttgggattataatccaatactactttattttgatgctcaaattgttccagctttggccattgggagttctttcagttggctcctttggcataccccctaattttgtgtgtgagcacacgtgtggaatacttccttcctttctggcactacaaagttatactgaggtgagctatgattgtgctgctgcactccagcctgggcgacagaccgagaccctgtctccaaaaccaacaacccaaagagtgagaccctgtctcagaaaccagcaactcaattttctgggacagcaggaggtgtgtttgagcctaaacttttttttttagagacagagtcttgctatgttgcccaaggcgggacttgaactagactcaaactcctgggcccaagcgatcctctcgcctcccgagtagctgggattataggcacgagacaccgcgcccatcttcgaatctgaatttttttttaacacgctctcttcagctattttttttttttttctgagactaagtctcactctgtcgcccaggctggagtgcagtggcacgatctcggcccgttgcaacctccacctccccggttcaagcgattctcctctctcagcctcctcagtagctgggattacaggagtgtgccaccacacccggttaatatttgtattttagtagagcggggtttcgccatgttggccgggctggtctcaaactcatgacctcaagtgatccgcccgcctcggcctcccaaagtgctgggattacaggcgtaagccaccgtgcccggccctcttcagctattttttatgaaaccagagttagagaacctcttaagtttttgtttgcagtctctcttcaccggtctccccaaagcagttctagtactggccgacagagggagcaagaaaaagcagaacggtttccttttcccacaaacgcctttccaagtgaagaaaccggcgagaccagccgcgggggcgggactaagttctgcgcagaactgtcaaacccgggcgtgggccccgagctgtcacgtgagtgtctgcggtcagctgactgtgccagagttccgcggggagggcgagtgggggaccccccgccccagcgcgagccgagggctcctgctgattggtggaggaggatccagcagcaacaccgtggggcggggcctcggcggggggtactgccattgccttccacagggtcacgtgggaggtgaggtacagagcgctggggagagagtggagcgccgttcgccggtatgtgcgcatgcgttgaggtctcttgacgccgattggggggtcacgagtcacgggcggcgtgcggcggctggtgggggcgtgtccggcggagcgggcgcggcgttacgaggccgctggttggccagcgctagtcacgtggttcctggccgcaagcgacgcgcgccggtgcgacgtcaacgcagccgggcgagttttaccgatctgtgttccgcggcccggccgcggctgagtcttcccagggtcagggtcaggcgctttgctgagtccctttgtggccgccatggacaattccgggaaggaagcggaggcgatggcgctgttggccgaggcggagcgcaaagtgaagaactcgcagtccttcttctctggcctctttgggtgagaaccgggctgaggggtcggccgggacctaggctgagaggacgaaggagtcacgctcggaggtggcgggttagggcacgcagagctcgggccgaggggacggagaggaacctgcaataaggtgacatggcctgaggcggcagaggggacgcaggctgagggccaagagcctgggccggggcaacacggtttgaggagagacggtctgacatggcggaagggatttgggctgaggacacacggaccgaggcgacactatcttgaggcgaggaaggggacccaggccgaagacaggccagcgggcgggggagaacctggaccgagggagtacgtcctgaagccttggaggggaccggcctggggggacggagggagtccgggagagaagccaggtccagaggcttttcggagctctaggggagtctgtttgaaggctctcaggcggcagtgatggggcctggggctgaggacgcctgcccgagggactgaccttttcaacccctggagcagtggatttgcgtgggccctgggcggtgagggtgaaggctgaagggggctgacaccaggcagaggggctcagggctagatgatcctaggagcggtgagccgcgtctgaagtgtggggggtgcatggggtgagtacggccctggttagcagtgactagtttaaggacagctgaacggaggaacccgggatgatggagtcaagactgtggaggtctcagcactttgggaggccgaggtgggcagattatctgaggcggggagttcgagaccagcctggacaacatggtgaaaccccgtctctactaaaaatacaaaagttatctgggcctggtggcgggtacct

SEQ ID NO: 7923 - DNA, 6000 bp, Homo sapiens
ccattcccagtggctgctcaccctccagcccctcctctgcctctcccagacccacccctacctggcttctgctcttagggaccccgcgtcccactccctactgaggcccaggagggcagcccccggccccacccttctcacgggggctgcatgctcagttcctaaccacagggattagggagagcagcctcccccactccagggcctgaggaggggcatccccagtcctccaggactctgaaggcccaacccccagaacccacgccctcagggatcacagagtccagcctctggacaaccccccgctccccccgcctccatctctacctcctcatgagcctccgtttccacttccatctgcatagggctaaagtccccaacactcatctcctgccctgtcagggactcaggagactgagctcccagcctgccttcctcagacggaagcgctatcccctacctcctcccgtaaagacccaggagtccttctggcagccccttcctcccccaggccttgggagtctgggcattcggtcctgttctttcccaggacccaggaggccaggcccctcctgccccaagactctggaactccagtgcccagcctcctctccctgcaggaaccaagagtccaggtccccagctcccctcttcccccaaggacccaggagtccgggttccggctcctgtcctcccttaaggatccccttttggtttcaaaccctatccttcccaacatcctgggtgcccccccaccgagctctggcctccctagtcaccccacttagatcctgtacatagcacagcctgtccccaagcggggaggaggaggagggtgccagaaattcctagggtgtccctgtcttcattgccccccacagcatccaacagagaagagaggagcggccacttcgatcaacagctccccccacaacctcgagttgtgctgcagacggcatcccgtttcctcccccctcacctcccaacacacacacacaacatcggtctctccccacccgaatcctgatgcttggaagaggctggaagggtgttccagaaccttgaggaaggggtgggagcttggggcgaggggtgctgggggcctggatgccctcaaggtccttggcgggggtattaatagcagactcatagctctgacatgggaggggagagcgagaggagagagggagaggaccggctcgcgatggggggactgatgcagggaggggggtacagggagaaggtgagatagagagatggaggcacagggatatggggcatcaggtatgtggggatggggagagggagccaagtgtcagagaaatgggggcgtgaaaggtctgaggtgtagggactcaggaaaaaggggctcagagagggagagagagagggtggaggagagtccctgagggacaggggagctaggtgggggtcaagacccctgcccaccgttcaaaccccctccctccacgaggcttcttgccaacttcctctgtcctagatttgggggtccacattcccaccaccatccctgcatcccctgtccccgccttaccttttcatgaccctgttctgttggggggatggcgggggggccaggaccggaacccggcgtccagcgaccccaagattccgaggagggctcagagagccgatgtcggggggcaggccccggggcggcggcagtggtggtggcggcagcagcggcagcccggacctcctgtctgtccctggctccgtctctccttcctcttccttggtcctgtcctgccctgtctctcccccaaggttgcggccacctggactaggcgaggacgtggctacacatgttgctctggaagttgggccccggacattgcagaggctgtcggggtgtcctcttgccgccccgaccccgtggggatcccccctccgcccacccggggtgcccccctctgccgcttcagccccggctcctcccccctttccatgtgtccagtcccgcctctccctggctcactcgcacccccgctttgtgccctcagcccccccacccccccttccagcgtctgtgtctatctgtctgtctgggtcacctctgaagctagtggctggtgtgtgcgtgtgaggagcgggagattgcctgcttggggaactgcttgccccttcctcgcttggccacctctagacccccccttgactcccccactctcaaacacaggcagaaacacacatacactcacgcacacacgcacgatctcacttccctgggattccccctcaacacccccagagcttgaggagggacacacacacagacacacacacacagagtggggggtctaatgggggccaggctgccactgctgataggggctgtttggacagacaggaggacacaggcagccggggacgcccagacgcctggccggacgcaggcaggaggcacagaacccaggtacacaccatccatctgggtttgggggggccggggggaaggagcgggagccccacgacacccaggcaggcagctcagggtcggtacagacagacagacccctccctccctccgccgccgcagcgcttacagacacaccccccctccaccagccagccccagacacccggacacacagatcctcaccgggcagatggcagacgctcgagagacccctgggggccgggccgacctacccaggcaacacccccagcaggcaccggtggccgagggaggctgcgggaggctgcgggcgagggtggcggcggcggccgcggcttggaggagctggagcgggagggactcacacactcgctgtgttctcgcacacacacactcactcgggatgcgattaacattcagtccccgtctgccactgccgggagacccacagccccccctcctggcctccctggggaccccttctcctgccaggcttggggagggggccgccccccacccctagctaccagcctctgccttcctcctgggacaagggagtgaggggctgaaaataaaaagggaggaagaagtcaggctggggacaggcaggcagggactcagaacccggtatggagacaccagcttcagagctagactccagggctgggggttgctgccctctgcccccgccctgccttgaggctctggaaacaggaggcctttccctgacttcagtgttcgccacactaagacccaagctgtggcttttattgccccagaaggccaggcctgaaaaccaggtctcgaccctggtcccaggagtcccaccccccagcccctcctccctcagacccaggagtccccttctctactgggacccaggaatttggggaccgcctccaagtcggagtctcttttaaggactcagtcatcccgactctcccccgtacaagccaccctcagggacccaagactcgtggatgtcacccttgggcaccccgtccttccagccctctgaagaaatcaacacgcctgcaccccttcttttattgagggaccctggcctccatcatctgtgggtaccccatcatccggaagggaagccacgtctgtcccctcatagatgcaggagtccagaccacaggctgttccccgggggtcccacacccagatgcccagcattcccctcctgctagagggctgggcccggcacttttataaagccacccgtggggctctggggtagagcgtggggcaggacaccggggcctctgagggtggaagagggtgtgtgtgtgtgggcagggcagaaactctggagcaggggggaagccagggccaggggctcctgaggtagtttgggtcagagttttggccttgagcctcctgggtgaggctcctgtttccttcatcctcaaggtctgggagaacagggtgaggtgcacattcctgaaaaagaagagaatcagggcctaaatctgtgggtcgtaaagggagaaactgtagatctagattcttaaggttaggatgtttgatccataagatggtgggggtgggaccctaagttccaaggaacagcgtcctaggagggaaaagggctggggccctgaactcctgggtctgagggaggaggggctggggccctggacccctgggtctgagggaggaggggctggggccctggacccctgggtctgagggaggaggggctggggccctggacccctgggtctgagggaggaggggctggggatctggactcctgggtctgagggaggaggtgctgggggtctggactcctgggtctgagggaggaagggctgggggcctggactcctggatctgggggaggagggtctgggggcctggagtcctgggtctgagggaggaggctgggggcctggactcctgggtctgagggaggaggctgggggcctggactcctgggtctgagcgaggaggagctgggcctggactcctggatctgagggaggaggggctgggggtctggacttctgggtctgagggaggagaggctgggggtctggactcctgggtctgagggaggaggggctggggacccagacttctgggtttgacgaacgggctggggccttgagtcctgggtctaggggaggaagtaggtggggtatctttcttgtcttctgggggattggagttagagtgcctgaaagctgcaaaagctagcagctgagcctccgggtccctgcaggatttttcaagctcagagggcagtctctacatccctgcaagggctgaggctggtgtactggactgcgtctcttccagagacacagactgcctgggcgaaccggtgctggatttggcactttccgaaccctgcgaccctcccaagttcctatggggcagctttgggggtgcgtttagcgccgccacggcaaagcaggaggtgggcgatagggggcgccggggatccaggccccgccctcgggggcggagcctctcctcccggactcctccccctctcgctctcctccctcttcccggctccagctccgccgccagctccagcctttgctccccctcccaaagtcccctccccggagcggagcgcacctagggtccctcttccgtccccccagcccagctacccgttcagaccagcagcctcggggggcacccccccgccagcctgcctccctcccgctcagccctgccagggttccccagccatgaatctcttccgattcctgggagacctctcccacctcctcgccatcatcttgctactgctcaaaatctggaagtcccgctcgtgcgccggtgagaggcccaccagggctggcgaaggagagagattgcgggcgggggttgggggacgtcgcaggactcaggaagggtttgggggcactaggggcacaggttccacccccactgcttgctggggatctctcttctaggttctgggtctccaggggatcagctcccttccccagactggcgggggtgcatacagtttcatgtgaatggctttaggcccccaattcagccacccccagccccaatctgggcagcccgagggttcatggaccgggaacagggaaccatggcaggcggggaggtggctgtgagttggtgacgtggaccgtggcggccaggaagggaacgggagggaggtgaccggatccggggcctgaggtcagggaaggtcctccctaggcctcacctcaggtccagactgcgggaggaccctgaggggccaggggtagccatgaggcctagtctgggacggagcctcgggctggagtagcttcgggggcctgggctgccccctggctgtggtccgtgggaaagggccctgctcaggcggggcgggctggggaggcctccggggacagctgcactccagagctgcctccaggctggtcccgggcgccctgccttagtttattgcccatgcagcccacccccagcttcctctctccttctgtctgtctgtctgtctgtctgtctctctctctctctctgtctctctctctctctctttctctgtctctggaccacaggaatttcagggaagagccaggtcctgtttgctg

SEQ ID NO: 7924 - DNA, 6000 bp, Homo sapiens
aggaagaggctgacagcagggtctccgggattcgggaatggagaaggctgagatgcagattccgaggttccccgaggctagtaaataccgttttccctatcctcggctggcaattttatgtaataaaactacaactcccagaaggcaacgggcggctgagtccttaaccaggcctatctttgcccagtggcctcatgggtattgtagtttctaagattaggcgcgccaatgagacagtaaggctggaatctggggttatatctcctctgacagatgaggccacactgcaaaaggggtcctggagtttgctgaaggatctgaaacgcatcacagacagtgatgtaaaaggtaaatgcatcaagggggtgggagtcccgaatctctcagagaagccagcgttagtgatgcctggtctcttggtcagatactaggctgtggacccagaccgcctagattccaatgcctgctctgccacttcctagctgtacggccttgagcaaaggactttgaagctcccttggctctaaaatgcttcctcagttgttcagtttaaatgtgtattgctggccgggcacggtagctcaggcctgtaatcctggcactttggaaggctgaggcaggcagattacttgagctcagtagttcaagaccagcctggccaacatggtgaaaccttgtctctacaaaaaatagacatatgtatacatattagctgggcatggtggtgtgtgcctgtagtcctagctacttggggggttgaggcggggggattgcttgagtccaggagtttgaggcttcagtgagccacgattacaccacacactccagcctgggtggcagggtaagaccctcccccatcccccaaaatatgcattgcctagcccagcagctggcattatgttagacggtcagttgtagcgccctttcctgagaaggccaggaagtagactgccagactctgcaggcagaagtaaacttccaacacctcacacgtgggattgggggttcctgtgtcttcccaggcgatctcttcgtgaaggagctattttggatgttgcacttgcaaaaggaaacctttgccacctatgttgctcgattccaaaaagagggtgagagaagatgggagtcggtgtcccccagctcctctttccactatccaagagtccttgtctccagccccttacttctccaagcccagttcctcagcttccccaactgcctcctccttcagacccaagtcttttctccctcgaacccaaaagcccaaagcccagctcttcccccaaccccctcttccatcgtctttcatttagaaatctgactctgtcatctctttcttgctctctttttttctcttttgacacagcttattgtcccaacaaatgtggtgagtctggattacagaagttaaccctcatcctgccctctgaatagtcaacctccccactcgcctttttggatcctggtggttttgtcattctctgccttggagaggttcctgggtctccagtattctttctgcaccatggatttcttggggagcaggtcatattctacttacactcttttttttgagacagtctcaccctgtcacccaggctggagtgcagtggcacgatcacggctcactgcaacctccacctcccaggttcaaactattctcctgcctcagccccctgagtagctgggattacaggtgcccgccatcacacccagctaatttttgtatttttagcagagacggggtttcaccatgttggtcaggctagtcttgaactcctgaccttgtgatccgcccgcctcggcctcccaaagtgctgggattacaggagtaagccaccgcatccggcctctacttacaatctttactgagccttgttggagcccacttactacttacctgcgtcctggtcctgtgccttcgtctgaccatctaggaatgtcatagatgatctggccccagcccttagccctgacctctccttttagccatgccccttagtgggcaaatacaagccttgaccctgcccctccaggtgtgatgttgcaaactctgatctggtgcaagaactgcaaaaaggaggttcacgcttgtcgaaagtcctacgattgcgggggtgagagaactggacccagcaggaggaattggtgcaggtggggtggggcgagaggagaggcagtctagagagagcctagatgggggtgtgggggcagtagacaagaaaaggtagggtttaggccaggtgcagtggttcacacctatagtctcgcacttcgagaggctgagacgggaggattgggaagccaggagtttgagaccagcctgggcaacatagcgagactctatctctacaaaaaaatttaaaaattagtcaggtgtggtgttgcgttcctgtagtcccagctacttggaaggctgaggcaggaggattgcttggacccaggagttggagactgcagtaagctatgatcataccactgcactccagcccaggcaaaagagtgagaccttgtctaaaaagaaaaaaaagaggccgggcgcgctggctcacgcctgtagtcccagcactttgggaggccgaggcaggtggatcacaaggtcaggagttcaagaccagcctggccaagatggtgaaaccatcgtttttgtactaaaaatacaaaaaaattagccagacatggtggtgggcacctgtaatcccagctactcaggaggctgaagcagagaattgcttgaactcaggaggcgaaggttgtagtgagataagatcgcgccactgcactccagcctgggtgacagagtgagacttcatctaaaaaaaaaaaaaaaaaaaaagagagagagaaagaaaagagaaaagacgaggttacaacaaatgtaaaggattaggggagggtaaagaaccgtgaaggaggcccggcgcagtgcctcatgcctgtaatcgcagcactttgggatgctgaggcaggcagatcacctgaggtcaggagttccagaccagcctgtccaatatggtgaaaccccatctctactaaaaatacaaaaattagccaggcgtggtggcaagcgcctgtagtcccagatactcaggaggctgaggcaagagaatcgcttgaacccaggaagcggaggttgcagtgagccgagatcgcgccaatgcattccagcctgggcgacagagcgagtctccatctcaaaaacaaaaacaaaaacagaatcatgagtgtcccatggtcatcccccacccccagagcggaatgtggaagttcctcaaatggaagacatgatcctggactgtgagttaaactggcatcaggcttcggaaggcctcactgattacagcttttacagggtgagggcctcaacttctgtaacccttgaactccctagactacaatacttgtgttctggatctatgggcctgcacccacgattctcatgacccaggagggtggtctattaggtgtggtctctacagacctctggggaccccgtgccctgaccagtgacaccctggacactcacctcccacactgaggccctgtgatcttctcacccctgtactcccccaacccctgaattcctcaggcctcagtgaccccttgagcttgggtctaggtttgggggaacaatacggagaccttggtgtccaaggggaaagaggccaccctgaccaagcccatggtgggtccagaggatgcaggcagctaccgctgcgagctgggctctgtgaattccagcccagccacgatcatcaattttcacgtcacaggtcagtgctgtggggctgagagaagtgtaggattcagggcccaggaaagctggggtccgcggcgggggcgtggccttggcgatgggggcgtgacttcctgttgggtgtggtttcggggcacggggtgtggcttcctgccgggggcgtggcctctggccccgaggacaggggttcccttgggtgtgttcaggcttgacactgttgaaggcgtgattatctctgggatggccggctactgggacgggcttgtctttgccagggcaggaactccacgccctgccaggactgctctttacgctttctctaacagtgttgcccaaaatgatcaaggaggaaaaaccttctccaaatatcgtaaccccgggggaggcgaccacggagtcgtccataagcctccagcctctgcagcccgagaaaatgctggcaagccgccttctggggctgctgatctgcggctccctagcactgataaccggccttacctttgcgtaagcaacccattgaagaagacaggcttggcttggagtaaggggcggggcttccaggaacccaacacagaagctggtctgggggctactgaggcctgagagcaggactttcctggggatggagtgcggggggcttgaataggaggacttcgaagggcgaggcttaggtaattgctagaataaggtcacaaagggggaggttgggaggggtgtcccccacacaattagtacccaaaccggttccatgatctgcaccccactcccacccctaggatatttcgtcgaaggaaggtgatcgatttcatcaaatcctcactgtttggccttggcagtggagcggccgagcaaacccaggtcccaaaagaaaaggccacagattcgaggcaacaataaagatttatcttgttgtctaagcatctgactcactccccgggacgggactgattctagcctttggttccccgagaggagaggtctggggatgggctccggcctgagggaggaagggcagaaaaccgggacccttgggtcctggaggggaccaactgactgcgatgtaattccagaatcaaggaatggggcagggccaaccctacccagatctcctcccccaggcctggtctcctcacaggacgccccctccccgctcttcctgccgggtttcctcttgccttttcctgtcccccacccagtgctgggagccgtggcagaggcaagagcagtggaactgacccaggccagtggagccagggcctccgggtgtgccggacccgaagcagggtaagagccagggacccagcagcccaaacccctcctccctgggccccaagactcagtcccccagccatcttccatcccaggacccaggaatccagggtaccatccctctcctccccctggactcgcaagtctgagccccagccccctcctccctctgactcggagtccaggttccctccaccccatccccacaagaatgccttaggagttggggccttacccgccttcccttagggccatgctgtctggtgaacggaaggagggcggaagcccccgcttcgggaagcttcatctccccgtgggcctgtggatcaattcccccaggaagcagctggcgaagctggggcggcgctggcccagcgcagcctctgtcaagtgagtgccatctctgcaggactcctgcccctgcacacctgcttcccatctgtccctgttcactgcccagtccctgcaaagtgttggctccggtcctcatcctgaattgggcaaacgagctggtgggcagggggagacggtggggcacagtgataccagggcgcggtgggagtaagagctaggctaggaggtggagtgaggccggatgggcacggggacggggacagaaggagcagggggattgattcaccttccttcctcccctccctgctcacctcttggaatttcctactgtgggacttgcctttatttatttattttttctctctctctttgcctcgcgtctgtccccaccctcacccccgccccgtccatccaccctgggtccctgtcctccctctgggtctctgcccacttccctcctaatatgcccccacccccgtcttggcgtgtcgtcctgggtctctctcccgcgactctgttccccggcggactcccaggtcttcttcgtcggacacggggagccgcagcagcgagccgctacctccgcccccgccgcacgtggagctgcggcgagtgggcgc

SEQ ID NO: 7925 - DNA, 6000 bp, Homo sapiens
acaggcatgcgccaccatgcccggctaattttgtattttaagtagagacagggtttctccacgttggtcaggctggtctcgaactcccaacctcaggtgatccacccaccttggcctcccaaagtgctggggttacaggtgtgagccaccgcgcctggcccatgccaagctaattttaaaatttttttgtaagagtgctctgttgcccaggctgatcttgaactcctgggctcaagggatcctcccatctcagcctcccaatatgctgggattacaggtgtgagccacagtgcccagccaaaccatggctatcttgaaaaccacttgtcttccagtccccatgccccgaaattccaaggctctcatccctgaaacctaggactcaggctctccctacctcagccccaggagtctaaacctttaacttcctctttccctgggactaaggagtgctgcaccccaggcgcctcccttaccccacatccctcctcagcctcccctcctcagcctcagagcatttgctaattcgcctttcctcccctgcagccatgtggctccggagccatcgtcagctctgcctggccttcctgctagtctgtgtcctctctgtaatcttcttcctccatatccatcaagacagctttccacatggcctaggcctgtcgatcctgtgtccagaccgccgcctggtgacacccccagtggccatcttctgcctgccgggtactgcgatgggccccaacgcctcctcttcctgtccccagcaccctgcttccctctccggcacctggactgtctaccccaatggccggtttggtaatcagatgggacagtatgccacgctgctggctctggcccagctcaacggccgccgggcctttatcctgcctgccatgcatgccgccctggccccggtattccgcatcaccctgcccgtgctggccccagaagtggacagccgcacgccgtggcgggagctgcagcttcacgactggatgtcggaggagtacgcggacttgagagatcctttcctgaagctctctggcttcccctgctcttggactttcttccaccatctccgggaacagatccgcagagagttcaccctgcacgaccaccttcgggaagaggcgcagagtgtgctgggtcagctccgcctgggccgcacaggggaccgcccgcgcacctttgtcggcgtccacgtgcgccgtggggactatctgcaggttatgcctcagcgctggaagggtgtggtgggcgacagcgcctacctccggcaggccatggactggttccgggcacggcacgaagcccccgttttcgtggtcaccagcaacggcatggagtggtgtaaagaaaacatcgacacctcccagggcgatgtgacgtttgctggcgatggacaggaggctacaccgtggaaagactttgccctgctcacacagtgcaaccacaccattatgaccattggcaccttcggcttctgggctgcctacctggctggcggagacactgtctacctggccaacttcaccctgccagactctgagttcctgaagatctttaagccggaggcggccttcctgcccgagtgggtgggcattaatgcagacttgtctccactctggacattggctaagccttgagagccagggagactttctgaagtagcctgatctttctagagccagcagtacgtggcttcagaggcctggcatcttctggagaagcttgtggtgttcctgaagcaaatgggtgcccgtatccagagtgattctagttgggagagttggagagaagggggacgtttctggaactgtctgaatattctagaactagcaaaacatcttttcctgatggctggcaggcagttctagaagccacagtgcccacctgctcttcccagcccatatctacagtacttccagatggctgcccccaggaatggggaactctccctctggtctactctagaagaggggttacttctcccctgggtcctccaaagactgaaggagcatatgattgctccagagcaagcattcaccaagtccccttctgtgtttctggagtgattctagagggagacttgttctagagaggaccaggtttgatgcctgtgaagaaccctgcagggcccttatggacaggatggggttctggaaatccagataactaaggtgaagaatctttttagttttttttttttttttttggagacagggtctcgctctgttgcccaggctggagtgcagtggcgtgatcttggctcactgcaacttccgcctcctgtgttcaagcgattctcctgtctcagcctcctgagtagatgggactacaggcacaggccattatgcctggctaatttttgtatttttagtagagacagggtttcaccatgttggccaggatggtctcgatctcctgaccttgtcatccacctgtcttggcctcccaaagtgctgggattactggcatgagccactgtgcccagcccggatattttttttttaattatttatttatttatttatttattgagacggagtcttgctctgtagcccaggccagagtgcagtggcgcgatctcagctcactgcaagctctgcctcccgggttcatgccattctgcctcagcctcctgagtagctgggactacaggcgcccgccaccacgcccggctaattttttttgtatttttagtagagacggggtttcatcgtgttaaccaggatggtctcgatctcctgacctcgtgatctgcccacctcggcctcccacagtgctgggattaccggcgtgagccaccatgcctggcccggataattttttttaatttttgtagagacgaggtcttgtgatattgcccaggctgttcttcaactcctgggctcaagcagtcctcccaccttggcctcccagaatgctgggtttatagatgtgagccagcacaccgggccaagtgaagaatctaatgaatgtgcaacctaattgtagcatctaatgaatgttccaccattgctggaaaaattgagatggaaaacaaaccatctctagttggccagcgtcttgctctgttcacagtctctggaaaagctggggtagttggtgagcagagcgggactctgtccaacaagccccacagcccctcaaagacttttttttgtttgttttgagcagacaggctaaaatgtgaacgtggggtgagggatcactgccaaaatggtacagcttctggagcagaactttccagggatccagggacacttttttttaaagctcataaactgccaagagctccatatattgggtgtgagttcaggttgcctctcacaatgaaggaagttggtctttgtctgcaggtgggctgctgagggtctgggatctgttttctggaagtgtgcaggtataaacacaccctctgtgcttgtgacaaactggcaggtaccgtgctcattgctaaccactgtctgtccctgaactcccagaaccactacatctggctttgggcaggtctgagataaaacgatctaaaggtaggcagaccctggacccagcctcagatccaggcaggagcacgaggtctggccaaggtggacggggttgtcgagatctcaggagccccttgctgttttttggagggtgaaagaagaaaccttaaacatagtcagctctgatcacatcccctgtctactcatccagaccccatgcctgtaggcttatcagggagttacagttacaattgttacagtactgttcccaactcagctgccacgggtgagagagcaggaggtatgaattaaaagtctacagcactaacccgtgtctctgtagcttttttggagccagagccactgtgtatgtgtgtgtgggtttgtgtgtgtgtgtgtgtgtgtgtgtgtgtaagagagtggaggaaaaggtggggtacttctgaagacttttatttttttttaattaatttattttttttcagagatcgagtcttgctctgtggcccaggctggagtgcagtagtgtgatctcggcccactgcaaactcccacctctcggattctggtgcctcagcctcccaagtagctgggactacagacgttcgccaccatgcccagctaatttttgtatttttagtagagacggggtttcaccatgttagccaggctggcctcgaactcctgacctcagacaatctgcccgcctcggcctcccaaagcgctggaattacaagcgtgagccaccgcgccgggccctgaggatttttattactcgtgattgggagtactgtccctacttagatctgacagccccttgttgctggacttgtgtgagttgtggtccctgtttttctggttccctgtttctatcacacaggagagagagaccttccaggaccctaacgtctgagcccccagttgctcactcctggactgtcagtattggcccccagtcctctcctcccactgggacctccgcgtgggcagaagaggcggaggagggagcggattatcactgaactacatttcccggaaagctatgaggttggcagcgtcagtcagctacagagaaagaggccccagggcattttgggagttgtagtcttagggctaaaatgtccacttcgtggctcgacagccgtttccaaggaccgcggtgggggcggcagcggcctggggggccggatctagcccaaagcctgggtcctggggcaaggggaggggaggaaactgaaggcctgagtccggtccttgactctggaagccagagtagtcaggaggcttcctcttccctagatgctgggaaaattctagtccaaaaaggctgcagcctctgtgacgtcatggagcgatgggcgggacctccctttgttgcagtccaatcagacagagttgagtttctgggtggggccgaggaaaaccccaaggaatatctataaaggaattcgggcccctacgtgagaagctcggagggggtggtttcaggagttccttgtggagaggggatcgtccgtgactcagaccccgtcgaaaagctctcgatttcacgcaaccaaccttaccctcgtccccaacacaatccttgattttacccctgggaaaattagcgtaggtggtcatgaccccggcttcctctttaaaagccctcagaacctggaccgggctcctcaatgaaccctagtgttagaggccacaaatcgggaaccaaggtcggggagcggctgtttagggtgcatcactgttcaggatgcatcggggctcctttttctaagcggaagggtgcgccctgcaaattgggagcccgttagttttggggaagggtgaacaagggccccctaggtctagaggaccgcatggagtctcgcttaagtgttagtggggtcctcagttctaggaatctggtatgtgttttggttttgaaggagttccgagtttgataatatcgtggttgggtctgtgttagatgtttattggtttgggcattgaatcttcagcttgaggttcaacaggttttggggggctggcgggggagtgcctcggtgttgctcttaagggttggagttcaggctcacgtcaatctggggacttggaaaattccacagtttgggattttgggaaggggcgcatggggttgggagattccaggttctgagtttggggacttatgagtgattcctgtttaatagtttttctgatctctcagttgggggattcagtgagaaccctaaattttgggtcccctggattggggctcagtttcacacttcggaggcatttgatgaaggacataggtcctctttatttggagatttcctgaagatcctcttttcgaggtttgcggaccccatggataggcggcccagtgggatttcttaagatggattttggcttttctccgtttagcgttctcctgctctcggtttggggtgagagcacccttcctaacggtcttcgggaactgtgcgcgccggctgcaatggggccgcattttaccctcctgtgtgcg

SEQ ID NO: 7926 - DNA, 6000 bp, Homo sapiens
aaacaaacaaacaaataaataaaagtaaacgccgggtgcagtatctcacgcctgtaatcccagcactttgagaggccaaggtgggcagatcacttgaggtcaagaatttgagaccagcctgaccaacatggtgaaaccccgtctctactaaaaacacaaaaattagctggccatagtggtggtgcctgtaatcctagctactccagagctgagaatcgcttaagcccaggagacagaggtggcagtgaaccaagattgtgccactgcactccagcctgggcaacagagcgagactctgtctcaaaaaacaagcagccaggcgtggtggctcacgcctataaccccagcactttgggaggctgaggcgggcggatcacctgaggtggggagttcgagaccagcctgaccaacatggagaaaccccatctctactaaaaatacaaaattatctgggcatggtggcgcatgcccataatcccagctactcgggaggctgaggcaggagaatcacttgaagccgggaggcggagattgtggtgagccgagattgtgccattgcactccagccttggcaacaagagggaaactctgtctcaaaacaaacaaacaagcaatcaaacaaacaaacgggtgtggtggcgcttgtctgtagtcccagctactcgggaggctaaggcaggagaatcgcttgaacccaggagacggaggttgcagggagccgagattgtgccactgcacttgggcctggtgacagagcgagactccatctcagaaaaaaaacaaaataagataaataaataaataaatattaaaaagttcataaggacccagatggaagaattccaggtttcagctccttttcctgagaacccaaactcccaccctccagccccttttttctcagaccaggatgcctaagtctgcagtccccagttctcctgtgatccaggtgtccagatgtccagcccactgattccccagaacttgggtgttacactagccccaaacctactccaggacccaggagtccttgtcccagatttgaggcccaacagatctcattcctgctgctaaatgatgccagaaaactacatctcccatgaggatgtgagtgtgctgtgtcacctcgtaaaagctcccctgttatcgaggtagctctatgaaatagttacacaacgctcacacaagttgaggggttgtagaaagaagtcctgctctttcattttatttttatatttatttatttatttatttatttatttatttttttgagatggaatctcgctctgtggcctgggctggagtgcagtggcgcgatctcggctcactgcaagctccgcctcccgcattcacgccattctgcctcagcctccggagtagctgggactacaggcgcccgccaccacgcccagctaattttgtttttgtatttttagtagagacggggtttcatcgtattagccaggatagtctcaatctcctgacctcgtgatccacctgcctcggcctcccaaagtgctgggattacaggcgtaagccaccactcccggccagtcttgtcctttcagagagcagggatagtccacagtccctggggacactttagcagagtagaaaagtgaggctgggctgggcacagtgactcaagcctgtaatcccagcactttgggaggccaaggcaggcaggtcatgaagtcaagagatggagagcatcctggccaacatggcgaaaccctgtctctactaaaattacaaaattagctgggtgtggtggcgcacgcctgtaatcacagctactcgggtggctgaggcaggagaattgcttgaacctgggaggcggaggttggagtgagccaagatcgcgccactgcactccagcctgggtgacagagcgagactccgtctcaaaaaaaaaaaaagaaaagaaaagaaaaaagtgaggcccagtgggaagccaggaccctcggaccacgtgaggggaggtgtagaggggattgtccgggccaagggagacaaaacagctgccatgtcttccctcagacactcacacatgctcattcttatcctcctctggaactctttattatctcaagtaagaaaaataaaaaaataaataagataaataacctaataaataaagaggagatgtcatagtaaacagcctctggcttcaggaagcgtagctggggcttcggccctgggaaggtcccaccatgctcagagggtccgaggagcccacatcggggggctggggggccaggattccgggtggctccgggagtgcggggggcaggcctggtagtggcaggaagcgagctggtcctcggggtgcagggtcccggtgtggggacttgttccctggcaggtgcagcgggaggccgtgggcttcggactggtaaacattgtatccgtcctcaagaagcagctcccggaagctgcaggcctcagggtcaaagtggagctaggggacaaaaacaggatcagagacagggttcctctgttttcctgatgtaagacccaggatccaggccccagccctgcctccctcagacccaggggtccaggcccccagcgcctcctccctcagacccaggggtccagaccctagtttctcctccatccgacccaggagtccaggcccccagcgcctcctccctcagacccggggttccaggccccagcctctcctccctcagacccggggttccaggccccagcctctcctccctcagacccggggttccaggccccagcccctcctccctcagacccaggggtccaggcccccagcccctcctccctcagacccaggagtccaggcccccagcccctcctctaggaaacaaaacagcaaggcaggttttgttttttaccccagggctctcctgcagggacctgcctcccagttcagacttcacagagaacattccagccctcggagccatcagtgctctctcaggccaggcggggtgtctccctagcactcaaggtcctggtcactttactggccatggcttccccgagtgtccctgtgcccagcatgagccgtgcacacaggggccgtgtgggcaggagcaggggttactgaatcacgagactcccaataacctgagcctcaggccgctccagcatccacacatcacatgattgaggtcactggcgccccggcctgggcctcagtttcctcatcttgcaaacactgatgacaacttcaacctccaaatgttgcagctgggggcgtgcagagcaaatagaatcaagtctggctccgggggggatgagcaagacaaggcaccccaggctgtgagggcgacatataggaggagcatggtgggtggtgaggagggtcctggaaactcaccgatccatacagggccccatctggccgctggcacaggaacctggatgtcttgactcccaagatttgaataactcccggcttcaaggctttcagctgcaggagacctaaggggtgaaagcgataaggtggttcgaggacctctcccacccgggactgtcccaccacccgactctgtcccaccatccggctctgtcccagccctgggagtccaagcccacagcctacctcctccctcagacccaggagaagcccaagccaaagccccctcccaactcagacccaagagtccaggaccccagcccttccttcttcaaacccaagagtccagacccccagcccctcctccctcagacccaggggtccagacccagcccctcctccctcagacccaggggcccagatccccagcccctcctccctcagacccaggagtccagatccccagcccctcctccctcagacccaggggccaaggcccccagcccctcctccctcagacccaggaatccagacccacagcccctcctccctcagacccaggctctggcccacactcactttcggggctctggtcagcagcgccccccaccgtcccatcctccctgatctccaggtgggcttctgtctgctgggcatcatctgtgtagaggtaccgctgccggacttggcccccgaattgcaggagaggactggagtcagggatggggtgtgcctggcaggctcccagcagaagaccagccagcacagaaacccacagtcctgagtgctcgaacccggtctcgtccgagtccatcaatggctcgggtcctcaggtgatctccggggtgtgagctcggagaagctgagtggtttagaattggtgccagattccagttgtccaggtgagtagactcaggtggcctgagtgcctggctcctctttcggctggatcctcagctgacagaacacccttgttttttgggatagatgcagaagctccagaatttatacccagacaggcccgcccaatcaccctccctgcgcctgaaccatgatatttgacccatttggcaggagctacagaattccatcgtggcaagggcagcctgaatggatgatgtaacctggggtcctttcaatggagggccagactcctgggtctaggggatgagggaggggaggatcgggttagctgggacccaggtgaaaggggctgggggcccacattcctgagtctcagagagaaggatctggggtctcaagcacctgagtcggagggaggaggggtgctgggctcctggaaaaaccacctcttggaccatctatgcagatcacgcagaacaagagaaatttctgcgccccatctgaatttctaagtttggggggagggcgtgatctgacactgaggttccttgatcctcagcaaggcggcaattgctgtatgaaagaagcgaccgcatctgagacacaagtatcctgccttggaagcctctcacctggccgtgggccaacctcaacctcatctgtccctgctcagatgctcagaccctggacatcccagcctcctcctccctgatgcaatcctggtgtttctttcaccagagaagccatcccaggcccaggcaggtgctcctgaaataacctggggggaggggtggctgaaagtccctgactggagttggcagccaagccaggccctggagtgggcacccagagggaagacaggttggctaatttcctggagcccctaagggtgcaagggtaggccttctgtgtctgagggaggagggctggggctctggactcctgggtctgagggaggaggggtggggggcctggactcctgggtctgagggaggagggtctgggcctgtactcctggatctgagggaggaggggctggggaacttgggctcctgggtctgagggaggagggagctttggtctggactcctgggtctgagggagtaggggctagggatctggactcgtgggtgtgaggaaggaggggctggggtcctggactcctgggtctgaggaaggaggggcagggggcttggactcctgggtctgaggaaggaggggccgggagcctggactcctaagtctgagggaggagggtctgggggcctggactgctgggtgtgagcagaagggtctgggtgctgggagtcccgagcctggggagatgatggttaaacttctgggaatcaagtcaaactcctgagtctttgacattgatgtatcttgaatgggagggtcagtctgtggggaaggattacccaggtgccgaggcaagagactgaaggcacaaactgtttcagtataataaagaaaatagttagaataagaatagttatcatacaaattagatatagagatgatcatggacagtatcaatcattagtgtaaacattattaatcattagctattacttttattctttgttgtataactaatataaccaggaaacaaccggtgggtatagggtcaggtactgaagggacattgtgagaagtgacctagaaggcaagaggtgagccttctgtcacaccggcataagggcctcttgagggctccttggtcaagcgggaacgccagtgtctgggaaggcacccgttactcagcagaccacgaaagggaatctccttttcttgga

SEQ ID NO: 7927 - DNA, 6000 bp, Homo sapiens
ctgccccaaggggtatgggggattgccagaggagtcctagcttctccctccaggccagcttctaccagagctgctccttttactgcttccaccagccagggctctagaggtcccaggcccctcaggcggctccaggcgcggctgaggaggcccatcactggggacaggaggaagaaagggtgggcatccctccacggggtagcctgatggggtgcttggcctggggccatgtgtctgggctggaaaagggggagaaaaaaataaagtttaggggccatttagaggatggcatccgggcgtgactatgagtcatagcaacggaaatagtaacacaactattgtaaatagcaacgcgagagtcccaaattcctttctgatctcggccacgcccatctctgtcccttggctctgttcttatctctcaatagccaggagtctgagcccctagttctgccttagatccaagggtccaagcccccagccctctctttcttcagacgcagaactcccagtcccaagaaccaagaacaaaagtctttacttgcttcccttggcgacaaagtcatagtccctagctctctcattctgctgaagattgacaaatcaaaccctcacaccctcctccctcgcagactgaaacattctgacccgaccccctacttggcagatgattccttcacgggggacccaagaatctggcttccagatccctcctccctcaggctcaggactccaggctcccaaccccttctcctttctaaatccgggcccccagccccgtggggacccaggcgttccgaccccttactcaccggctgggagctgcgcgtcaccccgggggcaggagcgccggttcggtctgccagaagcgatcacaggtccggacggttagggaggccagcgcgttcatctcaccctcaggcgtcgggctccgagtaactcagagtatctccggctgcctcaagtgccgtggcgacaagcgggcgcggggtcgtgcagcgtcttgcataagatcaacaactgggatgggaaccgataagagcaacgaacacaatggccactaggcttttatagcctaccgcgcccggcgtgctgacgtcacgaagagaggcggggtttcgagaccgcaacccgaagggtgggaagtggaagtaagacaggacttctcgcggagattccagcttttgcaacgtcacggcggagtttccgagcgtgaccacgcccctccaacaaacgaactgtcaatcaaatgcgtggccctgcttcaacagcgagccagttctctctcagctcagggtcaatgccttcccaccccaatttatttatttatttagttagttattttgaggcggagttttgctcttgttgctcaggctggaatgcaaaggggcgatctcggctcaccgcaacctccgccttcggggttcaagcgattctcctgcctcagcatcccgagtatctgggattgcaggcatgtgccgccacgcccggctaattttgtatttgtttagtagagacgtagtttctccatgttggtcaggctggtctggaactcccgacgtcaggggatcctcccgccttggcctcccaaagtgctgggattgcaggcatgtgccgccacgcccggctaattttgtatttgtttagtagagacgtagtttctccatgttggtcaggctggtctggaactcccgacgtcaggggatcctcccgccttggcctcccaaagtgctgggattacaggcgtgagtcaccgcgcccggcctatttatttatttatttattcattatttatttttctgagacgggatttcaccatgtttgctaggctggtctcgaactcctgacctcaggtgttctgcctgccttggcctcccaaagtgctgggattgcaggcgtgagccaccactccaggcctatttatttatttgttattttttatttttttatttttttttgagatggagtctcgctctgtcaccgaggctggagtgcaatggcgtgatctcggctcactgcaacctccatcttccgggttcaagcgattctccctcttcagcctccgagtagctgggattacaggcacgcactaccacactcagctaattttttgtatttttagtagagacagtgtttcgccatgttgcccaggctgttctcgaactcctgagctcaggcagtctgcctgcctcggcttcccaaagtgttaggattataggcgtgagctactgcacccagcctatttattttttgagtaggcgtctcactctgtcgcccaggctggagttcagtggcgccatctcggttcactgcaacctccacctcctgggttccagcgattctcctgcctgagcctctggagtagctgggattacaggcatgtgccacaatgcctgggtaatttttgtatttttagtagagacagtgtttcgccatgttgaccaggcaggtctttttttttttttttttttttgagacggagtcttgctctgtcgcccaggctggagtgcagtggcacgatcttggctcactgcaagctcctcctccctggttctcgccattctcctgcctcagcctccctagtagctgggactacaggtgcccaccaccacgcccggctaattttttttgtattcttagtagagacggggtttttcaccgtgttaaccaggatggtctcgatctcctgaccttgtgatccacccgcctcggcctcccaaagtgctgggattacaggtgtgagccaccgcacccggccgaccaggctggtcttgaactcctgacctcaggtgatctgcccgccttggcttcccaaagtgctggaattacagttgtgatccactgtgcctggcctcctaccccaatttagcccacaggccccagcctagagtctcccattttcttttttttttcttttctttcttttttctttttctttctttttttttttttttttttgagacggtgtctcactctgtcacccaggctggagtgcaatggcatgatcttggctcactgcaacctccgcctcccgggttcaagcaattctcctgcctcagcctcctgagtagttgggagtacaggagcttgccaccacgcctggctagagtctcctattttcacatgtggttggtttcctccccgagtgcgagggtgtcattgttcccatttcacagatggggaaacaggcttggaaatgaagccacttgaccaagatagtcacagcagggtccagattccttgcaaatgagaatgaggatgtaagcactatgagatcaggcactttgctgggctcaatgcttttcaaaaaaaagtaattaggctgagcgcggtggctcacgcctgtaatcctagcactttgggacgctgaggcaggtggatcatgaggtcaggagatcaagaccatcctggctaacacggtgaaaccccgcctccactaaaaatacaaaataaattagccgggcgtggtggtgggcacctgtagtcccagctactcgggaggctgaggcaggagaatggcgtgaacctgggaggcagagcttgcagtgagctgagatcgtgccactgtactccagcctgggcgacagagcgagactccgtctcaaaaaaataataataataattaatttaggccgggtgcagtggcatgtgcctgtagttccagctactcaggaggctgagtcaggagaatcgcttgaacccgggaggcggaggttgcagtgagccgagatcacgccactgcactccagcctggcgacagagcaaaacaccgcctcaaaaaaaaaaaaaaaagaaattcattttctaaatagagacaaggtctcgctatgatgcccaggctggtgttgaactcctggtctcaagcgatcctcctgccttggcctcccaaagtgctgggattacaggcgtgagccattgcacccagccagggctcactgctttcttctcagtggctgcaacagacagtgcctgcacacagtaggtgctcaacaggtgcatggtgaatggcagttaaaccgaaagctcagattccttcccggtcacaggcacaaggctccactcctgggtgtcatctgcttcagacttaggcagtagctctgcccccacaagccgcgattctgcctgggtggcactctttgtgcgggtgggggcgcttctgctacaagttccaggccctgggtgacagttccagccccccgctctcctcccctgcctacggatgcataatcttgttcctcaaaatataccaaggaatcatgtctctctcctgagggagttgtcctcagtctagaagagaattctcacctggatctgaggtggaggtttggaactctccatttcaccctgccctactgggaccatccccttttctccctaggggacctggacaaaccgtccctggccccttccaagcacagccatgtttccagacccccagctctttcacgactcaggagtcctgatcctagctcagaccttctcgggcacccaggagtctggatccctaacccattccctccagggctttggaaatttgagtccccaccccttgcaggacacaagcctcctccgtttaggacaccagtggctcaggcccccaaccacagcagcaaacccacgggggccctggagtgcaggcctcaagtccaactctccaaacactgagaagtcccaaccttggtccttaggggacctgggaattggggggcccaagcccctcccttcagctatgggggcagctgagccagaggtcaggctgtagtggggaggccagaaggggcggggacagccgggattgggaggggagaacagcagcgtgggcggctggcagaggcagggaaagaccagcagagaggaaagagaaactgggagagggaggaagggagaaagtgagaagggaaatcggaaagagaaaagggaggaaacggcagagccagagagaaagaggaagagactgagtgtgaaggagagaggacacaggggatgactgagagacagagagagagagagagagagaatgagacagagacttaaggaagagaccctgtgagtctgacaataaaagatttggacagaaacagaaagattggagagagagagagagggagagaatgagtgagagagagactggaagagacagagatcagagggagacacagaaagtgagagtggggagagaggtagtgtaaaaggaagagagagagagagagaccgtaagagacaggagacaaagagacaaaaagtgtgagtgagcaggtgaggagagagattgagaactatgagagacagcagctaagagacaaaggaggcgggagactgcctaggtgccgcagcacccacaccgtcctcttgcccccccgtcactgggaccccagagctgggtaagttccctggctgggctgggaggggctctctgggttcacattcctggtgccgcagggcttggcttggggagttggcaggggtggtttgggggtgcatgtgggagggcgggagacaggtagcctggggcagccggaaggaggcagggaatggggagtccctaagcacagagagggtcaaattcctggcctgagtgcagtgggcaggaataaagaagcccctattctctggcctgggctgcagacagctgccccctcccgcagctgccagggccgcctacctctcttggcaccactcttggtatgtggtcacgggccatggcctcccccagccccccaagtcccgaaacaacaggctctttctctgcagcctcctccgacctccaagcccctgaccccatctctgtctcacacccgtcactgcagagacacagcccctttctttctctcccccagcccttgatggaggggagccgacctcgcagcagcctgagcctggccagcagcgcctccaccatctcctcgctcagcagcctgagccccaaggtttgagcttcctggcggggatggggaggaaggtggggctctgggccgcccatccttctgtttccccaaggac

SEQ ID NO: 7928 - DNA, 6000 bp, Homo sapiens
attttttatcttttatttttttgagacagggtcttgctttgtcacccaggctggagtgcagtggtgtgatcatagctcactgcagctttgacttccttggctcaaatgacccttccacctcagcctcccaagtagctggattactgatgtgcatgaccacacctggctttttgttttgttttgtttttgagacagagtctcactctgttgcccaggctggagtgcagtggtgccatctcaggtcactgcaacctccacctcccaggttcaagtgattctcctacctcagcctccagagtagctgggattacaggcgcgagccacccggcccagcttatttttgtatttttagtagaaatggggtttcaccatgtttactaggtttgtcttgaactcctgacctcaggcaatccagccacctcggcctcccaaagtgatgggattataggagtgagccactgtgcctgacccaccttttaagttttgttctaacttcctgagcaaaaaaatggcaccttggctgggtgcggtggtgcacgcctataatctcagcactttgggaggccaagtcaagtggatcacttaaggtcaggagttcgagaccagcctagccaacatggtgaaacctcatctctactaaaaatacaaaaattaggttgggtgtggtggctcacgcttgtgatcccagcactttgggaggccgaggtgggcggatcatgaggtcagaagttcgagaccagcctggccaacatggtgaaaccccatctctactaaaaatacaaaaattagcctggtgtggttgcgcacacctgtaatcccagctactcaggaggctgaggcaggagaatcacttgaacccaggaggtggaggttgcagtgagccgagatcacaccactgcactccagcctgggcgacagagcaaggctccatctcaaaaaaaaaaaaaaaaaaaaaaaaaaaggctgggcatggtggctcacgcctgtaatcccagcactttgggaggccaaggtgggtggatcacgaggtcaggagattgagaccatcctggctaacacggtgaaaccccgtctctactaaaaatacaaaaaattagccaggcgtagtggcgggcgcctgtagtcccagccactcgggaggctgtggcaggagaatggcatgaacctgggaggtggagcttgcagtgagctgagatcgtgccactgcactccagcctgggcaacaagagcgagactgtgactcaaaaaaaaaaaaaaaaaaaaaaaaaaaaacgagaatgggagaaaataggagacagagaccagaaagatggtggacagagagagatagagaaggccaaagaccgtgaaataaatggacacagacccagacagagggaagatagagacctagagagagggacatagaagtccaggggacatagaatcccagacagggtgggtgcagtggcttacacctgtaatcctagcacttggagaggcctagtacggtggattgcttgggctcaggagtagaagagcagcgtgggcaacatagcaagaccctgtctctacaaaaattacaaaaaatagccatgcatggtggctcacgcctatagtcccagttacttagaagaggtgggaggggccaggtggggtggctcatgcctgtaatctcagcactttgggaggccaaggtgggcgtatcacctgaggtcaggagttcgagaccagactgatcaacatggagaacatgtattttagtctctactaaaaatacaaaattagctgggcatggtgacacatgcctgcaatcccagctacttgagaggctgaggcaggagaatcacttgaacctgggaggcggaggctgtggtaaaccgagattgcaccattgcactccagcctgggtgacaagagcgaaactccgtctcaaaaaaaaaaaaaaaaaaaagaagtgggaggatcgtttgagcccagaaagtcgaggctgcagtgagccaagattgtgccactagactccagcctgggcaacagactgagaccctgtctcaaaaaataaagaaagaaagaaagagagagagaaagaaagaaaagaaaagggccgggtgaggtggctcatgcctgtaatcccagcactttgggaggccgaggcgggcagatcacctgaagtcaggagttcaagaccagcctggccaacatggcaaaaccttgtctctactaaaaatacaacaattgtagggtccagccccacagggtcggtgggtttttctccgtttgcagagacgagagattgtggaaataaagacacaagacaaagagataaaagaaaagacagctgggcccggggaaccaccaccaccaagacacagagaccggtagtggccccgaatgcctggctgtgctgatatttattggatataagacaaagaggcagggtgaggagtgtgagacatctccaaggataggtaaggtcccctgggtcacgtatccactggacagggagcccttccctgcctggcagccgaggcagagagagaggagaaagagagacagcttacgccattatttctgcatatcagagacttttagtactttcactaatttgctactgctatctagaaggcagagccaggtgtacaggatggaacatgaaagcggactaggagctgaagcacagcatcacagggagatggttaggcctctgggtaactgcgggtgagcctgactgatgtcaggccctccacaagaggtggaggggtagagtcttctctaaactcccccagggaaagagagactccctttcctggtctgctaagtagcgggtggttttccttggcactgaggctaccactagaccatggtccacttggcaacgggcgtgttcccagacgctggtgttaccgctagaccaaggagccctctggtggccctgtccaggcataacagaaggctcgcactcttgtcttctggtcacttctcgctatgtcccctcagctcctatctctgtatggcctggtttttcctaggttatgattgtagagcgaggattattataatattggaataaagagtaattgctacaaactaatgattaatgatattcatatataatcatatctatgatctatatctactataactattcttattttatatattttattatactggaacagctcgtgccctcggtctcttgcctcggcacctgggtggcttgccgcccacaaacaattagccgcgtgtggtgggcgcctgtaatcccagctactccagaggctaaggcaggagaattgcttgaattcaggaggcggaggttgcagtgagccaagatcgcaacactgcactctagcctgggcgactgcaagactccgtctcaagaaaaagaaaaagaaagaaaaggccgggtgcagtggctcacgtctgtaatcccagaactttgggaggccaaggcaggcggtcacgaggtcaggagttcgagaccagcctggccaacatggtgaaaccctgtctctactaaaaatacaaaaattaggtgggtgtggtgacgggtgcctggagtcccagctactcaggagactgaggcaggagaatcgcttgaaactggcaggcggaggttgcagtgagctgagatcacgtccccacactctagcctggacaacaagagggaaactcctctcaagaaaaaaaaaaaaagaaagaaagaaagaagaaaagaagagagaaggaatggaaggaaggaagacaggaagagaaagagtgccaggattagcagggcgttcgaacccttagtacctacctctctccacacccccagcagagggcgaccaggacttctttcctgggagtctcagtgatcaaacccctccacttcccccaagcccatctgatggagctatttttatgcagtgtcaccggacaccagtggctagaaggccaccgtcttgtctctgcgcccttcagttcctgaaaatgaccctgtggcatctccccggcccacacccccaacccccgcccgttccggcaagaccagactccttttgccagagtcatagccgcagctcaggtcctgctaggtctcagaaagtcttgcgaagaatccaggtggagactctggagcgaactctggggagagaatggggcgtgtgtgcacatgctcagtggtttgcagctgccagagtgaccctaggatgggacagccaccgggactgtggcagcacccacatggagtgatggtcagggagagatcaagagatatgactccggagaccctaagtcctctagagaccccaaggggagacccaaaggggagcggccgaggaaccctgagacagagacatggagggctaagagataatgagcaaaaagagacctagagaggagagacaaagagaccaagagagacaagagataaacggagacagaccaagagtcaaaataaaggcggagaccgagacgtagaggctggcagagggacccatacagaggcccccagaacgacgaatctcagaaataaatgacccatagagatactcagagatacatcccaaaagagacagagacccagaggggacagccggacacagacacacaagagagtgagagacaaaggtgcaaacagggcgactccaggccgggcgccgtggctcacgcttgtaaccccagcaattcgggaggccaaggagggcagatcacttgaggtcgggagtaccagacctgcctggccaacatggtgaaaccccttctcaactaaaaaagaaaaaagaaaaaaaattagctgggcttggtggcgcctgtaattccagctactagggaggctgaggcacgagaatcgcttgatcccgggaggtggaggttgttgcagtgagccgagatcgcgccactgcactccagcccgggcgacagagggaaactgtgtctcaaaaaaaaaaaaaaaaaaaaagacagaaagaaagaagaaagagaaaagaaaagaggcgactgcaactgaagcctgattctgacgaaacacacgcacacggaaacttggagagacgcaggacaggatcccggcggcagaaggacggagagaaaggggaccccgggacgggaaaggcgcagagcaggcgcgggcggcggcggcggcggggcagggcagggcgggcgtcccggcagagggcgcgcggtcgccctgtcgccctccgccccgccggggtcacagtgccccctccctcgcgccctagccgccctgccgggctatttttacgcgcggacaccggacaccggacaccgggctggggcggcggcggcggcggccgaggcggccgaggcggggccgcaccggggccgggcgtcggggccacacgtcggttcgcgggtcgccggggctgcgcgcgccatggagccgcggtgcccgccgccgtgcggctgctgcgagcggctggtgctcaacgtggccgggctgcgcttcgagacgcgggcgcgcacgctgggccgcttcccggacactctgctaggggacccagcgcgccgcggccgcttctacgacgacgcgcgccgcgagtatttcttcgaccggcaccggcccagcttcgacgccgtgctctactactaccagtccggtgggcggctgcggcggccggcgcacgtgccgctcgacgtcttcctggaagaggtggccttctacgggctgggcgcggcggccctggcacgcctgcgcgaggacgagggctgcccggtgccgcccgagcgccccctgccccgccgcgccttcgcccgccagctgtggctgcttttcgagtttcccgagagctctcaggccgcgcgcgtgctcgccgtagtctccgtgctggtcatcctcgtctccatcgtcgtcttctgcctcgagacgctgcctgacttccgcgacgaccgcgacggcacggggcttgctgctgcagccgcagccggcccggtgagaggcggggcgtgggtggagacgggcggggtttgggaggagatgggcggggtccagaggggacctggccaatcataaggcggggc

SEQ ID NO: 7929 - DNA, 6000 bp, Homo sapiens
gtacaaggaaggaaatggccaggcatggtggcttgcggctgtcatctcagcattttgagaggccgaggttggagaatcgcttgagaccaggagttagagactagcctgggcaacatagggaaaccccaactctacaaaaattaacaatgaccaggcacggtgtcatgtgcctgtggtcccaggtacctgggagactgaggcaagaggagcacttgagccagggaggtcaaggctgcagcgatctgtgatcacaccactgtactccaccctgggtgatagactgaaatcctgtcaaaaacaaaaaagcaaaagcaaacctcagcgcatgttgctaagagctcccccagccacctctgtcaaggcgggggccttggctcaccattgggtactgcatttacccagtgctttagccacaactcttttcttttcttttgttttttttttttttttttgagacagagtctcgctctgtctcccaggctggagtgcagtggcgtgatcttggctcactccaagttccgcctcccgggttcatgccattctcctgcctcagcctcccaagtagctggaactacaggcgcccgccaccacgcctggctagttttttgtatttttagtagagacagggtttcaccgtgttggccaggatggtcttgacctcctgacttcacgatccacccgccttggcctcccaaagtgctggaattacaggcgtgagccaccacacccggcctcttttttttctttgtcttttttttgttttttttttgagacggagtcttgctctgtcactcaggctggagtgcagtggcacgatctcggctcactgcaagctccgcctcctgggttcacgccattctcctgcctcagcctcccgagtagctgggattacaggtgcccgccgccacgcctggctaatttttttgtatttttagtagagacagggtttcactgtgttagccaggatggtctcgatctcctgacctcgtgatccacccgcctcagcctcccaaagtgctgggattacaggcgtgagccaccgcaccggccagccacaactgttttctacccagagacacgtccccactaacctgaagccttaatgattcaacccagtgaataaaatactggggaaaaaaataaattaatttaaaagtgcacaccacagtggaacaaggtaagcttcaaaagacctctgccattccaaccccacaggagatgatgaacttgatcaccatcttactgagcacattgccactgcagccagcaactgagaagccagcgcacaaggactctctacaaccaaggaactcatacagaaccttcatccctgaaagcaccaagacctgaattaagcgccaataaactataaacattaaaatcaggctggatgtggtggctcatgcctgtaatcccagcactttgggaggttgaggtgggcagattacttgaggtcaggagtccgagaccagcctggccaacatggtaaaacctcgtctctactaaaaatacaaaaattagccaggcctggtggcacacatctgtcatcccagctacctgggaggcagaggttgcagtgagccaagatcgtgccactgcactccagcctggatgaaagagcgagatgcaagactctgtctcaaaaaaaaaaaacatcaaaaatcaatccttggccaggcgcagtggctcatgcctgtaatcccagcaccttgggaggccagggtaggtggatcacttgaggtaaggagttcgagaccagcctggccaacatggtgaaaatccatctctattaaaaatacaaaaattaggccaggcgcagtgggtcacgactgtaatcccaacactttgggaggccggggcgggaggatcacgaggtcaggagttcaagaccagcctgaccagcatggtgaaacgtcatctctactaaaaatacaaaaaacaagccaggcatggtggcgggcacctgtagtcccagctactcgggaggctgaggcaggagaattgcttgaacctggcaggtggaggttgcagtgagccgaggtcatgctactgcactccagcctgggcgacagagtgagactctgtctcaaaaaaaaaaaaaaaaattcaactcaatatggatcaaagacttaaatctaagtcctgaaaccaaaaaattctagaagataacctaggaaaaactcttcaggacattggtctaggcagcggtatgtataccattgtcatggaatattactcagccataaaaaaagaatgaaataatatcttttgcagcaactcggacagagctggaggccatatttctaagtgaaataactcaggaatgaaaaatcaaatgccattatgttctcacttttaagtgggagctaagctatggatacataaaggcatacagagatcatggactatgatctcatggaggcagagagtagaataatagttatcggaaccctagaaggatgcatgggtgagtaggtggggaatgaagaggtctgtctaacaaatatacggttatatagaaggaatagttcttatgtttaatagcagagtagggtgactatagttaacagtaacatattgtagtggtggctcatgcctgtaatcccaacaatttgggaggctgagacaggcagatcgcttgagcctaggagtttgagaccagcctgatcaacatggtaaaactccatctctatcaaaaacaaagtataaaaattaagtggtagtgcacacctgtagtcccagctgctcgggaggctgaagtgggaggattgcttgagcttggggaggtcaaagctgcagtgagccgtgatctcaccactgcactccagcctgggtgacagacagaccctgtcttttttttcttttttttctttttttttgagatggagtctctctctgttgcccaggctggagtgcagtggtgcaatctcagctcactgcaagctccacctcccgggttcacgccattctcccacctcagcctcctgagtagctgggactgtaggcacgtgccaccatgcccagctaattttttgtatttttaatagagatggggtttcaccgtgttagccaggatggtcttgatctcctgaccttgtgatccacccgccttggcctcccaaagtgctgggattacaggcgtgagccacagtgcccagcctgagtgaccctgtcttaaaaaataataataacgtattgtatttttcaaaataactagaaaagatgatttgaaatgttcccaacaatagaaataataaatgtttgaggtgacagatattcaaataccctgacttgattataccatattctatgcatggcacaaaatatcacatataccccataaatatgtacaaatatcacatattaataaaaatactttttaaaaatcaacaaggcagggctgggcgcagtggctcacgcctgtaatcccaggatgttgggactccgaggcaggtggatcacctgaggtcagaagttcaagatcagcctagtcaacatggtgaaaccccatctctactaaatatacaaaaaattagctgggcatggtggtgggcaccagtaatcccagctactcagggggctgaggcaggagaatcgcttgaacctgagaggtggaggttttagtgagccgagatcatgccattgtgctccagcctgggcaacaagagcaaaacttcatctaaaaaaaaaaaaatcaacaagccagacacagtggctcacgcctacaatgccagcattttgggaggctgaggcaggcagatcacctgaggtcaggagttcgagactaggctgctcaacatgatgaaaccccatctctactaaaaatacaaaaaattatccgggcatggtggtgggtgggtgcctgtagtcccagctactcgggaggctgaggcagcagaatcacttgaccttgggaggcggaggttgcagtgagccaagattgcaccactgccctccagcctgggtgacagagtgagactgtctcaaaaataaaaataaaatggccaggcgcagtggcttatgcctgtaatcccagcactttgggaggccaaggtgggcggatcacaaggtcaggagatcgagaccatcctggctaacacgctaaaaccctgtctctactaaaaatacaagaaaaaaattagccgggcgttggggtggacgcctgtagtcccagctactcaggaggctgaggcaggagaatggtgtgaacccgggaggtggagcttgcagtgagctgagatcccaccactgcactgtagcctggggaacagagcgagactccatctcaaaaaaataataataataaaataaaaataaataaataaaaatcaacaaaggagaaaggttcataggacaggatccagaagagaccatatgtgggattccagttgtcctttcccagtgaagtcatacagaaagcgcttaatgcttgaagcaaagatgagtgacaacatacagcaagtattgccacccagggaagctcacctgagcctcggcattcagagtttttactgggggttggtcacgtagatgcagctgactgcctgtgtggctgacctagtttttaccctctgtggagatacagcaataatacgtggtgcaaagcccccaccataaatcactgtgttcttgtagactcttccagtgtctcatggccccctggagaatgaatgaatgaatgagactctgcatccatcacctcacctgcagccgtgactcacctgtgtcccctgacagtcccctcctagcactgcccacctccgaggctggccagggtggctccttcctggtttggggctggtcctcatgccctctgccctgctgcttcccctgtgaaaggagaagttgggaagcgagctttcaggacatagcggttcccgaggctcctcctctgtggatggtcactgcccctccaccaggcttcctgctggaggagtttccttcccagccaggccggcccagaagccagatggtcccgggacaggcccagccccagagcccagagatgctgctgctgcccctgctgctgcccgtgctgggggcgggtgagtgggtcggtggctgggggtcccaggcaggggctggggctgccgctgagcctctgcatctccccagggtccctgaacaaggatcccagttacagtcttcaagtgcagaggcaggtgccggtgccggagggcctgtgtgtcatcgtgtcttgcaacctctcctacccccgggatggctgggacgagtctactgctgcttatggctactggttcaaaggacggaccagcccaaagacgggtgctcctgtggccactaacaaccagagtcgagaggtggaaatgagcacccgggaccgattccagctcactggggatcccggcaaagggagctgctccttggtgatcagagacgcgcagagggaggatgaggcatggtacttctttcgggtggagagaggaagccgtgtgagacatagtttcctgagcaatgcgttctttctaaaagtaacaggtatggaatggggtgggaacccctgcctgtcacactggggagggaccctggggacaggctatgggctgagcagagagggctctcagggacccctgcagcacaagaatctcccacccggtctctgtcccagccctgactaagaagcctgatgtctacatccccgagaccctggagcccgggcagccggtgacggtcatctgtgtgtttaactgggctttcaagaaatgtccagccccttctttctcctggacgggggctgccctctcccctagaagaaccagaccaagcacctcccacttctcagtgctcagcttcacgcccagcccccaggaccacgacaccgacctcacctgccatgtggacttctccagaaagggtgtgagcgcacagaggaccgtccgactccgtgtggcctgtgagtgtggcctgggagggtggggcgtgcagacagccccggtgggtggggaggtggaggagcccagcgggacagtgagtggctcc

SEQ ID NO: 7930 - DNA, 6000 bp, Homo sapiens
tctatttctccaaaatccatccatcctttatctaattctccatctacccatccaatcatccatccatccacccaaccctccactcatccatccctttatttatttctgcagcatccatccatcctatcatccactcatccatccattccttcatctttttctccaacatccatccacccatccacaaatccatccatcttctatccattcaaccactgactcattcatcccttcgtctatttctgcagcttccatccatcccatccaactatccactcatccactcatccactcatccatcccttcatctattcctccaacatccatccatctatccaccaatctatcctctatccatccagccattcactcatccatcccttcatctatttctgcagtatccatctatccatccccactctaactcttcatctatccatccaatcatccatgtatgcacccaaccatccactctttcatctatccattccttcatctattcctccaacatccatcttatccatccagccattcactcatccacctatctgtccatcccttcatctatccttccagcatctatccagtcatgcacccatccatcaatacatcatagattcacacattcctccacttatccattcacatgttcattcattcattcaaccaaccaataagtattgagtgcctaccatgcgccaggtactgtgccaggcagctgggacacagctatgaacaaaacaaagtgctactcctacggggcttgtgtgcttgacagccctcaaggtgccaaactccctcctgcccccaggtcttacatgagctgttccttctccctggagcatttcccctcccctccctcatcttcaccacctggcttatgcctactcatccttctgagctcagctgaaaagtcacttgctcaggaacttctctgacctctctcaaacacacagcacaatggatgttccttcctagcattgatcctagtatgaggatcctagtatgtgtagttatttgattattttctgtctcttccactagaccatgagctcttccaaccctggaattttagtctattttgttcccagatgaatccctgctgtctaaaaaaaaaaatgcctggcacacattaggtgctcagaaagtatttctcaaatgactgcatgaatcgagttgaatgaatatggaagattctatctctgtctcctggctccctgtccggtgttctttatattgttctatactcctagcagcagtagcatgcaagtcctcaaatgggtcctagatgcaaacagcatggtggctaaaggcaagggctctggattcagatccactccgttttttgttttttctttttgtgttttgagacaaggtctcactctgacatccaggctggagtgcagtggcacgatcatggctcactgcactccagcctggatgtaaacgcacatccatccggggggatgcaagaaggcacaaggacgggactctgggcagcctccatttccccacagcctcgacttctggggctcaagcaatcctcccacctcagcctccccccaagcaggtgggactacaggtgtgtgccaccatgcccggctaaattttgtattttttgtagaaatgaggtctcactatgttgtccaggcaagtctcaactcctgagctcaaaggatcctctcacctttggcctcccaaagtgctgggattacaggtgtgagccactgcacttggtccagacccatacagtttttaatctccactcacactttccagatgtgtgatcttgggcagagcgcttcccttggtgagcctcaatttcctcacttgtcaagtccagctaaagtttaaatgagcaaatgcatttaatttttatttatgacaacactaaacactagccatttttcctaagcaccttccatgaatttaatttaaccctcaaaataacccagtgagatacaatatgattttttctttctttcttttttttgagacagagtttcactcttgttgcccaggctggagtgcaatggcatgatcttggctcactgcagcctctgcctcctgggttcaagtgattctcctgcttcagcctcccaagtagctgagattacaggcatgtgccaccacgcccggctaatttttgtatttttagtagagacggggtttctccatgttggtcaggctggtctcaaactcccgacctcaggtgatctgccagcctcggcctcccaaagtgctgggattacaggcatgtgccactgcacccagccagagtatgattttttaaagtattattatctgcacttacagagagggaaactgaggcatggagaatctaagtaacccctccaaggttgcatagagaggggagcagagctgggatttgaatcccagtgctctgcccccaaagtcacacagaaaaccagtgcactacggctgcctctcaatgcctgggcagcctcggaatccgagcgtctctttggaaacgtgtcatggcagcgtggcaagcccatctgtgtgcccatctctgagtgtgtgcatcactgcgtgtctctccctgtggaacagggctacctgtggaccctgggcaggcccagcagggttcaagggtcgggctgttagagttggcatggggacctgcactcgtggtctgtaggtttacacccgcacatgcttccctggatgtaaacacacatccatctggggggatgcaagaagccacaaggaagagactcggcaaacctgggaggcatttctgggggttctgtggtagtataatggctgcaaaatgtacacataggcagcaataggggtagggtgtaatctaattagagggagggcccaggatgcgtgcttaaagttgtatttgcagaagcagcaagcaatttttacttttatttacttacttattttgacatttttatttcttgctctaaatatttatttatttattcatatttatgtttatttttgagacagggtctcactctgtcgcccaggctggagcccagtggcacaatcttggctcactgactgcaacctccaccttctgggttcaagtgatccttctgcctcagccccccaagtagctaggactacaggcatgcatcaccacacccagctaatttttgtattttttgtagagacagggttttgccatgttgcccaggctggtcttgaactcctgagctcaagtgatccgcccacttggcctcccaaagtgctaggattacaggcatgagccaccgcacctggctatttattcttgagatgggggtcttgctttgttgcccaggctggatggaatgcagtggtgcaatcatagctcactgcagcctcaaaatcctgggctaggccgggcgcggtggctcacgtctgtaatcccagcactttgggaggccgaggcgggtggatcacaaggtcaggagatcgagaccacggtgaaaccccgtctttactaaaaatacaaaaaaaattagccgggcacggtggcaggcgcctgtagtcccagctactcaggaggctgaggcaggagaatggagtgaacccgggaggcggagctttcagtgagcccagatcgcgccactacactccagcctgggcgacagagcaagactctgtctcacaaaaaaaaaaaaaaaaaaaaaaaaaaattcctgggctccagcaatcctcccacctcagcctcctgcgtaggtgggactacaggtgcacgccaccacacccactagtttggttttgttttggttttttggtttttttgttttgtagagatggagtctcctacgttgtccaggatagtctcaaactcctggcttcaagggatcctcccacttcagcctcccaaagtgttgggatttacaggtgtcagcccagcctttgatttttacctagaggttgtatttatttggatgtcactgattgagagcactgagggggcctccgagccacctctccaggctatgtagatctagatcaagcttgtccaacccatggcctgaggcccgcatgcagcacaggacagctttgaatgcggcacaacacaaatttgtaaactttcttaaaacattatgagatttttttgtgattttttttttctcatcagctattgttactgttagtgtattttatgtgtagcccaagacaacaatgcagtccagggaagccaaaagattggacacccctgatctagaccttacccaagggatttaacctccatgggcctcagttgtctcctctgtgaaatgggaatgtcataattgcacccaagtgaaaattaaatgagaaaacgctttcaaagcacttagcacttcaccacttataggaaatgacaattgccattaactgctattaatataccagaaactgttactcactacttttgagaaatattcattaagtacctagttggtaccaatgttttgtctacactgaccggtttttcaaactgtggatcccttaggaaataagtttatggtgtgtattttgctgatgaggaaacggggcctcagagcaagaggcgcacacaggcaggagttggcccaggtgggattcaaacccaggtccctgctagtacctctatcctggctgtggcactgtacctttgagtctcagcttccgctcctaccaccggccttcagagcggctcaggttggagggcctgaagtcctgggttcctgggaagaggggcctggggtccccggacttctacctctgtgagatagcggggcggagaactgggcccccggaccctggagaagcagcacgtcgtgatcctagatctctgggtccccagtgtggaaacccactgggtctctgctgccttagtcccgggcaatctccctgcttccttgctgaggccaagtgatttcggctttcttgccgcgggttcggagtgggggaaggagggggtgcagggggaggagccgcggacctgcgacagtggcgaggggaggagccgagccggcaccgcggctggcgcgcggggctgcggcggcggcggcggcggcagcggcggcagcggcggctccgggtgagtccgctcctccccctcctcctgccacagccccagccccagtcaaatccctggggtcggccccggcgcatgggggcggggtagatgcagaggcgcgtggatctcgggccggggagtgggagcgctgcagcgctctctggccaccccgggggaggggcacgtggccctggaagggggtcccgaaacacctgggtgtatcccacccctcgcccaccgatccccagcgcggggggatcgtttcctcattccgtggcccctaaggacttagggctccgtggcttttcgaagtcccggacatcgttcccctcccctgaagcgtcttgggaccccagcatcttaaccccccaaaaccttaaaaaaaaaaaaaaaatcccatcctctctgcagcccggaggcattaaggacttcaactcccagcagatcctgcagcgccgggtctatgaagccgcagcagcgcgagcgcgagacctgccgggaattgtagtctctaagccctcaacgggagctgggggcccggaggtgggagggggtggccgggctcccagtgggtcgcctggggtcgggcagctggctcgagtagggcaagatgtgactgttaagctgagctttttctcccggcctcagcccctagatcagacattctctctcattacccggcgcgtgggaacgggtccacagccccttgtccgccctagaacccccatgggctgccgcccgccgccgcctcggctgccacccaggacacggcagagataagcgcaggtgagtgtggccatgcctgtcttggagtcctggccttctgcagcacccccacgacacctgtccatctgtgagccctggtctgtctgttcctaattcccctgcatccccttcaacccatcttgatgcctggctccgagccatgtgtcactaattccccctctccccacatccacctctccttcctagcctcctctcat

SEQ ID NO: 7931 - DNA, 6000 bp, Homo sapiens
aagaacatttgttgaacaataaatctttattcaggccaactgacttacataaagtaagtgctgtttattgacttacataaagtattatttattgaaatgtactctaatgatactgagatttaatatctttttatcattataatagccattaaatattatgactagagtgcacctcaatagaaatgatgatgccttccataataactgtttaccattagcattcatttctttaatagaacgtaggttaattgaggattagtctttttaaattttattttattttattttttttgagatggagtctcactctgtcacccaggctggagtacggtggtgcgatcttggctcactgcaacttctgactcccgggttcaagcgattctcctgcctcagcctcccgagtagctggaattacaggtgcacgccaccactcccagctaattttttggggtcttccgtggcagatgggggctactgaggagctttcaagcccgggagaggttggaaggggctggagaaagttggaagagacctgggtgattcaaaaaaactgacagtgcttagacaagactgacagagacctaagagaaccaagtggccaagcaggcgacgtgagctgtgaaccccgaaaatctgagacaggtctcagttaatttagaaagtttattttgccatgtagtcacagctactcaggaggctgaggcaggagaatggcgtgaacccgggaggcggagcttgcagtgagccgagatcgtgccactgcactccagcctgggcaacagagcgagattccatctcaaaaaaaagaacaatagaaagtttattttgccaaagttgaggacatgcgcccgtgacacagcctcaggatgtcctgacgacatgtgcccaaggtggtcggggcacagcttggttctatacattttagggagacatgacatatcaatcaatagatgtaagaagtacattggtgcatccaggaaggtggggacaactcaaagcagggagggggattccacgttacaggtaggtgagagacaaattgttgcattctttgagtttcttttttcctagatggagtctaactctgttgcccaggctagagtgcagtggcacaatctcggcttactgcaacctccacctcctgggttcaagtgattctcctacctcagtctcctgagtctgagactacaggcgtgcaccaccatgcccggctaatttttgtatttttagtagagatggggtttcaccatgttggccaggctggttttgaactcataacctcaggtgatccacctgcttaggcctcctaaagtgctgggattacaggcatggcctcttttgagtttctgataagcctttccaaaggaggcaatcagatatgcatcgatctcagtgagcagagggatgactttgaatagaatgagaggcaggtttgccctgagctgttcccagcctgactttcccctttagctcagtaattttggggccccaagattttcctttcacagagctctcaggaaaagcttcagaaggaggcctggggttttcctctggcaaccacagaccacatctggttgagaaagctgctggagatcctgcgagcaattctgtcttcaaggccccagctgccttgcctttgtgctcttaagagatggtcttggctggctgggtgcggtcactcacgcctgtaattccagcactttgggaggctgaagcaggtggatcacctgaggtcaggagttcgagaccagcctgaccaacgtggagaaaccccgtctctactaaaaatagaaagtcagccgggcatggtggcgcatgcctgtaatcctagttacttaggaggctgaggcaggaggatctcttgaacctgggaggcagaggttgctgtgagccccgatcatgccattgcactccagcctgagcaacaaaagtgaaactgcgtctcaaaaaaaaaaaaaaaaaaaaaaaaaaaagatgaccttcactcacccgctcttactggcttgtggtgtctgtcagagggcctgggcctgtgatcagcctgtgatacctacatgtgcagagactcactggagccaggtacaggtcacctctgtgtatgcatgcatgcatgggtgtgatggtggtggtagtgggacccacttggggagatgagaaatgaggttacaggcttggacctggaggtgaaaggagaatgaaaatggtcggagttaggtatgaattatagaggttgcagagaagaatgaaaagacagtggctgggcgcagtggctcactcctgtaatctcagcactgtgggaggctgaggcaggtggatcacctgaggtcaggagttcaagaccagcctggccaacatggcaaaaccccatttctactaaaaatacaaaaaaaaaaaaaaaattagcctggtgtggtggcgtacaaccataaccccagctactcaggaggctgaggcacaggaatcacttaaacccaggaggcggaggttgcagtgagccaagatcatgccactgtactccagcctgggtgacagagtgagactccatctcaaaaaaaaaaaaagggttgggatgggaatgagaatagggtcaagtttcaggaagaggatggggttgggtttggagtaggggctggggttaataatggagaggggtttggtttggagatagggtggggtttcagaatgagaatggagttagatttgagggtgggaagggtataagggttggaactgggaataaggatgatgttgagtttgggaattagaatgacgttaggtttggggatgggggcgaatcgggggatggggttgagtgtgtagttgggactgagaatggagttctatttgaggatgggggttggagctagggtggagattacgaatagggatgggattgggtatggagttgtgttcaggaatgggaatagggttaactttggggatagggatgggttgaatttgtggttggaactgggcttgatactgagtttggggatggagttgggtttggggttaaggatggctttgggtttgggagggggtcagggtcacagatagataggctgtgtgctctgacctgctactcactgcacaccatggcaggttttccggagacctggcctgctcatggcctctgccacctctgggagcctgtgctcataaatgtgttctcagagtggtgcagatctgagtgaaggatgggggctgccgatctgagtctctccaataaaggagaggaaccagtcttccaggtcatttcccattctccacatttgccagctgtcctgggactgctggaccagttcatctccaagacagaggtcctcttccagactactccctatgtattagtctattctcacactgctataaataactgcctggccgggcgtggtggctcacacctgtaatcccaacactttgggaggccaaggtgggcagatcacctgaggtcaggagttaaagaccagcctgtccaacatggtgaaaacccgaaaatctactaaacctgaaatctactaaaaatacaaaaattagctgggtgtggtggcgggcacctgtaatcccagctacttgggaggctgaagcaggagaactgcttgaacctgggaggtggagattgcagtgagccgagattttgccactgccctccagcctgagtgacaagagtgagactctgtctcaaacaacaacaacaacaacaacaaatgcctgagactgggtaatttataaaggaaagaggtttatttgattcacagttcagcatggctggggaggcctcaggaaacttacaatcatggtggaaggtgaaggggaagcaagccactgtcttcacagagtggcaggaagaaggccaagcgaaggcaggaagagccccttaaaaaaacaccatatcttgtgaaaactcactcactatcacaagaacagcatgggggaagccggccccatgattcaattacctccacctggtctctacctagacacgtgaggattatggggacacaattcaaggtgcgatttgggtagggacacaaaccctaaccatatcaccgtttcacagaggtcaagttttcctgggccttctacctgggctgtggtaccgtcaccttatacctgctcgtagatgaggtgttgccaggacctgatggtgtggatggaagaggctagcgtttggggggctggagaaccctaaaccaaaatccttatgtcccccaacaccccctaggccccccgatcctggtgataaaggccaccaggctggagcccccacccaagcagggatgccactgaactcattaatcagatgaggatgtgggtatgtctgactctctgcaaacctttcagaattgtgattctctgctgtttgcctgcccttggcatatgctccaaactggggcccaggattctgagctcctgcccgcctcttcctccctcaggacctggagttcaggcccccagctccttcctccttaagccccaggagttctaactcccaagtcccctccttcagtagagaccctagacttggggacttcctctcccagaatggaagactgcataacccacaggaaagcatgacacatccccagctgtcccctccagccacatctgccctcccccttaatgtacaccctagcctgattggcttcctcccacctcagggcccccaagcctctctctctcacctcttccaggaagccccgacttggtgttgaaggttccatgggtgggagttgtagaatctgtgacagaggcaagtactaaaccaccgcccaaaccactgatgatctgacaccctcagtgccctcccccatcacacactaagcggggaactggaccccagggaggggagggaggacgttgcctgtgcaatccaggaagggagggtatgtgaaaagctaccgggaactgtgtgaaaccaaaccagcctcatgtgacaaagcgcaggacccctcactgccccaactgcttgctgttctctctttcttgggctctaaggacccaggagtctgggtgcacagcctccttctctctgagattcaagagtctgatcagcagcctcttcctcctccaggacccagaagccctgagcttatccccatggagctctgccggtccctggccctgctggggggctccctgggcctgatgttctgcctgattgctttgagcaccgatttctggtttgaggctgtgggtcccacccactcagctcactcgggcctctggccaacagggcatggggacatcatatcaggtaaggggaatgggtgtcctacagaggggttgccagcggggatgggtgctcagtggtcttctcccgatcaggctacatccacgtgacgcagaccttcagcattatggctgttctgtgggccctggtgtccgtgagcttcctggtcctgtcctgcttcccctcactgttccccccaggccacggcccgcttgtctcaaccaccgcagcctttgctgcaggtaaggactctggactggactggggcatcgcgagccagcgaattcctgccgaggagctgagccatctctcttgtccttgtccccagccatctccatggtggtggccatggcggtgtacaccagcgagcggtgggaccagcctccacacccccagatccagaccttcttctcctggtccttctacctgggctgggtctcagctatcctcttgctctgtacaggtgactatcctgcccactgccctggggagctttgggagggtccagttggggtccctgaggacagagggcaggggcaagtgcttaaactctttctggctccccaggtgccctgagcctgggtgctcactgtggcggtccccgtcctggctatgaaaccttgtgagcagaaggcaagagcggcaagatgagttttgagcgttgtattccaaaggcctcatctggagcctcgggaaagtctggtcccacatctgcccgcccttccagcccttccccagcccctcctcttgtttcttcattcattcaa

SEQ ID NO: 7932 - DNA, 6000 bp, Homo sapiens
taatgtaccatgtacattacatgacaatgtaagatggcaacattaggggaactcctgtctggagtaaatgagaactctctgtattatctttgtaacttttctctaagtataaaagtattccaggccaagcatggtggctcatgactgtaatctcttggtactttgggaggccaaaacaggaggatctcttgaacccaggagtttgagaccagcctggacaacattctgagaccctgtctctacaaaataaggcaccccgtgtggtagtgtgtgcctgtggtcccagctacttgggaggctgaggtaggaggatggtttgggcccaggaggttgaggctgcagtgagccatgatcacaccactgcactccagcctgggtgacagagggggaccctgtctcaaaaaaaacacacgcaaaaagtattgcaacataaagcatttatttaaaaatataaatacctatgccactcctcttagctgattattttccagtccctgaatcactacatttgttttactttcagaagctgttccctccccaggaatattcaacttccagtcttccagtaccttcccataacagccttttctaaccatcttatctacttaattttttattctttttttttttttttttttttgagatgaagtttcactctgtagcccagactagagtgcaatggtgccatctcagctcactgcagcctccgcctcctgggctcaagtgattctcctgcctcagcctcccaagtagctgggactacaggcatgccccaccatgcctggctaatttttgtatttttatttatttatttatttattttatttatttttgagacagggtctcactctgttgcccaggctggagtgcagcggcacgatctcagctcactgcaacctctgcctcccaggttcaagcgattctcctgcctcagcctctcgaatagctgggattacaggtgcctgccaccacgcccagctaatttttgtatttttagtacagatggggtttcaccatcttggccaggctggtctcaaactcttgacctcaagtgatccgtccacctcggcctcccaaaatgctgggattacaggcgtgagccaccgggccaggcccctaaccacgttatctgctctatctccctacctcggtgactctatatcctcttgccctgatttgacatcttcaggtacatattcttacagaatatatgctatgtatgtctcgtctgtctcccttacaagcatgcaagtttcctgagagtaggggccatgtctattctgtcccgtgtgcagcctggagcccaaatcatagcaggcattgaatatttcttaaatgaatgcatgtaataatgacgattgcttctcagcaaaacactgtcacaaccaccagcaataacaataagtaaatctcatgtgttcagcctaattgtggtccagattctgtgtctactaatacacaagtaatatcacaagaacctggacagtaatattagccccatttctcagatggagaaactagggcatagagagtagaagcacctaaagtaacaaagcaagttagagacacggcacctagtagaacccagcgcctagaatggctaagacctccagaccatctaccacgccctctgccctagggagtgtccacatttccctacctaaaacgtcccttgagtcctaaagaatctgtcttgaggatatggcaggaataaagagagagaaagacagagagagagagagaagggggcaggggtcccgggactactgaatctgagagaggaagggggctggggaaccagagtacggggtctgaagaaggaggggctggagcctggactcccgggtctgaaggaggagtggctaggaccctagacttccgggtctgagggaggagggggctggggatctggactcctaggtcttagggaggaggaactggggatctgaactcccgggtctgagggaggaagagctggggatctggactcccgggtctgagggaggaggggctggggccctagacttccgggtctgagggaggagggggctggggatctagactcttgggtcttagggaggagctggggatctggactcctgggtctgagggaggaagagctggggatctggactcctgggtctgagcgaggaggagctggggatctggactcctgggtctgagggaggaggggctacagggtgctggaggccttaagtaagtgatcttggggaactagatccaggtccccgcctgagctctttcttttgggatcccggataactccgcgagccacgccccatttctgacccggccaagccccgcctctctcggcctcggcccctccccaaccttcccgggcccccgaaggatctcggaggcgaagttgctagaagatacgtaagagggccccagtggagatggaacaaccaaaggacggggctgggcctgaagggtgagacaaacaaagacctcctgagagggggacagagacccagagagaggaggggacagagaaaacgagagagaaagggcgcgctgaacagacctgcatagagaatcaggaaaaacaaaaaaggctcaggtatcatcacataggtacagaatcttagaagatcttggtgagagttgagcgagatacttagaaacaggcggaggccgggtgcagtggcttatgcctgtaatcccagcactttgggaggccgaggcgggtggatcacatgaggtcgggagttcgagaccagcctgaccaacatggagaaatctgtctctcctaaaaatacaaaattagacgggcgtggtggtgcgtgcctgtaatcccaggtactcgacaggctgaggcaggagaatcgcttgaacccgagaggcagaggttgcgttgagccaagttagcgccattgcactccagtctgggcaacaagagtgaaaccccatctcaaaaaaaaaaaagagctagaaacagatactcatcgaacagaaatttccaagaataaaccaagaaatgtgaagactccagggatccccagaaggctggagaaatcgtagctgtccactgttttagcacttaccagacccagcgctgtcatacgcacctttgataccatccaaagccatctgtgactataaacaaattaaggttcggaataggaaaatgatttgtccaaagatacaccaccaaaagcgaggccaccaggaattggaactgagttctgtctggtgccgaagttcatggcagagctgtctgtttctttagagagacccgggttagaaacaaaaagagagaagcgggggaggaagtcacaggtgggcactgaggatggagagatggctgccttctgcagaggtgcagagacagcctggcagcgagaaacaagaaagtacggagacgctgagccccactgacctgtctttttgttgttctaggaacaacctgtccctgccgtcatctgggaccgagccatggccccctgcgcctctcccagcccctccacccttgctcctgaactccacagaccccacccacctggggctcccggagagcgtggcctctgtcaccgtgcccatacgcctggacaccctctcctgcctcctgcacagcgccctgctgggggcctacaccttccaacaggccttgccctcttgcccctgctgctcccaggcaggccactcccagccgggggcagttaggaggcctcccaggggacgcggaggctgggaagtcaggcacaggccaggctggggccgaggcctgcatcgacggggccttgggagagctgagcagccagagaggggccgggcggggggccctggggctggccccaggaccccaccaatgacactgccatcaccaccaacactgcctgcccaggatgggaagaaagaagctcgaggtccagagccacccctggaaacaccactggctgctgaggactgggagacagagtactaggaccttggagggtcaggcacctgagattgcagtcacccaggagggttttcctggggcccagagtgatctcagccctgtcagaagaaccccaagaaacatcttccatcctcccctctccccaaaaccacaatcccaggagtagctcctgtgaggcacttggtgaacctgacctaagtcacctgaatcccaagtgagaagaaaatcctaaacctcgtacccaaacctgtctccttgatggcctcaaccccattcccaatgccatccccaaccacaaccacaatccttacctcattctcaacccccagggctcctccaaccccattccctatcctctccctaatcccaaagccactcctacctgcctctctcttccccactctcaataccctgttcccaaacccattcattcccatccctgtcaccagtcccagctccacttctgcgcctcaaccctaacccaccctctttaccaacccctttctcctcattgcctgtgtacctcagcccatctttaatgtcctctgaatctacagccccaaagagctccatcctcaacctcagccacagccctgtgtccatccccacaaagaaccgcattggccccacatacccagacacctgtgactccccaccccactgcctgctcttcaggtagaaagccctggttgaacaataaacgcatgactctccctgaatcttgcgtgtgtgcgcgcgcccgtgtgtgtgtgtgtgtgtgcgtgtgtgcgtgcttacacagctcggacaaagccagggttgctttgagcaaggctggcgacaaggtattgggttccggggagggtcacagaggtcagtgagtgggtggggggagccccctggatgcctgcttcagcgaattccatttgaggcctctgccaccgctgcatttctgcctgctggaagctgctgggtagtgggaccattgtgtagggaggcttaagggatttggggaacctaagggggcaaagaggccagtgaccaggctcagctcagtctgcacagaggggccgtggcagaaggagggctcgggcaggctctgccactcaggtaggcaccaggcgtgagacctgtagccccctcttccccaagtcccaggagtctagggtcccagctccttcttctcccaggacctggtgtcctaccccctagcccctagccccttccttacccaccacccaggaatccaggctcctgggccccttctcacctaggactcaggaagctaggcctccagcctattccttgctcagaacctggaagtccaggcccccggccttttcttcccagaacccagccccgctctccctgttgtctttccaggatccctaccatcctcctccctcagacccaggagtccgggctccagtcccctcctcgcccaggacccaggcgtctaggtctccatctccttctcccaagcacttggcatcccactcctgagccctctctccccccagttcctcccttcaagtcccgggaattcagctcccaatcccatctctccccttccccacagatcaccatgtacagcttcatgggtggtggcctgttctgtgcctgggtggggaccatcctcctggtggtggccatggcaacagaccactggatgcagtaccggctgtcagggtccttcgcccaccagggcctgtggcggtactgcctgggcaacaagtgctacctgcagacagacagcatcggtgagccccccggccagggtccaggccgcgcctggggaaagagcagggcggacctcggggcccaaggacacctgtattccagatggagaactctgcggctcaaagagggaaagggagcaacccaaggtcactcagcatggagggggcagaactgggactacagggttgttttctagctgcagtttcacggggtgctggtttgaaggttaagttgggagaggtggcatttcctgacgcttcagaggtgtcatgcacagcaattggggctagtgtcacgaaacagcattttctaaatatgtactatggaccaagaactatgttaggtactggtggata

SEQ ID NO: 7933 - DNA, 6000 bp, Homo sapiens
agccgagatcgcaccactgcactccagcctggcgacagagcgagtctctgtcaaaaaaaaaaaaagagtgtgaatattttgaagggctttatatcttggggagggtgggtttgggatgagagaagtggagtgacgatggtgacttcgtttttgctttaatgtgattcccccggaggagatcttgttctaatgtgtggcgaaaagtagcctttttagagagtactgtctgcaaacgtgtccagagcctgggactcgttcccttgggagcctcccttctgcaggaccatggacagcgcgggctctggggcccgaggctccgcggtgccgcctgctctgaaggtggagcgccccctgggggcggcgtcctgaactgcagcacagcccgaggtgggaggaacccaggaccaggtccggagctcaaaggacacaaagacgctggtcagggaaggtccagatcgcccttcttccgacaaaacctcctgggctccctcggggtctcagctgcagccactcgtgggctctccatcctctccaggaccctggccctcgcccctccctcctcaggacgcggtcctcacgccgcacctgcgccccccggggcgagatcctgccccgacccctgtcagacacccccgcctctccctcccccacctcccaccgtccccgcccttccttccagcgcccacttgtgccctcgtgcagctccggggtctggagcctgggtggggcttcctaaacccctccgtgtggaattatggaggaagagcaggcgcctagcccctgctgaatgaaggagaggcgggtgcgggggtgggaggctggtattgagggagctggttttggagggaagcagctcagggaaaacccgaaccttctcaggccagaaaacagacttgaggctgcccagaaaccagtcccggggccccaggcagcctctccagtcctgtctgaccaaggctgggagggcggcttgggtaggaagggctgggagcaagtcggggcgtcgggggctctggcctcgctggagaaggggacgtggtgaggaggccacagaaaccacaggaactcagaaaagtgaagaggggggaatgggagggggcagcgatgtggagaaacccgcgggaggaggaagacggtgccgctctcctggctcctgtcggctgatcccatgggtgtgaaatgttcaaaggcagaggtggggctgggcccaggctgggggccctagagatcatcagctccttagggacccacctccaccaggacccaggcacctttcctcccctcactcctccctgggagaggcccttttctgagctctgtggagaggaaggtgtgatgtgtcccaccacaagagctcccctgcgggaaggaggctggtgtcctcagagaaggcccagattaggtcacagggaagcagggatcaaagggaaggtgaagctgggcttggtggctcacgcctgtaatcccagcactttgagaggccgaggtgagagggtcacctgagatcacgagttcgaaaccagcctggccaacacggtgaaaccctgtctctactgaaaatacaaaaataagctgggcatggtggcaggcgcctgtaatcccagctactcgggaggctgacgcagaatcgtttgaacccgagaggcagaggttgcagtgagctgagatcatgccagtgcactctagcctgggtgacagagcacaacccagtctcaaaaaaaaaaaaagataaaaataaaattaaaaatatgaaaattagctaggcgtggtggcaggcgcctgtagtcccagctactcgtgagcctgcaccaagagaatcgcttgaatcagacagggagcggctgcagcgagccaagatcatgccactgcactccagcctgggcaacagagcaacactctctctcaaaaaaaaaaaaaaaaaaatggggagaggtggatattagggtctgaattgtgtcccccctccccccaccaaatttctgtgttgaagtcccaacctccagtacctaagaatgtggctgtacatgcagacagtctttaaagagatacagttgttccactgtattagttggggattggttccaggatccccaccccttggataccaaaatctacaatgctcagctgccttatacagtagtgtttgcgtgggacctctgcacatcctcccatctccaggttacttatcacacctaatacagtgtaatgcggtgtaaatagttgttatgctgtatttttaattcatgctgttttttatggttatgttggcttttgttggttttgtatttaaatgccgtgatgggcaggtggttgaattccgggatgtgggacctgtgcatactgagggccggctgaaatgaggtcactcatttggactagagtgggcctagtccaatatgacttgagttcttgtaagttcttataagagcaggagttgaggaaacagacacccacaggggaacagctgtgtgagaacacagggagaagtggcatctgcaagccaggcagaagcctctgaaggaaccacatcttggttttggacgtctagtcccagaactgtgaggaagtcaatgttgttgtttcagcccctctgtctggggcacgctgttacagcagctcaagcgactgatacagtggatgaggccgtggagcacacctgtaatcccagcactttgggaggccgaggcgggaggatcactggagcccaggagttcaagaccagcctggccaacatggtgaaactctgtctcagcaaggtgcagtggctcacgcctgtaatcccagctctttgggaggctgaggcgggtggatcacctgaggtcaggagttcgagaccagcctgaacaacatgaagaaaccccatcttttctaaaaatacaaaatcagccaggcatggtggcgcatgtctgtagtcccagctacttgggaggctgaggcaggagaatcgcttgaaccccggaggtggaggttgcagtgagccaagatcatgctactgcactccagcctgggcaacaagagggaaactccatctcaaaaaacaaaaacaaacaaacaaacaaacacctctgtctctacaaaaattatcaaaaaaaaaaatcaaaaattatctgggcgtggtggtgtgtgcctatagtcccggctagttgggaggctgaggtgggaggatcgcttgagcccagaagatggaggctgcactgagccatgatcacaccactgcactccagcctgggcaacagagcaagaccttgtctcaaaaacaaaaaacaaaaatgccatggatgaaagaaccaggacagggcagaggctgggtcatctcctccaggaggcctctcctgacttccctccaccaggaagagctgaccactccttccccaggtcccatcctgaatgtctgtccagcatccagttcatttaggggaccttctgtactttgtttctaagaatcttcatttgctaacctggggccctggagctgactcaccatggaggattcacctccaagtccccctaaagctcagtgcttgatacccaaggtatgtggaggttgaaggatgagttctgtgtttcggtgtgacccaaacagagtcatttcaggaagagctcagtgaggggaaaacatcttgtagagtttactccattcattgcaaattaccccttccctagtctgttccccccactctgcccctcactcccgccttcctcaaactcttcccatcagcattagctttggacatatgtgttctaatcccaatgggtgtcccaattgaatgacagaggaggaagggagactgggaagtggactagggcctggttggggcaggagactgcttctggggaccaagggtcagtgagctcaccaggaagcatgaagaggtggagctgacaccaccctacggtggccagatttagaaaaaaagaaattcaacatgctcagttaaatttgaattttaggccaggtgcggtggttcacacctgtaatctcagcactttgggaggtcaaggcaggtggatcatttgaggtcaggagttcaaaaccagccctgccaacatggtgaaaccccacctctactaaaaatacaaaaattagcttggcgtggtggcgcgtgcctgtaagcccagactcaggaggctgaggcaggagaatcacttcagcctgggaggtggaggttgcagtaagcagagattgcaccactgcactgcagcctgggtgacagagtgagactctgtctcaaaatataattaattaattaattaatttgaatttcagataaatttattttgctttctggtataagtatatcccatgcagcatttcggacatacttataccaaaaaacataaaataaaatactttatattgtctgtgaaagctttaaccaggcatcctgcattttacctgacaagaccagccccctccagtaacggtcccttcccctgtacccaccacctccaccaccagtggcccagataagggtagctcactgtggacttctcacttctgcttttccgatgacccagggcccagagggagagcccccaccccactaccccacccccagccaggcccccaggatagacacaagcctgccctctcctcctacacagggagctctggaaggaccagctcaacaagcccaaggccaggctgggcccccaggagacccagaggacaactgggcaaggtgggccggagagtgtgggggaaggcaaaggagttctgtgagctcagcgtctgaagctcatttcatgcatcaggccccagggctcagcttccgccttcggcttccccttctgccaagagccctgagccactcacagcacgaccagagaacaggcctgtctcaggcaggccctgcgcctcctatgcggagatgctactgccactgctgctgtcctcgctgctgggcggtgagtgggccaagggccggaaaggacctggggcggagctagggctggggttgcaggttgagcctctgtctccccacagggtcccaggctatggatgggagattctggatacgagtgcaggagtcagtgatggtgccggagggcctgtgcatctctgtgccctgctctttctcctacccccgacaggactggacagggtctaccccagcttatggctactggttcaaagcagtgactgagacaaccaagggtgctcctgtggccacaaaccaccagagtcgagaggtggaaatgagcacccggggccgattccagctcactggggatcccgccaaggggaactgctccttggtgatcagagacgcgcagatgcaggatgagtcacagtacttctttcgggtggagagaggaagctatgtgagatataatttcatgaacgatgggttctttctaaaagtaacaggtatggaatggggtgggaacccctgcctctcacactggggagggaccctggggacagcctatgggctgagcagagagggctctcagggacccctgcagcacaagaatctcccaccacggtctctgtcccagccctgactcagaagcctgatgtctacatccccgagaccctggagcccgggcagccggtgacggtcatctgtgtgtttaactgggcctttgaggaatgtccacccccttctttctcctggacgggggctgccctctcctcccaaggaaccaaaccaacgacctcccacttctcagtgctcagcttcacgcccagaccccaggaccacaacaccgacctcacctgccatgtggacttctccagaaagggtgtgagcgcacagaggaccgtccgactccgtgtggcctgtgagtgtggcctgggagggtggggtgtgcagacagccccggtgggtggggaggtggaggagcccagtgggacagtgagcggctcccagctcaggagcatccagggagaggaagctgtggggtcccaggatgccgccgcagccctgggagggggatgggaatggcgtctggtccacacacgtgagccctggcgctggttgtcacttgtcttcc

SEQ ID NO: 7934 - DNA, 6000 bp, Homo sapiens
gcctcagcatctggagtagctgggattacaggcacatgccaccacgtctggataatttttgtatttttagtagagacggggtttcaccatgctggtcaagctggtctccaactcctgacctcaagtcatctgcccgtgtcggtctccggaagtgctgggattacaggcctgagccaccacactccacccctaatcaccccttctaataaagacacagctcatgtaggatgagagctaacaacttcattttaacttagtcacctttttataagtcctcgtctccaaatatggtcactttctgaggtgctgggggttaggacttcagcataggaatttgtaggggacacagttcatccctgacaccccgtaagtgttgacatccgacgatgcacagtgcaggtaagccccctcccaagacagcaccgtgggttttacagagcccagctcaagccagcagccatccagctacagagcctgtacccctgaactctctctgtgaggcctcagctgaggaagccccagagcagtgtggaccaccaggagctccttactgagggcaggactccgagtgacccctgagaatggttagggccagacacgtggatgcttcgggcctgcccagggacacagagcatgttggccatgcctgagtctgcagagaacgtcgcctcctcgagctgggttctccctcaggctgaggggtgggtgctgtgatccctccaggggacagatgaggagactgagacttggagggagagggcccaggaccctcacactccagagccagggcctcccctagcatcttgggctcagccttgctccccatgctgggctcacagggcctcggctgtgcagtcaccaccaggcatgctgggcagggggcactgagaaggttaggaaggctggggaccacctgtggggccgcatgctcacagcacctcagagtcctggtcccgtccactctgcccgagtatacctgagaccgcaccttctagctgcacagggccctcggggttccacaagccctgcctgtgtttcaagcatcacagcccttactaacaggagctggggtggcccagggctcctctgccccctcgttcattagggaacttcccaaggaaggagacagagtctgtcacactctcccctttgcctccatccccctgaaaggaggagatgctcctgatgtggtgattgtgctcattcattaaacatcacctctcccgcctcgggggacccctccccatctctcatgcctcgtggttcctccgccagcccctcctgagtcccagctctggcaggactgaccctcccgagcacctagaagctgtaatggacaggcagtgcctgcttccctggtgtggacagtgctgtgggagggaaaggctgtgggcagagagcctgcagctgtgggtcggggcctccctgctgtgtgtggcccacactgaagacccatccggagagtagaaatggccactccccaggagccctgacagctctggcagtgtcggggccaaggtcctcttttgtggtcagttatttttctgatcttacccccaggcttcctgtggggcccttctagggccctgcgacaccaaggctcaccctaaagaagctcacgctgcaatagctgctgcccctgctgtgggcaggagaatgggcctcagggagaggaaccatggggctgggctgggctgaccctcatttccccacaggggatctggctcaggatatgagatcccggcaggaagccccagagttggtgcaggtgcaggagggtttctgtgactacgcactgctccatcttccacccctgtgggtacctgtctgactccagccctgtccaaggctactgtcccagaaaggggacatttccatcaggatcctcaagtggctggaagcaatctagttggaaaagagcaggaggagacccagagccaattccacctgcttcagaccccaggccagcacctgctttctggacgtcagagacacacagaggcgagatgcagggacagacctctttagggagaaaagggagatctatgtgaatgtaattacagaaatgctctatgtgcatgtgaagggtaaggaatgaggttatgaaaggacacacgaatgggggttcccagggcagtgaagctgacacatcaaattaactgtcacactgcccaaggaggcagtgctcagctcatacacagaaacacacaggtacacacagacactccctctccctcacacacagggtctctctctctctgtctctctctctctctcaatcacacacacacacacacacacacacacacacacacacacacccaagcattgggcattctgggtactgagatgcgctgtgtccttccctttgccctgggaagctgggtctcccctgaaaaggtgaatggcgctagttgtcaggtcaaagagaccctgggacatcgtcttaggatgagagaactatttgggatgccattttatggatcccttgcctgtcactgtatgtgtctctctgggccacctgtgtccatgtgggtcaccaatccccatgtcaggattcaatgattctctgctccctaaggcatagcccgtggtgtcccacacgccctccttgccgtccagcaggtgaacaagtgagcggctatcgtgtctccctatgagatgggccagtggtcagcgtcaatatgtgagagctgcaacagctcctgcccctacacggacccctcagggctgctgctccaacttcccccttcccttgtggtgaactttgtccaggaagcaaacagggaaggggattctgggaattgtagttccagcctggctaagttgctggagagcaaggcctgcacaggagtcttcactgaaggcttcaattaccacttggggaccatggaaaagacctgtgccatggctcggcccttctgactattgagatactgcagctgtctctactgggcaaggataggaggcccaggagggggaaatggctgcagaatgagataccagctacaaatgcaagcattggtgatgggggtgggagtcggctatgcacacccaagccctgcaccttcccttctcaattatcacagccgaatgatctactccaggttataagtaatgaggggaagataggagacgggcagatccatgaagctgagtggaagaaagtagagtttgattttctgtgtatacaaagtcttcagaaaaacgtgcaaaagcttagtaaatgcagcctgctcagataataaaactatatagaaaagcattgaggcaatttgcaccaaagtgaggctaggggatcgtttgggagggagtggggtgtggccaataagaaggagaaacaaatgagcagcgctggggactttgtcaatgtgccatttctaggagggggctcgttgtatgtaaatcactgaggtcttctttgggggttgtttttatctatatttcttatatttaccccccaaaaaatgtttcaagaaaattgacctgagtctaaggaggctccgcctcccaggatcccccttaacttcttcccagcccccagccacacagtttaaaataatctgttgaggccaggcacggtggctcacacctgtaatcccagcactttgggaggctgaggtgggtggatcatgaggtcaggagatccagaccatcctggtcgacatggtgaaaccccggctctactaaaaatacaaaaattagctggatgtggtggcgtatgcctgtaatcctagctacttgggaggctgaggcaggagaatcgcttgaaccagggagtcagaggttgcagtgagccgggatcgcgccactgcactccagcctggcgacagagagagactccgtctcaaataataataataataataataataataatcatcatcatcatcatcatcatcatcatcatctgttgaattcaggtgcacatttcttctctcaagaaatcctgcccatcgctgaaggtgcacaccccagggctggtgtcctcgttccatgacacctgttcacctggacccctggaagcagagcctgcaggagcaaagccccagggctgacagaccccgcctgctgtgcagtaaccaggggaagtgtggctgagtaagatacgggtggtgaagaaacccattctgatacccagatagctgcaacaaagggagaagtgtgtgcccttttcaaattgaccctttcccttctgacatttctcccttccaaaccccacagtacaacagttacagcctcagtttcccaggcctcctgcgagccaggcttccccccgccccccgtccttcgtgtgtatcaacatgcagaatcctcacctccacagccccgtgtccctctgctcaggcctcctgagactgaacccctgacctaggggagaacgaccccaccttgcctgtgccccccactgaagctcccgtcctggggagctcagacgtcaggagcctccgtgtctcccctctgcacagtgactccttgaggacagtgtctggctctgctctgttgacctcgttgtgtaaagaggaggtgcccacttcgttgctgctgagagagggaggagaggctgcctgctcacctcacctgcaccccagtctctcatggccctgagttccacctttggctggtatgacctccacaaacagtgacagccccgggggtgattcaggggtctggccagatgggacccaatttcaccttgcagaaaatgttacccaaatggaagggcaagtccgggaagcaagaaagaggttgggccctgcatagggtgggaatctggatgagtttctcaccctctctggcctcagggttcccaggagtggaaatggggtggtggacagtggatctcccaggactgacccggccctgacagtgtctgtgtgtgaagttcctcctctgaggaggtcacttttctgacttcacccccaacctcctgcgggacctcccctaagtcttgagacctcagtttctgagagaagaaccctgaggaacagacgttccctggcggccctggcgccttcaaacccagacatgctgctgctgctgctgctgctgcccctgctctgggggacaaaggggatggagggagacagacaatatggggatggttacttgctgcaagtgcaggagctggtgacggtgcaggagggcctgtgtgtccatgtgccctgctccttctcctacccccaggatggctggactgactctgacccagttcatggctactggttccgggcaggagacagaccataccaagacgctccagtggccacaaacaacccagacagagaagtgcaggcagagacccagggccgattccaactccttggggacatttggagcaacgactgctccctgagcatcagagacgccaggaagagggataaggggtcatatttctttcggctagagagaggaagcatgaaatggagttacaaatcacagttgaattacaaaactaagcagctgtctgtgtttgtgacaggtaaggcacgggctccagcacaggccacaggggaaggtcatgaggggctgaaaggcagggctgggatggggcctgggagggggttgggattgaaataagtcggtctccggggaggagctggaccagagcttgagcttcctccagggctgcacctgaaatacctcctcctgatcctgtgtccccatcttcaccagccctgacccataggcctgacatcctcatcctagggaccctagagtctggccactccaggaacctgacctgctctgtgccctgggcctgtaagcaggggacaccccccatgatctcctggattggggcctccgtgtcctccccgggccccactactgcccgctcctcagtgctcacccttaccccaaagccccaggaccacggcaccagcctcacctgtcaggtgaccttgcctgggacaggtgtgaccacgaccagtaccgtccgcctcgatgtgtcctgtgagtgctggaccaagatgcccaggtccctcatgggttgggagg

SEQ ID NO: 7935 - DNA, 6000 bp, Homo sapiens
gtgagagaaggagcaagaagagacaccaggctcttttcaacaaccagctcttctgtgaactaatggagtgagaattcattgtcatgggagggcaccatgacccaaacacctcctaccaggctccacctccaacataagggattacatgtcaacatgagatttggaggggacaaatatcaagactgtatcagtctgccttggctcctcaaatctcatctctttctcacattgcaaaatacaataatttcttcccagcagtcctccaacatctgaactctttccagcatcaactgaaagtgcaaagtctcatctgagactcaaggcaagttcttcccacctatgaccctgtgaaataggaaacaagttatttaattccaagatacattggtggttcaggcattggggaaatattcccattccaaaaaggagaaattgccccaaagaaagtggcaacaggctccatgtaaatccaaattcctgcaggcagacattaaaccttagagcttaataataatctttgactttgtgtcccacatcctgggcacattggtgcaaggggtgagctcccaaggccgtgggcagttctgcctgtggctttgacaggtgtaggccacgtggctgctctcataggttggagatgagtgcctgtagcttttccatgttgaggttgcaagctgctgatgactctacacttccctatcactcccctaagactcttccacacacacacccctcagccccacagcaaaggcagggggagattcacaacacaggctttgaggcctgttttcttccatctcctgaaaacaccacctacctcatctttccttttccccaatagttttgagctacgttcttttggatacatgttatggtcacatgggtgaaaattcaaaatgcatagcagagtctgtccccagaatcgcccagcgtccatctaggctgccctgggccttggtttgctcacctggaggatctcagaggtgctccaatatcaatagtgagactgcccacaccctcctctagggctgtgtgtgattccactgcatggatggactctgattgtgtagcatctcccagtggaaaatcatggcactaattttatcgtactgcagaaacactgtaatgaataatcataaatctacttccacaagcaatatctgagtgtatagcatagttcctaaaagcaaaatatagcagtgttatacgttctttctaattttaataaaatgaagttgttctcaactaaaagtgggcaagtttacattcccaacagtgagctgagaaggtgtgtatggccctgcacttcagcctgtatcagtgtctgttccatccaccagtctctttctgtatcattcctccttgtcttgatcactgtctttctgaccctctgtctctttctctacagcatccaccaccttggggaatggctcagcccttccagtcctggaaagccagtccctgtatgtggtctgtgctgttgacagcaatccccctgccaggctgagctggacctgggggagcccaaccctgagcctctcacagcccttgaatcctgggctgctggaactgcctcaagtgtatctgagggacgaaggggaattcacctgcagagctcagaaccctccaggagtgatgctgcaggcggtcaaggggggctggagccccagcctggtcttcctgtccttttgtgtcatcttcatcgtgtgagcattgaccctggagaggaagggagagccctgggggagggtggcctgggagcagaatccctgaagccggagctggaaggacctggctgagtcaggagtatgaagcaagggagagaatgagcatgggtgcatggtgagaatttcatgagtgcccttgtttgtggggccacatgtctgtgacaaacctcgggccccattgtccaggaaaaaagagcctctgttttcaatgttggggtctctgggactacagcctgcttgaattcctcccctgaaaatgggcttttcttttctaccacttggccaggctgcaaattatccaaacttttacactctgcttcccttttaaatacaatttccagctttcagtgatttctttctttgctcacacatgagcatatgctgttagaagcaaccaggccatgtcttcaatgctttgcttcttagacatttcttccacgagatactgaaaatcttcactcttgtgctcaaagctccacagattcctagggcaggggcacaatgcagtgaagttctttgctaaggcataacaaaatggaccatcgctctggtttccaataagttcctcatttccgtctgagacctcttcagcttggccttcactgtccatatcacgaccaatatttcagtcataactattcaaccagtctctaggaagtttcaaactttccttcatctttctgtctttttgtgagctctccacactcttccaacttttgcctgttaaccagttccaaagttgttttcaaattttcaggtgtctttgtagcaatgccccactcctctgtaccaattttctgtattagttcattcttccattgatataaagaaatacctgtgactgggtaacttataaagacaagaggaataatcggctcgtggttctgcaggctgtacaggaagcaggatgttgacatctgcttggcttctggggagttcctcaggaaacttacaatcatggcaaaaaacaaaggggaagccagcatgtcacatggccagagtagcaggatagagcaaatggggagatgctgcacacagacaacaagcagatcttgttagaactcacccactctcacaagaacagctccaagaagatggtgctaagccattcatgagaaatccacccccgtgatccaaccacctcccactacaacccaccttcaatattgaggcctataattcggcatgagatttggtggggacacagatccaaaccatatcaggctctaatcctattaggctaatccaaaccacctatctaaacaccatgccttctaatactatcacatgggggttcaaaggtcaacaaatgaattttgaggagagacatgtagctgtagcacttgtcactctggtccttaatatcttcctctccaaattatggaagtgggtctagagggcccatcagctcctctgagtcatatgtggttcaaacgttcttcctttgcagattctctgtggcttcctcatgtctctccttcccatttttctgcttttctttgccaactggggactgtgggaaagagatgggccgtggtcgagcccttcttcccattgagatgctgcaactgtccttacgggaagaaagtgacacggcaaggatgggggcccaggagcagattggtctgcaggatgagatacaagctgcaaatgcaggaattagtggtgtcagggagaggagcagctatgcatgccccaatcctgcacatttccttttcaattatcacagccaactgactctactccaggttatgggcaattggggacaacatggggatgggaagatccatggagctgagtaaaataaaacagattgtggtttttatgtaaaaatagtctttagaaaaacctatgcaaagccatagtattgaaggcagtgcactcagatgataaaactacatagaaaagcaaggagaccattatcattaaagtgaggctggggcatcttcaggaggaactgcatgtggcctataggaaggggaaacacagggctgaataaatgaatgcaatttctttcttcatctcatgggagaaatttggcaattatcttgtgatgttctatttcttgaacagtgataatttggtgaaaatcactgagtcatttttttaggtggcacttttatttacttgtattacatttccccaaaaatcattgtttcaagaaaagctgacatgggtctaaggagggcgaatcttgcaggattttccccaccttcctcccagtacatagcatacagtttcaaaaactcttctgctgaattcaggtgcatttcttctcccatgaaatcctgtccatcattgagcgtggacacgccagggctggtgtcctcgctccacgtctcctgttcacctgaaaccctgggagcagagcctgcaggaacaaagggccagcagacccctcatgctctggagtaaggaggacttgtgagagagcagtggtgaaggatcccatcctgaacccagagagccatggccgagagagaaacgcctgcccctttagaaatctgtcccttcccatccaacattcctcccttccagacctcactgtacaacagtcacagccttagcttctcaggcctcctgtgaactgggctcttctctgtgtctttggtgtgtatcaacacacggaatcctcacctccacgaccccgtgtctctctgctcagtcctcccgagactgattccccaacataggagagagcgaccacaccctgcctggtacccccactgaagctcctgccatggagagctcagatatcaggagcctcagtgtctccccactacacagtgactctttggggacagtgtctagctctgctgtgttgaactccacctcacggccgctgagggaggaaggagaggttgcctgctcatcccacctgcacccccatctcttatatcctagtgtcacctctgacctacagagagacatccacagcctgtacttcataggtctggccacatgggactcattttcaccttatggaaaatatcacccaaggggaagggcactgagagggaggcagtgggcggggtgggccctgcatggggttggaatctgggtgagtctttcatcctctctggcctcagggtccccaggagtggacggggtagtggacggtggatcttccaggggtgacccggccctgacagtgtctgtgtgtgaagttcctcctgtgaggtcaccgttcagaacccacccccaacttcctgtgcggcttcctcgaaatcttgagttctcagttcctgagagaagaaccctgaggaacagacttacctcagcaaccctggcacctccaacccgacacatgctactgctgctgctactgctgccacccctgctctgtgggagagtgggggctaaggaacagaaggattacctgctgacaatgcagaagtccgtgacggtgcaggagggcctgtgtgtctctgtgctttgctccttctcctacccccaaaatggctggactgcctccgatccagttcatggctactggttccgggcaggggaccatgtaagccggaacattccagtggccacaaacaacccagctcgagcagtgcaggaggagactcgggaccgattccacctccttggggacccacagaacaaggattgtaccctgagcatcagagacaccagagagagtgatgcagggacatacgtcttttgtgtagagagaggaaatatgaaatggaattataaatatgaccagctctctgtgaatgtgacaggtaaggcacgggctccaagagaggccaaaggcaaatgtgatgagggctttagggcacggctgagacgggacacatgtcctgggagggggccgggggtgatggactcaggggaggagctggaccagagcctgagcttccccaggaccgcaccttggatgcccctcctgatcctgcaagcccctcccctcaccagccctgacccacaggcctgacatcctcatcctgcctctgacgctggcactgtggcatgtggggccttatgactccttgttttggggcctgtcctaggcatggccggggtttagcaccatcccaggcctctccccaccagatgccagaagcacccaccccacccatgcagcgagacaattatctccacacattgtcaaacgtcctggggggttaagtcctccccagttgagagccttaggtctacacaaccccgtgactctctcaggccaggccagggaggaagcacttcctggcgcaaaccaagggcagcagaggcacctgagcctggacagggagactcagcacac

SEQ ID NO: 7936 - DNA, 6000 bp, Homo sapiens
tgacttgtttgagtgtatattatatataaagggagccttaatggattggttttcataatttaatattttttgtatttgccgttgtataattgtttttaacagaaagcattaaagaattgagagtggaattcttagaaccaaagttattcttaataaaaatcaccacatgcttggaccatgaaaaaaaaaagaaatgtcctctatgaaagtaaattaaaaaataggaagaagctactgttatactagatgcacagattttaacataaggacacaggaaacatgaaacagcaaggaaaggaacacaagaattctgcagaaatagatcttaatcacaaagaaatttttgaaattccagacaaagaattcaaaatattgatgttaaagaagctcagtgagatacaacagaattctgaaaatcaatactatggaaaccagaaaaacaattcagggtataaatgagaaaatgatcaaagagatatatattttttaaaataaccaaatataaattctggaactgaatagttaattgaaggaaatgcaaaacacatttgaaaagttcaataatagactaaatctggcagaagaatcttggaacttgaagacaggttttttgaaataatctagtcagacaaaaataaagggaaaagtacaaaaaataatgagcatagccttaataacatttaggacaacaaaaagcaatggaatttataaattactggtatctctaagggtgaaaaaacaaagaaatattggaaaacctactcagcaaaataatacatgaaaacatcccaagtctaacaaaagatttaggtatagagatacagaaggcccaatgatccccgggcagatccccaatgcaaaaggtcttctccttggcacattatagtcagactgtgtgaagtcaaagttaaagagcaaattctacaaatagcaagagaaaagcatctagctacctctaaaggaaattccatttgactaagagcagatttctcagtagaaaccttacacaccagaaaagaaggaactgatatattctaagtgctaaaagaaaaaataactgccaccacagaacatgcaaagaaactattcttcataaataaaagagaaatagattcatcccaagacaaacaaatgctgatgaaatttattaccactagaccagccttggaaaaaatactcaaaggagtcctaaacctggaagcaaaaggatgattttatcatcacgaaaacatatgaaagtaaaaaattcactggtaaagcaatcatgcaaatgagaactagaaaggactcaaatggtaccactacagaaatccaccaaatcacaaggacaaacaataagataaaaggaaagaaacaacgaatgtttaaaacaagaaaatgtttaataacctgacagaaagaaagcctcacaaatcaataataaccatgtatgtaaatggattaaagtatcctcttaaaagatatagaatggctgaatggattttaaaaatgactcaacagtgtgcagcttaaagaaacacaccttaagaaaagacacatatagaccaaaagtaaaaggatggagaaagatattccacacaaatggaaaccaatagtaagcagcagtaactatacttagataaaacagaccttaggtcaagagcagtagaaaaagacaaagaaggtcattatataatgatgaagggatcaacccagcaagaggatataacaattctaaatatatatgcacccagcaatggagcagccatatctataaagcaaatattactagatctaaagagagagatagaatgcaatacaataatggtgggaagcttcaccaccctattctcagtaagacagatcacttagacagaaaatcaacaaacaaacatcacatttaaactacactatagaccaaatggaactaacagacttttacagaacttctacccaacaactgcagaatacatattcttttcatcagtacatgaaacattctccaggatacaccatatattcggctacgaaataagtctctataaattaaaaaaaaaatcaatatttactcaatgtatactcagaccacaatggaacaaaacaacaagtcagcaccaagaggaactctggaaacaagacaaatgtatggaaattaaacaatatgctcttaatgacctaccaggtgaaaatctatacaggaaaaactaaaaaacactgatgaaagaaattgaagatgacacaaacaaatggaaaaacatcccatactcatgactggaagaattaagatagttaagaagcccacactggtctatagcaatctaaagatttaatgtaatccatatgaaaataccaatgtcagtcttcacagaattgtaaaaaacaattataaaattcatatggatccaaaaagaacctgaatagccaaagctatccggagaaaaaagaacaaagctggtggtatcactttacctgacttcaaagtatattacaaggctataataaccaaaacagcatgatattggtatagaaatagatacatagaccaatggaatataacccagaaataaggccacatgtatacagccaattgattgtcaacaaaactgacaagaacttatattgaggaaaggacaccttcttcaataaatggtgctgggaaaattgtatacccacacacaaaagaatgaaactggattcttctctctcaccatattaaaaaaaaactcaaaatgaatcatacacttaaatgtaagacccaaaactataaaaaaaaaaaacagctacaagaaaacctagggaaaactcttttgaacattggtcagaagagtcagaaattatgactaagttctgaaaagcacaggcaacaaaaacaaaaataaacaaatgggacttaataaacaaaaagcttctgccaggaaaagaaataattagagtgaagaaacaacctgttgaattggagaaaatattcgcaaactattcttctgacaggagactaatatccagactatacaaggaactcaaacaactcaacaggaaaaagcaaataatccaagtaaaaagtgggcaaaggacaggaatagacagttctcaaagaatacataagaacagccaatacgacaaaatggtcagcgtcactaatcatcagagaagtgcacatctaaaccaaaatgagataccgtcttacccagtcagaatgactattactaaaaaaacaaaaaataacagattttggcaaggatgaggagaaagataactcttctgtactgttggtgggaatttaaactagtacagccacttttgaaaacactatggacatttctcaggaactaaaaatagaattactattcgatcactcaagcaatcccactactgggtatctacccgaagggaaagaaagaaatacatcaaagagatacctgcattcacatgatttttgctgcactattcacaatatcagagatatggaaccaacctaagtgtcaattaacagatgaatggataaagaaaatatagtatacatgctatttggccataaaaaagaatgaaatcgtgtcatttgcagcaacatggatgggactagaattcattatctaaattgaaataagtcagacacaaaaagacaaatgttgcatgttctcacttacatgtgggagctaaaaaaatattatcacatggaggtggacagtagaaagatagacaacagagactggaaagggtcagatgggggaggacagaagatgaagagaagtgagtgaagtgctacaaacatacagttaaaaggaataaattcagcgttagagagcagaatagtgtgattttagttaacaagaatgtattgcactcacgtgacggacactctaaatatcctgacataatcattacgcattatatacatgcaaaaaaattttacatctactccttaagtttgtagaaataaaaaaatttacaaatatatggtggcaaattctaatacctcataggtattagagatttgccagatgcatactgcacagaggaaaatagaaaaccatgtgagctagacctaaaaattttaattttgtcaggatattctgctcacgttgtccagaaatatgtcttttgtgccacatttaactgtgagaagcagatttttcacaggaaagaaattgctaatctctatgatgaggacctaaaaaaaaatctctccagtccacactgcactgagtggcaacattaattcaaaagaagtttcttctgcactgcagttcataaaatatgtgtcctttttgatttacatgaagatgttgcatggttcttattttggagatgtcattgaaattttgtaaatcagcgtactagctgtcaaggaaaaacctccatactcatgttttaaaaaatatctggcattctactgtgtcacttggcaaactcaccagtgtccacagctctaaagctagatagtgagggtgtgtgctgaggatgggaagctatggatggggatcatctcaagggtagggaccaggtccctggcatctcttctccagcccgacctacatacagatgctcactatgtctttggtgaatgaatgaatgaatgaatgaatgagtgaatgaatgagtggctatcacccacactgcacctgggacccttcttcctttcactgtcccagacactcccacagaccctacagaatcctatatcctgcaggactgactttctcatggcgtgggatgaggctgtgactctctggggccaggagtgaccagctcccaggtgtaaacagtggtgcacagaaaagcacctcaggtgggcagggccttggacacaggtttcgcattcctcagatgccccgggaggccctggtccgggctctgttgctcacaggaagccccgaggtgggaggcgggacacagtctcttctcctctgctcttctttgggcaggtctctgggtctcaaagtttccgtctgctctgtgcagagggagtggagctccgagggcttgtggcttcgcagttcctcttctgtgaacagccgagatcacgcgctcctccccagccacccgttcctccccgcagtccttcccctccactcccttccccttctctgctcatgcagggagcccaggaagcctccgcctcagagatgctaccgctgctgctgcccctgctgtgggcaggtgagtgggccaggggagaggtgccgtggggctgggccgagctgaccctcatgtctccataggggccctggctcaggagcggagattccagctggaggggccagagtcactgacggtgcaggagggtctgtgcgtcctcgtaccctgcagattgcccactacccttccagcctcgtactatggttatggctactggttcctggaaggggctgatgttccagtggccacaaacgacccagacgaagaagtgcaggaggagacccggggccgattccacctcctctgggatcccagaaggaagaactgctccctgagcatcagagatgcccggaggagggacaatgctgcatacttctttcggttgaagtccaaatggatgaaatacggttatacatcttccaagctctctgtgcgtgtgatgggtaaggaaccagctccaggactagccacaggggaaggtcatgggggccgtagggcagggctgggacgggagccccgtcttgggaggcgggtacaattaagcatgttgggctcagagaaggagctggaccagagactgggcttccccctgggtgaaacctcagacctccatcctgatcctgcgtccccatctcctcaccagccctgacccacaggcccaacatctccatcccagggaccctggagtctggccatcccagcaatctgacctgctctgtgccctgggtctgtgagcaggggacgccccccatcttctcctggatgtcagctgcccccacctccctgggccccaggaccacccagtcctcggtgctcacaatcaccccacggccccaggaccacagcaccaacctcacctgtcaggtgacgttccctggagccggt

SEQ ID NO: 7937 - DNA, 6000 bp, Homo sapiens
tcaaaaaaaattaaataaataaaaacccaaaataaataaaaagaaaaatttattatttgccacttcctctatcacacttgatgtttcctgtggttgaggtctatttccaggcactcaattttgttccacttggtcaatacataattgtcacttttttttttcagacaaggtctcactgtgtcactttgtcaccttggatggagtgcagtgctgcaatcttggctcactgcaacctccacctcctgggctcaagtgatcctcccacctcagcctctcaagtagctgagactacaggcatgagccacccatgcccagctaatttttgtgttttttgtacagatggggtgtcaccatgttgcccaggctggtcttgaattcctgggctcaagtaatccttctgcctcggtctcccatagcgctggtattacaggtgtgaaccattgaaatgggcctattttctcacatttttaaaaatttgagacagtctcactctgtcaccctgggtggaatgcagtggcacaatcttagctcactgcaacctccacctcctgggttcaagcaattcttgtgcctcagcctcctgagcagctgagattacaggcacatgccacgatgcccagctaatttttgttattttttagtagagacagggtttcaccatgttggtcaggctgctttcaaactcctgaccttaagtgatccatctgcctcggcctcctaaagtgcggggattacagatgtgagccactgtgccccgtctgaaatggtcatattttctgtaatgttatgatacatctttttatcttgcaaagccattcattgttcttcatggttgccttgaccatacttgaacatttctacttcagtataaattttacaatagagttaccaaattgcacaaaaatcacccgggagattgtatgacatattcctttgatgctgtagattgttgggtaaaattggcattcatacaatattgttctcaaactcatcaacatggcctctttttcagtttatttacatcttgatttatttattttttatttatttattttcttgagacggagtcttggtctgtcgcccaggctggagtgcaatagtgcaatctcgactcactgcaacctccatctctcaggttcaagtgattctcctgccttggcctactgagtagctgggactacaggtgcctgccaccacacccagctaatttttgtatttttagtagagatggggtttcaccaggttggccagggtggtctcgaactcctgacctcaggtgatccacacgcctcggcctcccaaagtgttggcattacaggcgtgagccactgcgcccagcctatttacatctttaatgtccttgaatacagatttataatttcctccatagaggtgacatatacatatttttgttagatacatctctaatagttagatatattccatatattcaaaaattatatcatattttttgatattgataaattatatcataatttttgaagcttttgtcaatggcatttttataaaattccatttttattactgtgatgtggaaagacaactgattttgtaatttgattaatctctggctgtcttgcaaatattttattaaggcttcaaatgtatccgtatatacttttggatttttctttttttttttttgagatggagtgtcgctctgtcgcccaggctggagtgcagtggtgtgatctccactcactgcaagctccacctcccaggttcacaccattctcctgcctcagcctcccgagtagctgggactacaggcgcccaccaccacgcccggctaattttttgtatttttagtagagatggggtttcaccatgttagccaggatggtcttgatctcctgacctcgtgatccgcctgcctcagcctcccaaagtgctgggattacaggcgtgagctaccacgcttagcctggatttttctatatgtgcagtcatgtcattgataaagacctctgttaaaatttcattgtaattgctgtaccttttgcttatttttattgccttattatgctaggacctgaagctacttcattaggtatatgatgtttgctgaagacaccctttatcttgtttgggaaattctctaaagagaatttctagttggctatgaattatatcataaagggatttgaaatcacccaatgctcacttattcatctcttgagatttaattagttaaggctgatgtgaaaacagaagccatactatgtattttaggagagggaatttaatattaagattttaatataaagataaaaataccattttcctacataatcaagtctttatctttagatcctactagccggtatgatgaattactttcacagttcaaatgaggaataaagttcagaatttgcaataagaaaaagaaaaaagaaaaaattattctgacacctgttaacattgactattcaggatgactgagacaggtatcaagactagtgcaggccaggcacagtggctcatgcctgtaatcccaacactttgggaggcaaggcagggaaatgacctgaggtcaggcattcgagaccagcctggccaacatggtgaaacccccatctttactaaaaatacaaaaataagctgggcatggtggcatgcacctgtactcccagctactcaggaagctgagataggagaatcgcttgtacctgggagggggaggttgcagtgagctaaggttgcaccactgtactccagctgggacaacacagtgagaccccgtctcagaagaaaaaaacagaagtcaattaaaaaaaaaaaaagactagtgcaataatggagataggtcaggctcaactcggaatacagcaaagaccaggggggtttatgggcaagaagcatagtgcagcaggtgagggaggctggccgtgtgtgttagtggacggaaaactactaagaggagacactgaagataccgggattctttctaaactgacttaacaggattcttgctgaaagcaggccagcatgatcagataccaagggtgagggctagggaatttgatcagatagtgaaggcgatcagatatcaagagtcttgcaaaaccaacttagcaggattcttgctacagctggacaaggcagtcccaaggacaaagcctagttgaaaaaagggttcagaggagctttcataagtttggttaagaagagagtctttgtgactctttagaaaaaaaaatacaaaaatacaaaatttggcacacataggatgatttttggactgagaaaacacatcaaatcacaaaatctaaaatgtcaaaatatgagacaactcagaaaaatggcatactatgtttgttaatagtatagtctacctgtctgctacacctgcatactttttccctatatttttgactgattttctttgattgccttcataatggtgataatttttttctttttgagacagagtctcacttggtcacccaggctggagtgcagtaccgtgatcttggctcactgcaacctctgcctcctgggttcaagtgattctcctgcctcagcctctggagtagctgggactataggtgtgcgccactatgcctggctaaatttttgtacttttagtagagaggaggtttctccatgttggccaggctggtctcgaactcctgatctcaggtggtccacccgcctcctcctcccaaagtgcttgggattacagatgtgagccactgtacccggccaatattggagaataattttataatacaatttttatagatagaatagaaagagaagtcggtatttcttctggcatgggtggttgacgtttgttttgatcattgatagtttaagaaactgtctttattctcacaacacattaatcggaatgtgaaaaatttttaatatattgttaaattttgggaaactattatgaaatttctttcataaaagagcagtaacaaggcaggttatttccacacattgcgtgggcccctcctgggcatctgaaaagtggatcctgcaagggagggcattgaagattgagcttcatcagcctcacagtggcaaatttgcttctgtagctccttaataggatgaggctttagcagggcttgtgtttcactgccgtcccacaagaccctcaggtccatcaagacccaaagtggactgtgctgtgtcccaagaatcttcttaacataagagtgcttcagctctctcatgctctgaccctccacgaaatttgggtcaaaaaaattttttttcagcccttttgaacttttttttttttttttttaaggcagggtttcactctgttgcccaggctggaatgccgtagtgcgatcacggctcacagcaacctcaaactcctgggctcaaggaattctcctatttcagtgccccggaggagctgagactataggtgtgccaccacaccagctaatagtttttattttttgtagagatggtgacttgctatgttgcccaggctggtctcagactcctgggctcaaacaaccctcccacctcagcctcccgaagtgctgggattacaggcatgagctaccatgcctggtcactttgaacatttaaaatcaaatttaaaattatgtatttccagaatgtttcatggtttttaggtggagggtggttctgacatctcacctcatcaccaggacaagcccttgtttctcttttctttctgcattcagccccctgaggatctcactcatgactgaaacatcatttgaggggtgatcacctccagatcctcagctggacaagcctcacatcgtctgggggcctcagtatcttcacctgcggcgtccagtcggggtgggagcagaatggcttcccagcccccgcctcaccccaacagcacgtgatgcccaagttccccttctgtgcgcgtccacagctctcactcaccctccggcttcctgtcggggctttctcagccccaccccacgtttggacatttggagcatttccttccctgacagccggacctgggactgggctggggccctggcggatggagacatgctgcccctgctgctgctgcccctgctgtgggggggtgagtgagctgagggaggagggacaggcacaggggtgagaaggggggctggagctgcagctgagcttctgtgtccccccagggtccctgcaggagaagccagtgtacgagctgcaagtgcagaagtcggtgacggtgcaggagggcctgtgcgtccttgtgccctgctccttctcttacccctggagatcctggtattcctctcccccactctacgtctactggttccgggacggggagatcccatactacgctgaggttgtggccacaaacaacccagacagaagagtgaagccagagacccagggccgattccgcctccttggggatgtccagaagaagaactgctccctgagcatcggagatgccagaatggaggacacgggaagctatttcttccgcgtggagagaggaagggatgtaaaatatagctaccaacagaataagctgaacttggaggtgacaggtatggcagggaccccaggagaggaccctgggacgtggagacccccgtatgagaacagggacaggagttgggcaggggcggctggaggaggtgtaggacttggggcaggtcggggcctgaggcctggccactctcggggtcacaccttacgtcctcaagcccctggggcccaggtatctccctgtctcctcctcagccctgatagagaaacccgacatccactttctggagcctctggagtccggccgccccacaaggctgagctgcagccttccaggatcctgtgaagcgggaccacctctcacattctcctggacggggaatgccctcagccccctggaccccgagaccacccgctcctcggagctcaccctcacccccaggcccgaggaccatggcaccaacctcacctgtcagatgaaacgccaaggagctcaggtgaccacggagagaactgtccagctcaatg

SEQ ID NO: 7938 - DNA, 6000 bp, Homo sapiens
ggtccgtcctgtacagcccactccctcccccaggccctgctgtgctggggaagggagggttgtaaggaggacacagccccagatggagacactaagacaggcccctgctgtcagatgagaagacccagagcaggaagcaggtgtccacctggtggggcagcaggaggacagctggggaaaacacaaggtcccaggttcccctcccagacctgcttcttccaggctggggggcctggggcaggcgattcccccctctgagcctcagtttgtgcatctgtgaaatgggttggggggttggcaatcccacgttgcacgactgctgtgagggttagagctcatgaagacccagcacgcgcctgcacacagtaggtgctcacatcagcgatgtcatcctcattcccgacgtcatcacgcgcaaggtctgggaagatacctgggggttgtaaccggggtctcagtggcctttgtcctgccgctcgtcctcctcctccaatgtcggcgtcagagcaaacacaggacattgggtgagcagggaatgggggaacctgtgggcccaccgagggtgggatcagggcaccaaccaaaggggaaccaaacacacaagaaagtcagcttagaaaaacagctccagaaagtcccagctgaaaaatctagaaagaagagaataaatatgagtgtatgtgcaagtaatttattctttgagctttttattttattttatttgagacgtgatctggctctgtcacccaggctggagtgcagtggtgtgatctcggctcgctgcaacctccacctcccaagatcctcaatgatcctcctacctcagcctcctgagtagctgggactacaggcccctatcaccacgccaggctaattatttttttgcgggggagagatggggggtctcactatgttgccgaggctggtctcaaactcctgagttcaagcaatccacccgcctcagcctcccaaagtgctgggattataggcatgagccattcggcccaacgtcttcgggcctttttaagtgtatccagtatttaaaacaactatgcctgtaatcgcagtactttggaaggctgaggcaggtggatggcttgagcccaggagtttcagaggactctgggcaatgtggtgagaccccatctctacaaaaaaaattaaaaatgcaaataagccaggtttggtggtgtgcacccgtggtcccagctactcaagacgctgaggcaggaggatcacttgaccctatgaggtcaaggctgcagtgagctgggatcgcaccactgtgctccagcctgggcgacagagcgagaccttgtctcaaaaaaaaaatatatatatatatatatatatatatatatatatatatgggtgtgttttcaagtttcattttttcccctaaagtcgcatgtactgggtgggtggttctaaggttcccagggctgagactttgtccttcttcacctagcccagagagaggctgatttccaacaccctgcaggggccgtgggaccagagcccaagaacaggggtctgctgaggaggtaattctgcccaaagaccccagactcccacactccaccacaccacactctcgtgtcctcccccaggtccagcccagctgctgacatccaagaagaaaacctcagtgagtaagaggaagagggggtgcacctggggtgcagatggggaccctgcagtttcactagtaacaggaaggggctgggaagggtctggggctcaggggaacatggttcacttcatactgtggaacctcagggacatcacacccgctccctagatctcagcagtcccactgggagcaggacagggggaggtggtactgagaggtcccagggaaacttaccaggagacgaaccccttgctttgccccagcagaccctgctgcgaattttttttttttttttttttgagatggagtctcgctctgtcacccaggctggagtgcagtggcgcgatctcggctcactgcaagctccgcctcccgggttcatgccattctcctgcctcagcctcccgagcagctgggactacaggtgcccgccaccacgcccggctaattttttgtatttttagtagagacggttttcaccgtgttagccaggatggtctcgatctcctgacctcgtgatccgcccgcctcggcctcccaaagtgctgggattacaggcgtgagccaccatgtcccgcctgaaagtgagacttttaacagggtcttgcaaaattggatgtctgctaggtaggcatagccggggcagtcacagcaggtaatttatctcttggcactcaactatcccttccccagttcctcactggtcgagtactatgaggttacaatcttcccagacttcgcctgagtttcattatcccccttataaggttgtaccccgtccccttccccgcttaagttgcgatttcccaataacaaaatttttttcccttttatgggctgaccgcctcctcccccacaaccccccgccattctgttcacttattgtgatttgctaggagcatgagccgtgcggtttgttacatccgcagactggctgccaatacttggatatcatgacttgaaaatggaccctttaaaatgtgttctcacaaattccctcctcttttttatttacttcctttggtctcattttcatttgaacccttctggtgcttgaatcgctttagaagttgtttactttctttttttctttttctttttctttttttttttttttttttttgagacagagtcttgctgtgtggcccaggctggagtgcagtggtgccatctcagctcactgcaatgtccgcctcctgggttccagcgattctcctgcctcagcctcccgagtagctgggattacaggcgtgcaccaccatacccagctaattgtttttgtatttttaggagagatagggtttcaccatattggccacgctggtctcaaactcctgacctcaggtcatccgcccacctcggcctcccaaagtgctgggattacaggcatgagctaccacgcccggtcaaatttttcactttatggctacatagtaggtgtatatatttattaaattacttttcgatggtattaattcaatttactatttttcaccttcacgacgtctgtctaatgcatttcaacaactgtctgtgttttcctcacgtatcttggttgtcattcctgtgggacagctcctcccacgcacccggcctttcataaagggtttctcccacggctgtccaggcatcagcctgatgaaggggattgttgccgctgctcctgccccactcccccaaactcagtgtcagctcaagattgtgcccagcagggatgggaccaacgccagcctcacactcacctgtggggcagacgcccatgtctgaccaccgtggattgaatctgtttctcacacacaggggaggggctgagcgctgaccgtggcctccagtgagtgagcagagaccccccagcgcctgtccacacacacaggggagggggagccaccgcttccagcctcacccagagccctgacccctccctgcctgggaggacgtggggttcctcttctgtcccacatggaggtgggagcctcctcctccctaatgacgctcggtggtcccagacacctgtggccactcagcattgaactctgctcatggaaggggatgcgtctcaatgtgaggaactgtttttcctctttctctgcctgtggctgtgatgatctgcatatttcagacgtatcacaaggagaatttcatggtatttggagccgatgtgggctcttgagtgggggcgtcaatcatcctcctcgactgtgaagcccagcaccaggatcctctcccgtccccaccctcctgtctgaactggtctggaaattcaccatggctgagcctcccatgtcctgggcaccactgacccccacagccactgtgatgagtggggttcatgacagcaggctcagaggtgacattcatgtccaaagtcacataaaccctagatgataatcaggaattaaatacaaatcagctcaccttccccagaatcagattatagattacaatgaaacatatatatatatatttctctttatcccctctatttctcctttttagacaggatcttgctctgtcgcccaggctggaaggccaaggggtgatcatagctccctgaagcctccgcctcccgggcccaagtgatcctcccacctcagcctcctgagtagctgggaccacaggcatgagcctccatgcccagctcacttttttcttttctgtagaaacagggtcacagtctgtttcccaggactgtctgaagctcctggcctcaagccatcacccgccacagcctcctgaagtactgggattccaggcatgagccaccacggtagaccctgcatttctctgtgctcactgctacacgcagctcagcctggactacacagccaggtgtcaggtgcgtctctgctgatctgagtctgcctgcagcatggacctgggtcttccctgaagcatctccagggctggagagacgactgccatggtaaggaccccgtaacgctgaactgatggacgagctgaaggagggagggagaccccatggggaggctctgagagggaggaggagcccacggtcaccctcgcctgaaaggggctgactcaggaaggcaccaggtctatttgcggctgtgtccccgtcctcagtgagataaagataaatcaggcagacagtggcccgggggcagggagaccccatttctctctgaaatgcctgcagagagcctggtgcctgcccccacttcagccctggggaaatcagagccaggttcctggggtggcagttcctcttcctgtgggctgaggatgagacaaccccatgacaagaaggacccagcctccgagcggccacaccctgtgtgtctctctgtcctgccagcactgagggctcatccctctgcagagcgcggggtcaccggaaggagacgccatgacgcccgccctcacagccctgctctgccttggtgagatttcaagatggggagggggagatccgagtcttggaggaaccccaccccacacacaagccctggtccatcaggagacctcaaaagctcaggaggcacccgggcggggacctgctcaggcttcagggcaaatgcctcacagggaactctcttccagggctgagtctgggccccaggacccgcgtgcaggcaggtgagtctgtccccagctgtcccaggtccctactcctcactgggacagggggccacccatgggcagctgggggaggagacagtagttctgggtgactgatggggatgatggggaagtcctggggctgggagctgggatctgagcgtggggatgtcttgggatccagcctctgatttccatctagggcccttccccaaacccaccctctgggctgagccaggctctgtgatcagctgggggagccccgtgaccatctggtgtcaggggagcctggaggcccaggagtaccaactggataaagagggaagcccagagcccttggacagaaataacccactggaacccaagaacaaggccagattctccatcccatccatgacacagcaccatgcagggagataccgctgccactattacagctctgcaggctggtcagagcccagcgaccccctggagctggtgatgacaggtgagaggacactctggggtcccagccccaggctctgccctcaggaagggggtcggctctcaggggcgtctccctctcacagcccagccctggggatgatgtgggaggtgggagccccatttaacacggtgcctctttctctcctaggattctacaacaaacccaccctctcagccctgcccagccctgtggtggcctcaggggggaatatgaccctccgatgtggctcacagaagggatatcaccattttgttctgatgaaggaaggagaacaccagctcccccggaccctggactcaca

SEQ ID NO: 7939 - DNA, 6000 bp, Homo sapiens
gaagggctgggggctgcagctgaaatgtccaggtgggggcagggtggctgtgctgtgggcctgtcactagggagggcagcgcccctcggctggggcactggagactggcagctgtgaggcacagggcccgctcacacttccctcctgaagaagtgtcactcggttttgctctggggacacgtgaaagtgccaggcctccccacaccctccctgggcctggggcagcaggggcagaggcagaggtggcagtgactgcaaagggcttgtcaggggcctctgagcattgggctttcagagggcaccgagccagggccacggtgttcgggtgggggcaggacgggtgactggggccctgcagctggcaagccccattagcaggaaggaagccccatttcgcaggaagcaacagaggtgggcagctgtgtggtgctcagcttggctgctcctgtgccccagctgtcatacttattctggggcccacagaggtgcctggcctcctccctccctgctaaggcagtggcagctggacccaggctgctcagggatcagaagcctgtgggattccacgtgggctccagtggggccttggtacagtctccaggagcaaactgtgggcctctggaggcccagaggggacaggcgctctcctgtgggcaggatcctaagggcccacagcagaggtgtagatgccagggacccctcactcactcaccccttccctgtgttagggaggctctcactcattcaccccttccccgtgttagggatcctctcactcactcacaccttccccgtgttagggatcctctcactcactcaccccttccccgtgttggggaatctctcactcactcaccccttccccgtgttggtgaatctctcactcactcaccccttccccgtgttaggagcctctcctggctcccaccttttctcttctcttctctccatgtcctcatgtttctcaggtgaaccccagcatcctcttggaagatccacttgacctgttggtatttactcgctattttgggtcctcttagtgagtaggcagactccagccctttccattcagccaacttgaacctcagcccccagtcattttcttgcactttttactcttgggaaatccagtcccaatgtgcttgtctttcattggacaataattttcattttctccagtagttttaaaattactttgtatctattctaggtatcttttactctatcatagttaagacattgatgttatttatgaatttgttcacgttaaactcatgttctttcttcatttctataaaaatgtcaaccattttctttgcaagtatttactgaataacatactccttatttccttcattctgaaagtgtgatccaaagagagatatctgtttcctcttttcattccatttcttgtgtgcattaattatcttttctatttttttcatttctagtttttctctgatgactaatgaaaaattttagtaaatattctacaccaatacaatgtttatcatttcagctgtgtcttgttctggatgaaattatttctaaatgtgttaatataatttactattttcacatcacaatagcttcctaattcatttctacaattgcctgttttttctctaacggactctttgatttttattcctctggggtgggtttttctcccacacacctgatcttccatatagggtttctccccaggctgactcaggaaggaaagctgatgagggcattgctgtagccgctcctgccctgcggtgtccatgctcccaagcttagaatcacctctgtgttatgcccggcatggcggggtccatgtgagcctcacactccagggtcagagatgcccggtccaacaatgataaagcgcatctgtgtcatgcacacccgggaaggtggctcagtgctgagtgtagcccgggtcactgagtcatcccagggtctgtccacaaacacagaagagggggagtcacagtctctaaggtcccacagtttcctccacttttttccttgttctgagagtgagacaaagggccatgactgttctgtgggttggacagatgcatgtttccacctgcaggctggaacccaagctgaggtcttgagcatccccaagtactgataaagcactttaggttgtttctagaaaacactgaaaaattaacccttttgctaaaagtgtagaaacaagccctcccctgaaccaaattcctgaaactctcaggttaaacttcgtaaccccatcccttcactgcagactcccaatagaaaagttacaggtgcaaggatgagatgactttggtcaaactcagaccccacagggccaggaaggcctgaaggagaggaggcccatgcttccacgtctcagataagaactgtttctaaggacttttaaaaaacccataagaaactcttccatgtccttcagccccttctgctttgacaaggtttatcactagatgttctttaggacgtcaggaattcagataagatgctctcaagagaaccattgaccagcaacagcatctcctccaatggactgacagcaactctggctttgaacctgtggaaccagggaactctgtttccaggcagctctgtcaggctctcccttgttgctgataagaacttcctttacctctctatgtacagagagctctctctacggtgcttttcctctactctcacgtcacaggaatcatcaacacagaaaaagacttctaggaccagatgtatggggtttttttccccagacgcagtagcgaacagcagctgggtgtcctctaagtcagctctggtgctgtctacccagagacagtcccggatcccacagattgaaggcccattccccaaaactgcccccaacaccattcccaagtccagacctccagaacttctgactgactggcttcaagttggggatcccatgccccactcttcggtttgattaatttgctgtagcagctcacagaactcaggaaacactgacatttcctggttgaatacaaagcacactgcagaggacacagatgaagaaactcataggaggaggcatgggggaagaggcccggggcttccataccctccctgggcgtcgccctccaggagccttagcatgctcagccacccagaaactcatgaaacccagtcctctggggcttttatgaaagcttcatgacatcagcatttcctcccacaaggaacagggtgagactgtcttctgggagggtcttaagatccactatcagaaaggcagggaacattcgagtcttactttgggttaggtgaaggaagggcaggaggaggtcagaggcctccgctgaggcccagcacagccaatgttataacaaaagactataacaagggctatgggagttacaagccaggaactgcgggtgaaaaccagcatatatcacaacatcacacttccctctctggacacactgtggcttgccatgccatgcactccatattgtaatccttgcttctcactcccaaataaactcaaaatccaggcaaccctggagcaatgcagccttgaattccaggggtctcttatatgcacactttttccaaacaaacggggatcaaaactatagcatttgtgagaaacaagacttgcgtatatgaacggcagacttttcctatatgcagacccagcagagacaacgtcagggctggagtacgagcaagtgttggtacatgtagggggtactgaaacgaattgcctgtgtatcccaagaaacaactgtactgagagatcatattttctaggggtttatttttggttttgtttttattttaggttaaagctttggatagaatacccagtgtctccttgtccatctgaagaacatgctgctatgtggaagcacatccttgagatccacaaggagacactgggcaagaagacaaggatgccccactgtgcagaggtccccctaataaatgctctatgaacaccctggtgtttagtgcttctttccttggaattccagcaggtctggacagtttggtgcactcccttgagggaattcccctgggctgcttggggtccactccagcctcaggtgtagctagaggacgcagcctcccaccttggtctggagccctgagcccctcactgtcattgcagatcccggggttcctctcccggctccactcagtggtggaaacctccaccctaatgagcccttgatggtcccgggaccctgtggcatctcacctctggcctctgttctttcttgtgagtccgtctacacttggggttttcacatgtctttttctgctcatgaccttgatactctgggtatttcagaaatgctacacatacgtttctccattacggtcagatgtgacatcttgagtggactcatcaatcacctacagaatgtggagtccaacagcaagatcctctcacgtcccaaagcctcaggtcttaccctggtctggaaatcaagcacaaatgagcccctcccaatgtcccaggcaccactgaccccacaaccactgtgacgagtgggattcatgacaacaatctgcaaaggaagaaactgaggctcagtgatgggacattacaaaccaaggtcacgtaggcagcggatgataaccagtcatcaaataaatatcaactccctcccccactccccaaatcaaagctcaaacataagtcattgttcccaaaatgttgaccaggaattgaggtgcagagggacggctaaggacgcaatgggcaccgaggaggcaggaaagactcagaggtttcttcccgggggggagggagtggacgctggagcaaaaacatttaaaaaggggaagttaagaggggactatttggttgaaagaaaacccacaatccagtgtcaagaaagaagtcaacttttcttcccctacttccctgcatttctcctctgtgctcactgccacacgcagctcaacctggacggcacagccagaggcgagatgcttctctgctgatctgagtctgcctgcagcatggacctgggtcttccctgaagcatctccagggctggagggacgactgccatggtaaggaccccacaacgctgtgctgatggatgggctgaaggagggagggtgaccatgtgggaagctgtgagaaggaaggggaagccactgctaccctcatcaggaagggcagacacaagaagcaccagttctatttgctgctacatcccggctctcggtgagacgaggagaaaccagacagacagtggctgggggtcaggaaagaccccattacagtctgaaatgtctgcagagggcccagtgcctgcccccacctcagctctaaaagaatgagagtcaggctcctgggagggcagttccgcttcttgtgtggctgcagatgacaacaccccatgagaaggacccagcctctgagtgtccacacagggtgggaaggaggggaggctatttctctctgtgtgtctctgtcccgccagcaccgagggctcatccatccgcagagcagggcagtgggaggagacgccatgacccccatcgtcacagtcctgatctgtctcggtgagatttgaagagagaggggagcttctaacctaggagggacctcaccccacagccaaactctggtccctaaggagaccccaggggctcacaaagatcccagggaggggaggacctgctcaggcttcagggggcaaatccctcacagggaactctcttccagggctgagtctgggccccaggacccacgtgcagacaggtgagtctgtccccagctctcccaggtccctcctcctcactggggacaaggggccacctccgtgcagctggggatggggattagaagttctggactgactgatgggggcatctggagggtcctgggctgagagctgagatctgttgggtgggaaatgacttcgaatctgacctttgatttccttccagggaccattcccaagcccaccctgtgggctgagccagactctgtgatcacccaggggagtc

SEQ ID NO: 7940 - DNA, 6000 bp, Homo sapiens
agcagtgacaatccctcagcagtgaaaggatgctgcggctacgtgtcccccagagatccagaagtagatcccattccacaatggcatagtgccagagccgtgatggccgtggacagtggggcacagtgtcagtcttttctcctgggtgagtgtagctgtgtggaatctgggtagctccgtcagctgtgcttagtgtctgtgaaagggaatctccaatggtgagatctacaggtgtccaaagtgttgatggaagctgctaggtctttttctcagctttttccagcaaggagaagtccctctttattccaagctgatcctgactgaaggatggggtgatagaggtgcagtgctactttcatttattacgtggccatcctgtgatttttaatgaaatggctaaaatggcagacatagaattcagaatctggatgccaaactaagatcactgaggttcagaagaaagttgaaacccaatccaagggatataaggaacccagtaaaatgacaccagaggtggaagatgaaatagacattttaagaaagaaagaaactgattttatagagctgaaaaactcattacaaaaattgcataatataataaaaagtagtaacggcaaaatagaccaaggtgagaagaaaatctcagagctcaaagactgcttctatggccaggcgtggtgactcacgcctgtaatcccagcacttcgggaagctgaggcgggcggatcaactgaggtcaggagttcgagaccaacctgaccaacatggtgaaaccccatctctactaaaaatacaaaatttgccggacgtggtggtgcatgcctgtaatcccagttactagggaggctgaggcaggagaattgcttgaacccatgaggtggaggttgcagtgagtcaagattgtgccattgcactccagcctgggcaacaagagcgaaactccatctcagaaaacaaaaataaaaacaaaattaaaaaagactgcttctgtgaatcaacgcagtcagacaaaaataaaaaaaatagaatttaaaagaatgaacaaaacctctgagaattatgggattatggaaagagacaaaacctatgacccattggcatccctgagtaagaaaggaagcaagcaacttgagaaacatatttgagaatattatcaataaaaatttccccaaccgcactagagagccaacattcacatttaggaaactcagaacaccccagtgagatactatacaacaaaaccatccacaaacaacatactcatcaacttctccaagatcaacgtgaaagaaaattattcatggcagctagagagaataggccagtcatccaaaagacgtacctcatcaggctaacagtgaacctttcagcataaccctaaaagtcagaagatattaaagatattagggtatattttcagcattcttttttttttttttttgagacagagtctcgctctgtcacccaggctggagtcacccaagcagcgactgtgtgcttggggaagggagaaggcaggactgaactcaatgctgccctgtcacactggaaagccacactgggctgattgcaactgatgcccgttcatggagaaagcatttgatgagctctacccaaaggggaactgcccagaaaatcagttggaacttgagattcagcaagtcccacctgagacctcaggctaaagtgctctgggtttgtttttttgttttgttttggttttagatggagtctcgctctgtcatcccaggctggagtgcagtggtgcaatctcggctcactgcaacctctgcctcccagattcaagcgattctactgcctcagcctcccaagtagctgggactacaggcacgtgccaccatgcccagttaatttttgtatttttagtagagatgggatttggccatattggccaggctggtctcaaactcctgacctcatgatctgcccgcctcagcctcccaaagtgctgagattacaggtgtgagtgactgcgcctggtctggggtcttaaacaagcttgaaagagtctaggccacaagtactgtgattcctgggaaaatcctagtgctgtgctgagtttggagccagtgaatttagagaaatcagcaaacgtagctaagggtgtacttgtttcatccctcccactacccaaggcagcacaacttgtagcaacaaaagtgattccttccttctgattgaagagaggagagggaagaataaagaggactttgtcttttatcttggatacccactcagccacagtaagatagggcaacaggcagagtcctgaggtccccatcccagatgctagctcctggacaacatttttccacataccctaggccagaagggaaattgctgccttgtggggaaggatttagtcctggcagaattcatcacttgctaactgaagagctctcaggccctgaataaccagcagcaatatacaggtactatgtcgtgggccttaggtgagactctgagacttgctggcttcaagtgagactcagcaccttcccagccatgttgactgtggggtgagaaaagtggaagaaaaagtaaaagggactttgtattgcaccttaggtaccagctcaacaacaggggatagagtgccaagtaggctctcaggtcctcaattcaaggactttgctcttagagatcatttctggacctgccctgggcctgggcagagcccagtgtcatgacggatgaatagcaggccaggaagccttcaccacaagctgactgaagatcccttagggcttaagagaacactggcagttctccctgtaagcctgttgtggcagtggtcatggcatgaggctcctttgccttaagaaaggggagggatgagtaggaaggacagtatcttgtggcttgagtgccaggtcagctgcagtgcaatagaacgccgggtggacttcaaggattttatttatttatttattattattattattattattattttgagatggagtttcactcttgtcacccaggctggagtgcaatggcttgatctcgcctcaccgcaacctccgcctcccgggttcaagcaattctcctgcctcagcctcctaagtagctgggattacaggcatgcaccaccacgcccagctaatttttttgtatttttagtagaaacggggtttctccatgttggtcaggctggtctcaaactcccgacctcaggtgatccgcccgcctcagcctcccaaagtgctgggattacaggcgtgaggcaccacgcacggcggcggaatctgttaaacacaaaaacgggagaggtggccccatgctgatcatggacttcagtcagtgggcagagatatcccagctcctgtccacaagcacgagcaagggtgaaccacagcttttcttttccttttttttttttctttttttgagacggagtctcactctgtcccccaggctagagtgcagtggcgcgatctcagctcactgcaagctctgcctcccaggttcacaccattttcctgcctcagcctcccaagtagccgggactacaggcgcccgccaccacgcccgcttaattttttctatttttttttttttaagtagagacgggttttcaccgtgttagccaggatggtctcgatctcctgacctcgtgatctgcccatctcagcctcccaaagtgctgggattataggcgtgagccaccgcgccgggccgggccacagcttttcatcttcatctggagcccctaccccctccctttccatgaggacctggggttcctcttctgtcccacacagaagtggaaatttcctccctaatgaccctgggacagtcttagacacaagcaggctgtcagctttcaagtttgttctttgatgtgcaaccttctcaaattaaagaacttttcatttctttttctgcacaaaactttcataatctacatatttcggatgtataatctacatatttcagatgtgtgtatgtgtgtgtgtgtatatatatatatatatatgtatgttttgagacagggtcgtgctctctcacccaggctggagtgcagtgctatgatcatacctcactacagcctggaccacccaggctcaagcaatcttcccacctcagtgtcccaaatagttgggactgcagtcgtgcacaaacatacctgattatttcttctttgttatatgcagagacggggtctcactatgttccccaagctggtcttgaacttctgagctcaagggatcctccatcctcagcctccctaggtgctcagattacaggggtgggccaccgtgccgggaacttcaaacataaggagcatttcttggtatttggagcagatgtgggctcttgagttggggcatcaatcatcctcctctactacggagctcaatgccaggatcctctcacaccccaaccactcctgtcttaatctggtctggaaattcaccatggccaagccccctcccatgtcccaggcaccactgagccccacatccactctgagaagctgaggtcatgaccacaagttccaaaagagaaaggctcaagcaagccactttgctgtccaaggtcacataatcggtggaattaggaagaaaattcagctccccactccaccccatgaatcagatgacaaacctgagtaattgttctgaaaaccttgaacatggttggaggcacagagggacggccaaggacaaaggggcactgaggaggcaggaacgacttagaggttcattcccagcggaggggttttgttgctctgccctagcccttggtgagctgagtataggtcaggccgacagcggctagggctcagggagaccccatttctgtctgaaatgtctgcagagagcctggagctcaccccagccccatccctggggaaatgagagccaggctcttggggagggcagttccccttcctgtggggcttccgatgggacagtcttgtgacagggagaacccagcctccagtccacactctgcgtgtttttgtgtcctgccaggcaccgtggtctcatccgcctgcacagctgagtccagtgggagctgacgccatgaccctcaccctctcagtcctgatttgcctcggtgaggtttgaagagggggaaggaaggtccccgtcttggagggagctcactctaaagcgaggctctggtctatcagagaatctggtctatcagaggctccgagggaggagaggaactgctggggcttccaggggcaaatccctcacagggaactctcttccagggctgagtgtgggccccaggacctgcgtgcaggcaggtgagtctgtccccagctgtcccaggtcccttcttctcactggggacaagggcccaaccccgggcagctgggggtggagatagctgttctgggctgactgatggggacgtctggagggtcctggggctgagagctggaatctgagggatggggatgtcttgggatccagcctctgattccattctaggcaccctccccaaacccaccctctgggctgagccagcctctgtgatagctcgggggaagcccgtgaccctctggtgtcaggggcccctggagactgaggagtaccgtctggataaggagggactcccatgggcccggaagagacagaacccactggagcctggagccaaggccaagttccacattccatccacggtgtatgacagtgcagggcgataccgctgctactatgagacccctgcaggctggtcagagcccagtgaccccctggagctggtggcgacaggtgagaggacactcaggggtcccagccccaggctctgccctcaggaagagggtcggctcttagggacgtctacctctcacagcccagccctggggatgatgtgggaggtcggagccccacttaagacgtgcctccttctctgctaggattctatgcagaacccactcttttagccctgccgagtcctgtggtggcctcaggaggaaatgtgaccctccagtgtgatacactggacggactt

SEQ ID NO: 7941 - DNA, 6000 bp, Homo sapiens
ttctcatatacattttagacacactaggaacatttctgcattttctggtatcaaaataccgcaatcatctgctcctatgttgggcaatattacctttctggatcctcctcttgctcattgttcagtctttacctaacctgtcacatcctcaaaaacattttttttaatgacaaactgggttaagtgatctttgcccctagtactcactgcttttgtttgtttgtttttgttttgttttttaacagagtctccctctgtcacccagcatggagtgcagtggcaagatctcggctcactgcaatctctccctcctggattcaagcgattctcctgcctcagcttcctgagtagctgggattacaggtgcccaccaccagacccaactaatttttgtgtttttagtagagatggggtttcgccatgttggccaggctggcactgttttttttttttttttttataagggcaacacacattcaagacctctaggtggcttaaattttgtgcatttatgcctctgtgtgttgtttttaaataatagttcatctcttttgtatttttgcttaattcatctgactttctccatttctattacaaattgaatgaacaatgggaggttttgttcactatagtgtttcttattcctgaaaaagttacttggaatctatgactattctctcattaattgtaaaacaaaacagataaatggacagaagaatagtgagattattacttgggttattagtagtactattaagttgaaccagagaatgcagagagctgagtgaggtacaaaaaaagaaaagggggccgggctcaggcctgtaatcccagcactttggggggccgaggcaagcggataatggggtcaggagatcgagaccatcctggctaacatgaagtcccatctgtactaaaaatacagaaaattagtcaggtatggtggcacatgcctgtagtcccagctactcaggaggctgaggcagcagaatcgcttgaacccgggaggcggaggttgcagtgagctgagatcgcaccactgcactccagcctgggcgacagagcaagactccctgaccaaaaaaaaaataaggccaggcacagtggctcacacctgtaatcccagcactttgggaggcagaggcgggtagatcacaaggtcaggagatcaagaccatcctggctaacacggtgaaaccccgtctctactaaaaatacaaaaaattagccaggcatggtggcgggcgcctgtagtcccagctactcaggaggctgaggcaggagaatggcgtgaccccgggatgcggagcttgcagtgagctgagattgcaccactgcactccagcctgggcaacagagcgagactccatctcagaaaaaaaaagaaagaaagaaagaaaagaaaaggcagtcacagcctttggctgcttcatattcctggccctgggacaccaggagccccacatgcagatctatggattccatactgacagctgacgcattactagaggtcaaagcgtgaggcttaggtttaactaattttgggactaatctgagaccagggaatagcagagttaagcattccagaggttggagatttttgtcctctgtccctgagttgttgtaaaaccaaacccgcaatatctctgcagctgagaagttgtctgtgacttcaacaaggcccaggaacctgaacatatttgaggaagggaccatagggttctaagcccaagctgggagttggggtcagcaaggatctcatacaattctcccatgagaagggaggagagttgtgaaggagccagggcatagtgggttacaggccctggagggggatacaatggtgggttacacaccctgagggggataaaatggtgggttacacaccctggttgggggatacagtggtgggttacatgccctggaggtggggaggatacaatggtgggttacgtgccctggtcgggggatacaatggtgggttatacgccctggtcgggggatacaatggtggtctggctactcatgccccacctcattcttattcataggtgtctgatatggttcggttctgtgtctccacccaaatcccaccttggattataataatccccacatgtcaagggcaggaccaggtggagattattgaatcatgggggcggtttcccctgtactgttctcgtgataatgagtgagttctcatgagatctaatggttttataaggggcttcccccttcgctccactctcattctctctcctgccgcccaataagaggtgccttccaccatgattgtaagtttcatgaggcctccccagacatatggaactgtgagtcaattaaacgtcttttcttataaattacccagtcttgggtagttcttcatagcagagtgagaacagacgcatacagagtccctgatcctctcaaccaacctccaccaagtatagacccatagtgaggaataactgggactcccctttccagagtgtagatgtgtaaacacccatccagggcttccgaggtgagtgtggccagtctagccctcagcaaatgctccattctgtctactgaccacgcccctccagcctctgccatggagaatctcatcccaatgaccatgctgtgttgatcccggtggcctctgggggatgctcgttcaggctcagcacagccagagaaggccccagacggcttccctcatgaaaactcaagttgagtgtggatttactgcttacagtttgcagaaccttggagaatctgcagaaaaaaactgagatagggcgggaagaatctggaggagcggaggcatgttccgggtgaacaaggtgctgctgcattcaagaggactattatttttttcaggtacaggtgtgcaagaaggagttaatctcacagctgcaagggtgataacgttgggagagtttgcttgtaaagttggtccttagctggcatctagttcctaaacatggctcctggaatgttccctatgttcctaagagataagctggtgttgtgtgactgcagcactgaattctactgtgtcttgactaggccatttccgcaaacaatgtagctcactgttgatgagtttgtaaaaaaaaaaaaaatgctgatgaacagcagcttttccctggtttccctgtgactgaccattatgcctatatggcccccacctaataacaaccttgaacattgagtcttaagcaggtttgcctggaaccaacacttcacatgcattgctacattttttatgctgatggaatgattaagacaagacatagattttcacagcttatgaccagcattcttgatcttaaatatattttggtaaagtttttttttttcaaaaaggtaaaaaaaaattgctcttctagaaggataaaatggacacaagtttttatttagcttactattaacgagggaacgggaaagatgttaatactgaattcaaagaagaatccgtagagcagacatttaggggctggtaatgtttaaggggattcaaaaatgagcctaatttttgttatttttagtatagagacggggtttcaccatgttggccaggctggtcttgaactcctgacctcaggtgatctgcccgcctgggcctcccaaagtgctgggattacaggtgcgagccaccgtgcccggccatagaattgatttttaagtgtgttaattctacctactattttcaccacagccacatctgcctacataatttctagttgtctatctcttctcaaatacactgcatgctgtccatctacccccatgcacatgatcttacaaagaacatttctcccagagacgactcagaaatcaggcctgtccagagcgggtggttacagctgctcctgtccaggagcatcaactcttccaaacttagcatctgcccaaagttgtggctggcaaggcggagtccaatgtgacctcccactcacgtgtgggacagatgtccaggtgtgacaataccacagacagcctgtttttcacacacacacaggggagatggagcctcctccatggggaggctctgagagggaaggaggaaccatcagtccctctcacctggaaggggctgaatcaagaaggcaccgggtctgtttgctgctacatcctggcccttggtgagatgaggacagattagatagatgcagccaaagtgaggggagagcccatttctgtctgtaatatctctagagagcctggtgttcacgcccaggacaagccctggggaaatgagagccaagctcctggggaggggcagttcctctttctgcccctcatggctcccacaaggaagcagagagatggcagtgcccatgtgcaaacacagaagaggggcagccacagcgtctcactttcacctggagccctaggttcctccctgtctgtgaggaccctggacttccttttctgtgccacacagagatggaaacgtcctttttttttttttttttgagatagagttttgttcttgttgcccaggctggaaggcaatggcgtgatctcggctcactgcaacctctgcctccggagttcaagtgattctcccgccttagcctcccgagtagctgggataacaggcatgtgccaccacgaccggctcatttttgtatttttagtagacacggggttttgccatgttggccaggctggtctcgaactcctgacctcaagtgatccacccaccttggcctcccaaagtgctgggatgacagctgtgagccacagcgcccggccgaaaatgtccttcttaacgacccccttgtgaatccccatttgtgtctgaaatatcggcagagagcctggtgctcacccccaggacaagccctgggaaatgagagccagggtcctggggaggggcagttcctctttctgtcggtgtgctgatgggacaacctcgtgatggggaggacccagcctccgtgtgcccgcacaccatgtgtctgtctgtgtctacgggcaccgtggccacacctgcctgcacagccagggccaggaggaggagatgccatgaccctcattctcacaagcctgctcttctttggtgagatcttaagagggggaggagagaccctagtctaggagagagaccccaatccatagccatgccttagtcaattagggcatcccaggggctcaaggaaaagaagaagacctgctcaggcttcggaggcaaatctctcacagggaactctcttccagggctgagcctgggccccaggacccgggtgcaggcaggtgagtctgtccccagctgtcctaggtccctcctcctctctggggacaagggaccacccctgggcagctgggggtgaagacagcagttctgggctgactgatggggatgaggggggtcctggggctgagagctgggatctgagggttgaggacatcttgggacctaacctgtaatttccttccagaaaacctacccaaacccatcctgtgggccgagccaggtcccgtgatcacctggcataaccccgtgaccatctggtgtcagggcaccctggaggcccaggggtaccgtctggataaagagggaaactcaatgtcgaggcacatattaaaaacactggagtctgaaaacaaggtcaaactctccatcccatccatgatgtgggaacatgcagggcgatatcactgttactatcagagccctgcaggctggtcagagcccagcgaccccctggagctggtggtgacaggtgagaggacactcaggggtcccagccccaggctctgccctcgggaagggggtcggctctcagctctcgaggggtctcccttctcacagcccagccttgtaggataaggtgggaggtgtgagccccatttaaacacggctgcctttttttctcttgaaagcctacagcagacccaccctgtccgcactgccaagccctgtggtgacctcaggagtgaacgtgaccctccggtgtgcctcacggctgggactgggcaggttcactctgattgaggaaggag

SEQ ID NO: 7942 - DNA, 6000 bp, Homo sapiens
aaaagaaagatgaaaaggtaaaggcagagaaggttgaatgcagaagagaagggagaaaggatgaagccacaggatggggatgtggccacagattctgagaaacactggagacacttccctgtgctggagtgcagggcctcccccatcaactgcttccctgatatttattttattttatttattttattttattttattattttattttattttatttgagatggagtctctccctgtcgcccagggtggagtgcaatggcgcaatctcagctcactgcaacctctgcctcccgagttcaagcaattctcctgtctcagcctcccgagtagctgggattacagctgctcaccaccacacccagctaatttttgtatttttagtagagatggggtttcaccatgttggccaggctggtctcgaactcctgacctcgtgatccgtctgcctctgcctcccaaagtgctgagatgacaggcgtgagccaccgcacctgaccctttcctgatatttatgctgaagtcccgtaggtcagatttcacctaacggtaactattagggagatgaggaagagtaacagcccctgagactggggctctggtttcagtcacagtgaacatttacacagttctactgctcctcatgacagtctcatggcaaaagggtgtcctccccattttattttattttattttatttatttatttgtttgtttattttggaggcagagtttcgctcttgttgcccaggctggagtgcagtggcatgatctcggctcactgcaacctctgcctcctgggttcaagcaattctcctgcctcagcctcctgagtagctgggattacaggcatgtgccaccacgcccggctaattttgtatttttagtagacacggggtttctccatgttggtcaggctggtctcaaactcccaacctcaagtgatccgaccacctcggcctcccaaagtgctgggattacaggcgtgaaccactgtgcccggcaatgtcctccccattttagagctgagtggatgtcatcacatcattccattagtgtgcatatccagaagcatatctagatcagccaaagcaacagagacactgaagagattagtagcttccaggccctggagggtgacaggcaatagggagagacggcctaatgggcgtggtgtctgctttaggggtgatgaaagtgttttgcaagtagatagaggtgggggctgcacagcgttgtgagtgtgacaaattgctcacgttcaaatagctatttttttttgtggagacagagtctcgctatgtcacccaggctggagtgcaacggtgcgatctccgctcactgcaacctccacctcccaagttcaagcaattctcctgcctcagcctcttgagtagctgggaatacaggtgcctgccaccccgcctggctaattttggtatttttagtggagatgaggtttcttcatgttggccaggctggtctccaacgcctgacctccggtgatccgcctgcttcagcctcccaaagtgctgggattacaggcgtgagccagtgcgcccagcttaaaatagctaatttatttatttatttatttttgtgggggacggaatcttgctctgtcgcccaggctgggagtgcagtgatgtgatctcggctcactgcaatctccgcctcccgggttcaagtgattcccttgcctcagcctctcgagtagctgggactacaggcgcccgccaccacacccgggtaatttttttttttttttggtactttagtagagacggggtttcaccatattggccaggatggtctcaatctcctgacctcgtgatccacccacctcagcctcccaaagtgctgggattacaggcgtgagccactgtgcccagcctaaaatagctaattttttcactgggcacagtagctcatgcctgtaatcccagcactttggggggctgaggtgggaggatcacttgagtccaggagtttgagaccagcctgggcaacatggcaagaccccgtctctattaaaaagttaataagttagtcagatgcagtggtgcatgcctgtgatccaagctactcaggaggctgagacaggaggatcacttgagcccaggaggtcaagggtgcagtgagccgagatcatgccactgcacttcagccttcgtgacagagagagatcctgtctcaaacaaaacaaaagactaatttttgtgtttaaaggaattactaaatgattggctggagagttcctcttcctgtatttgaaccccggctctgccacttattagctgagtggcctggggaatgggacttcacctcactcagcctccatttccccatttgtacaatggagctagtacatccgacttcttaggtttgggaggagtgaagaaggcccatcaggcacttagaacagagcctaacagatggaaggaactccaggcagttttgttgttgttgttgttgttgtttttgagatgggagttttgctcttgtcgcccaggctggagtgcagtggtgtgatcttggctcactgcaacctccacctcctgggttcaagcgattcttcgcctcagcctcccaagtagctgggattacaggcatgcgccaccatacccggctaatttttgcatttttagaagagacggttttgccaggttggccaggctggtctggaactcctgaccttgggtgatccaccggcctcagcctcccaaagtgctgggattacaggtgtgagcaggcatagttattgtcatcattcaaacacagatccctccaatcagccatgaccccggaccctcacactcctgccccttggtctgacccttcccttgttctgcctagtgctggcgtgggtcgcacaggaaccctcattgccctggacgtcctgctccggcagctgcagtccgagggtctccttgggcccttcagctttgtaaggaagatgagagagagtcggccgttgatggtgcagactgaggtgaggcagtccctcagcaacacaggacgggaggcagtgggacgagggaccctggggctccacgcagctcagacctggggggacgcctctcactcccgtgcctgcttcccaggctcagtacgtattcctgcatcagtgcatcctgcggttcctccaacagtcagcccaggccccagccgagaaggaagtcccgtatgaggatgtcgaaaacctcatctacgagaacgtggccgccatccaggcccacaagttggaggtctaagtgacgagggggctgggtcggcagcccaggcatcctcaagctctggacacccacttgagcccagattcctggaagagcagagggctgggctcccagactcctgggtgctgtgggaggagggggctggtatcccaaactctggtttccccaggagagagtggtctggtgggcttcagatgagtcctatgggagctggggatctggattcctggttccctgaaggaggagagggatgatagcttggattccctaggtctttccaggatgcagaaagaaacaggctggggcctggattctgaggcaggaaggaatttgggtctggagttctggctacttgaggaccaaaggcaggaaggatcctgccttgattttacttcagaaaccaaatcagtcttctataatctggggtcggagggagtccctgtgcccaaggtctctctgcaccccaccatccacatgtatttttccttctatcccataatttattaaatcactgttctccccagagacagttgtcccatggatttctgggtctggaaataatattggattgggagtagggatgggttcctggtatctagggatcgaggcgaacgtccaggaggggactagagggacccacacatttgcacatgaaaaaatgtaggtttgggtggttgagtctctcagagaaggcagtgtccagacgtctgtgtccagggtctgggcagtatggacagggctcgctggagctaggtgcttggggacttgccttctgagcttttcttttactcttctctgttgttgttgttgttgttttgttctgtttttgtttttgtttttgagacatggtcttgctctgttgcccagactggagtgcagtggctcactgcagccttgacctcctgggcccaggtgatcttcccacctcagcctctagagtagctgccatcacaagtgcgcaccaccacgctggctcatttttgtagagacgggattttgctatgttgcccaggctggtctccagctcctgggctcaagcattcctcctgcttcggcctcccaaagtgctgaggttacaggtatgagccaccgcactggccgcctcctgggactggtgttaggggaacttagagggcgatgtctgggggctgatagctggggactttgatgctgaaccctgcagagtctgggtctccaatgggggtctggggtctcctaggtcctaggactgagtatcctggcatgccgttctttgggctatacagggtgtgtgtcgtgtgtgttggggcgggaggagtggagtggtctggacggccaacgactggaccagaaggcagaaaatgctaaagcaccaggataaacatctgtgggcgtcatcgaggttcccgggtggaggcgggaggaggggcggggcagggctttccgcctacccgagaccaaatacgggcacacacaatacacaccacacacgcgcgcacacgcacacgggcacacacgcgcgcacgggatcctgctccgctccgcggctcccccgccccggagagctccgcgatcagcacccgggacagcgccaccgcccacgtgcagggggtggggtccgggcggggctggcgcctcggcgtctcccgggagtgtcccgtccagccgccgagcaggtaggagctgctgggacccccgccctcagcccatccgcatccgcatccctagaggaaaggggtgtgcgagtgggggctggggcactggggagacaaccagagggagggcagcagcctgaagcggagagacagggatctggggacgcgagacaggtatggagaagacaaagagccgagggcggggagtggggcgcaggcggaggggagagggagagaccctggagacagaggccaggcgatagggaagagagacaggcgggttggggaggcagacacagggaagacgcctatgtggggtcaagaggcagcgtggagaccgaggcggtcacgagagcagcacggatgcgtggagagaccaacaggccaagaaggatgagggggctcagcacaggcaccgggcagcccccgacccgccctccagcaaaattggggagagggaagagggaacctgcgtctcagctcccaggaccaggtgcggagggagcagtcggctgtgggcgctcggaccacaggctgcccgctccccacctcgcgggacctcaggatcccagtcgggctattggggggttcccaggcaccggtgggccccggagcgagcctgccccgccgggactccgcgtctgtgcgtcagccccgcccgttgtcctggcaacaacccgttgcccgggcaaccagctttgctctcaccccgcttgagaggagcccggctgttgctctgggcaacgcggtctgctggttcccacgtctgccttcgcccgcttccggttcagaccctgcggaggggcgaggacgaggcagaagtcagcgggatgcctgtggggccgtggaggaagagggtatccctttaggatggaactaggtcctggacaccccctctcaagtgcggggaggctgatactacaactcccagcatgactcgcggtggctgtccggtttctgcgcggctgttcgcgcaaaggcctcatgggagttggagttctttgttgtgcgtggggctcaaaggacgtctggggtgggaatgggggactagggtgcttgagtgtctctgcagaaaagactccaggaccccgccaccatgttcccggagcccccaaccccggggcctccatcgcc

SEQ ID NO: 7943 - DNA, 6000 bp, Homo sapiens
gtcacccaggctagagtgcagtggtgcgatctcggctcactgcagtgtcccctcctgggttcaagcgattctcctgcctcagcctcctgagtagctgtgattacaggcatgcaccaccatgcccggctaatttttgtatttttagtacagatggccaccatgttggccaggctggtcttgaactcctgacctcctgcctgaggtcatccacctgcctcgggctcccatagtgctgggattacaggcgtgagccaccatgcccggccgaggagttgggttttgaagagaaagcaagtagggtgtggtaggacggtgggtgtggagtcaatgtaagtgatgcatttttttatagacagggagggtgagcatgtttataagttggggatctagatgggagggaagagagatagagggaagagacagtgaggaggaggaggaggaccaggagagagagagagacatcaaaaagtataggggagacagctgggtgtggtggctcatgcctataatcctagaactttgggaggccaaggtaggaggatcacttgagtctaggagttcgagaccagcctgggcaacaaagcaagaccctgtctcaataaaaaaaaaattttttttaagatatagacgagaaacagagaaaggttaaaacagaaacccaagcaagtgattggcatgaattacatccggtgcccactgaaaggaaacttctcgcaaccaaacctttgtgtatacagatggggaaactgaggctctcagagacagagaaactgacttctcaaagtggtggtgtgagaacttatttatttatttgttaattttgagacagagtctccctctgtcaccccagctggagtgcagtggtgcaatcacagctcactgcagcctccacctcttgggctcaactgatcttccctcttcagcctcctgagtagctgggaccacaggtgtgcaccaccatgcctggctaatttacttctactttttatagagacgggatctccctatgttgcccaggctggtcttgaactcctgggctcaaggaatcctctcgtctcagcctcccaaagtgctgggattataggcgtgagtaaccatgctcagctgttttgtttgctttttttttttttttttttttctttgagaaagagtcttgctctgtcacccaggctggagtgcagtggcgctatcttgactcactgcaagctccgcctcccaggttcacaccattctcctgcctcagcctcctgagtagctgggagtacaggtgcctgccaccacagccagctaatttttgcattttagtagagatggggtttcaccatcttagccaggctggtctcgaactcctgatctcaggtgatctgcccacctcggcctcccaaattgctgggattacaggtgtgagccaccgcgcctggccattgttttgctttctgagacaggggctcactctgtcacccaggctggagtgcagtggcacaatcgcagcttactgcagccttgacttcccagtctcaggtgatcctcccacctcagcctcccggtagctgggactacaggcgtgcactaccatgcctgggtaattttttctctctttttgtttttctttgtaaagatggggttttgtatattgcccgggctggtctcaaactcctgggctcaagtgatcctcccacttcagcctcctgagtagctgggcacacaccaatatgcccggctggggtttctattcttcatttccgcactatatgtgagatgaaggcagtccacgtgtgcacatagtaagtcaacaaaaacaccttgaaaagccctgggtgtcaggccccttctgagcacaggtggcctagggatgaactaaaaataaacatgactaatatttatcaactgtttaaaatgggccaggcattgttccaagactttccacgtagtaactcatctatttctcttagcatatttacaagggtgcccattctttagagatgaggaatctgagtcactgtggatttaagtcatttgctcagggtcacagatggatatgcaaattagagagtctggggtgtggaagacagtgcacagggtcctgaccaggctagaaaggccccaggcccggcatgggtcatttccaagctgaatcctaatggagcagtgggtaggagactgttagggggaaagtaggcaggtgcatctggtgggggagacagtctaggcaaaggccaagaggcaggagcccgctgggctcattttgtgagagctgcaggggcttgtgggagacggagaggggaaaggcgtcagaggctgaatggaagagcgtgctccagggacgaggggcatgaggtctaagccccaggctgctcttgatgtgtgatcacccaccagggaggcgagggagtcagctggcctttctctcagcaccccctgctctcatcctctgccccacgtcccgcatccgtgcagcagtggggcgcggcacccggtacctggggtgcagagggagatttcgggggacaaagtggagtgggctgggggctggagaaaggatgggaggcatctccagtgtcagagctagaggcagcggtgagggaggaaggtgagggccagcggggcagggttgggagctgggttccacttcctcctcctccccttcccgccctggcctctggcttcaccaatgatctggtaaaggggaaattcttgagtgtaaagtccagcaggtggaaggactaggcctgggactcctgggtccccggcagtgtctggaggcatggctggggctggcgggggcctcggggtctgggggaacctggtgctgctggtaagtgctccccgcccagagcgggctcccaaggcagggactcccaggtctgagggagaaggagctgggtgcctgcacctcgatcttgaggaagtaggtgctgaagatcccctggagaaggaagagggcttcaggcttggcagagactgtaggagagtcttacacctgggctcttagatactgtcgtgtctgctgcgggggacaccagcttcacccgggcccttagacattgtcgtgtctgttgtgggggacaccagcttcacccgggcccttagacactgtcgtgtctgctgcgggggacactggcttcaggcaacacacagctgtgctcacggacaggaagcagcccctcctccctcaaaccaagagtccagaccccagcccctcctccctcagacccaggagtccaggcccccagcccctcctccctcagacccaggagtccagaccccagcccctcctccctcagacccgggagtccaggcccccagcccttcctccctcaaaccaagagtccaggcccccaacccctcctccctcagactcaggagtccagacccccagcccctcttccctcagactcaggggtccagacccccagtccctcctccttcaggcccaggagtccagacccccagcccctcctccctcagacccaggagtccagaccccagcccctcctccctcagactcaggagtccaggcccccagcccctcctccctcagacccaggagtccagaccccagcccctcctccctcagacccgggagtccaggcccccagcccttcctccctcaaaccaagagtccaggcccccaacccctcctccctcagactcaggagtccagacccccagcccctcttccctcagactcaggggtccagacccccagtccctcctccttcaggcccaggagtccagacccccagcccctcctccctcagacccaggagtccagaccccagcccctcctccctcagactcaggagtccaggcccccaacctctcctccctcaaaccagaggtcgagacccccagcccctcctccctcagacccaggagtccagacccccagcccctcctccctcagacccaggaatccagacccccagcccctcctccctcagacccaggagtccagaccccagcccctcctccctcagactcaggagtccaggcccccaacctctcctccctcaaaccagaggtcgagacccccagcccctcctccctcagacccaggcccccaggcccccaggccctcctccctcagacccaggagtccagaccccagcccctcctccctcagactcaggagtccaggcccccaacctctcctccctcaaaccagaggtcgagacccccagcccctcctccctcagacccaggagtccagacccccagcccctcctccctcagacccaggaatccagacccccagcccctactccctcagacccaggagtccagaccccagcccctcctccctcagactcaggagtccaggcccccaacctctcctccctcaaaccagaggtcgagacccccagcccctcctccctcagacccaggaatccagacccccagcccctcctccctcagactcaggagtccaggcccccaacctctcctccctcaaaccagaggtcgagacccccagcccctcctccctcagacccaggagtccagaccccagcccctcctccctcagactcaggagtccaggcccccaacctctcctccctcaaaccagaggtcgagacccccagcccctcctccctcagacccaggcccccaggcccccaggccctccaccctcaggccaaggttcctgatccccaaccttggtttttttctcccttcccagtctgttcattgctctctgccctcggttttccaaggacatatatttcaggaaatgaaatcattaattttatctctcagccttatcgggtggagccaaccccagctccctaagctctgctcctgccatgctcccccttctctcctcgacccaggaaagacggtcgaggtcgtgacagcccagcctaacaccggcccctccttcccatgcaagggtgactcatggggcggggaccagccgctcctcccagcccctcggcctcactgggcggaggagtggttgagaggctgactccgttttctctgggttccctccagggcctgtgcagctggacaggggccagggcgcctggtgagtgacccctgcctgaactcactgcccactcgaagaggtgggaccgcaactgccgtgagcctctggggggtccccgtggggtccagtggtccatggtaggggtttatgagcgccgttgtttctggacttggggcgtgagctcaggggttgggagggattgtactgacctggttccctttttgtcagaccttccttcccaattctcagcccccaacccagggaggaacctgacagtggagactcagaccaccagctccatctccctgagctgggaggtccccgatggcctagactcacagaactccaactactgggttcagtgtactggagacggcggcacaacagagactcgaaacacaacagccaccaacgtcaccgtggatggccttggacccgggtcattgtatacgtgttctgtgtgggtggagaaagacggagtaaatagctctgtggggactgtcactactgccacaggtaagaggcagccactgctttatttttatttcttttataaggacagtggtagggggtggttgagagctgacaaaatgcgacaggttctttagttggatagaaacacagtggaagccacacgtgagaatttcaattttctatcagccacataaaaataagtaaaaagaaactggtcagcctgtctctacaaaaaaattaaaaagtagctgtggtggcgtgttcccgtggtcccatctactcgggaggctgaggtgagaggatcgcttgagcccgggaggcagaggttgcagtgagctctgattggaccgctgcactccagcctgggcaacagagagaaaccctgtctcaaaaaaaaaaaaagaaaagaaaacaaaagaaaacaaaagaaaagaaaaacaaactaaattactatgagagattttatgtagtccatcagatacaattttttttttttttgaggcagagtcttgctctgtcgcccaggttggagt

SEQ ID NO: 7944 - DNA, 6000 bp, Homo sapiens
ttttgaaaatgggaggtttgttgggcacggtggctcacacctgtaatcccagcactttgggaggccaaggtggatggatcacctgaggtcaggagtttgagaccagcctggccaacatggtgaaaccccatctctactaaaaatacaaaaattagccggctgtggtgggtgcctgtaatcccagctactcaggaggctgaggcaggaatatcgcttgaacctggcaggcagaggttgcagtgagctgagatcgcaccattcattgcactccagtctgggtgacaagaacgaaactccatctcacagaaaaaagaaaatgggaggttttagttttccaaccttgttcttctttttaaagattgttttgccctatttgggatttcttgagattccatatgaattttaggatcagcttgtcaatttcaaccaagaagccaccttgcgtcttctaatacgtgaacatggatgtctttttatataggtcttaaaatttctttcaacaatgtttcgtaggttttagagtatgaggctttgtatttcttttaagtttattcctgttttcttctttctgttactattgtaaatggaattttcttgaaattgttttcagattgttacaagtatatgaaaatacaataggtttttgtatgttgatctttcatcctgcaaccttgctgaactaatgtatgagttctgatagttttagtggactccttaggattttctatgtacagaatcatgtcatgtgaatagagttcattttccttcctttcaaatctggatgattttaatttccttttcttgcctggttgccctggctagcctccgggacaatgttgaacagaagtggcaagaacaggcatccttgttttgttcctgatcttagggggaagcattcagcgttttgccatgtaagcatgctgttagttgtggggttttgtagatgccttatgttaggttgaggggcttcctttatactccttagtcgttgagtattttagtttacttttaactatatacagatatattactttccagttaaagtagtcagttactctgttaagacaaaaatattgggtcagcattttagacatagtatatagtcccatactgcatctttgggtcagcgatggaccacatatgacagtggtcccgtgagattataatcctctatttttgctgtatttttcctatgtttagatacacaaacatttaccattgttagaattgcctgtagtattcagtactgtaacatgctgtataggtcggtagtctaggaacaataggctataccacagagcctaggtgtacaggaggcgccaccatccaggtgtgtgtaagtgcactctagaatgttcacacaatagcaaaatcgcctaatgatggcgtttttcagagtgcaccctcgttgttaaagcttagttttagtgttactttgcttaccccttccccggttgatcagcacgtaggttgcttggattttcttcatgctcacaggtgtgtgttagtcaacattcagccagtgtttttggagcagctatgggtgcctggtggtttctcagggctgaggatacagcagtggcaaaactcagccatctctgccttcttggagtttctagttggagggagagagtagtgtgaagcctctgtccagagggtgggcctgctggtgggaaggcctgtcactgtggtgaccgtgtgaggtgacggctgggaggtggcttgagagctggtgagtgggtctgtctgctctggttgccatggctgaggctcagcccacttccccagggcctgccctccacggatgactggcgacggacggtctccttacggccgcattctgtccctgcccgcctgtgttcttgccgttggctcagaactccctctcccagcctctcctggtgtcgtcacaccccaggctccctggacccttctgtgacctgcctgtcatcccagcccgctctccttgggctgaccctgggctgcagggaacaggatgggtgtcggccggtctgtcccacacagctagctgacgaggtggtttctggggcaggagtggaggcagcacagacagtgaggacgaagaagaggaggacgaggaggaggaggaagacgaggagggcattggctgtgcagcccgtggaggggccacccctctgtcctaccccagccctggccctcagcctccaggtgaatgaatgggcggtgtggtcaggtgtacacagggctgtctgcctgctactgagttcaccctccatcccgctcccccacctctatcccaggccccagctggacagccacctttgacccagtgcctacagatgccccgaccagcccccgagtctccggggaggaagagctgcacactgggcctccagccccacaggggcccctcagtgtgccccagggcctccccactcagagcctggccagccctcctgcccgtgacgccctgcagctcaggtgagaaccggatggaacgggctaaatggtgctggtatcccgaggccaggaggtggccatggggtccccgtcctctcataggctcgagtgctaaccctagctgcccccttgggctgcctctctcgcctaccaggtctcaggaccccacacccccctcagcacctcaggaagccacagaaggcagcaaagtcacggagccctcaggtgagccccgctttgccctgcccacccgcggccctgggcagagagagcagcctggccagctccgagcttgctgggagctgcagctgagatctcttatcccccacagccccttgccaggccttggttagcatcggggaccttcaggccaccttccacgggatccgttctgcccccagctcctcggacaggtgagcagcgaggtggggctgcctagtatcgggagaagtcttttctcctcttcgctgaggtgggctctgggttcatcttgtccctgagctgctccaggcctcctttgcaggacccccaggcgcagcctcatgttgtgccccagccccttgcactctgtaggctggttcttctcttagtagcctgggatgcttggggcccttgagccccagggttgggaagggctcgttggagggtgtgaaggattgggagggtgagagcatgcagaagaccctttggggctgtctcagccggcctcgagtacctcctccacagggacaggaggcgggaagaggggtgcttgtcttcctgtccagggctgtgctgtccctccacgctgagccagctgcgtcctcgggaggcccctccccgtggggcaggtggcagacacacacccagtgagccgacttcagtcgggtgggatgtgagggtgtcagcaggtgacggtgggggccacgctgacagccgcacctgcctctcacccacagtgcaaccagagacccctctacctctgtcccagcctccggggcccaccagcccccccagaccacagaaggggagaagagcccagagcccttggggcttccccaaagccagaggtgagcaccagggcagcagggcgggggggtgggggtggggctggtggggcaggaagtgacctctgcacatcccctctctcccctgacagtgcccaggccctcacgcctcctccgatacccaatggctctgccccggaagggcctgcatccccaggctcccagtgagtgtggctgcagcctcgggctgggtaggtggggctgggcctgctagaccctcacacgacatctccctctgtttccagatagctgcctggtgcggcagcggcggccaaatcttccgtcctcccgtggatctcccggggtgggggcagggcgggtcccacgatggcccccattgccctcatcaccctgacacccccacattctctcctctggacccccaggaggctggtgccagggagacaggcccaacccacccccatttgcactgagaagagaagttttggagcgttgcctcctagaataaagatacagagagtcaaatagagagaatggagagagagaaacatatattatatattatatagagagagggaggagagcgagagagagtgaggacaccgaactgggctggcggctccaaagcacagccttccctgttccgtcccagcgggagctggtgttaggggtcccaaggttgccacccacgtgcccagctgtcccacgctgcagcgcagacggccacgcccacacccggccttttagctcaggtccaccatgggggacggcccagcgtgggtgggggtgccagagggtcccgagtgggggccgtgcctttgcccagaccctgcactttcaaccaggccagtccggctctggggagcaggggcctccccggcaacagccccaggggccttgagggtctgaggtcccagccctgttgccaagtgaccttgtccccagctccctcctcccaggctggtgtgagtgtgcgtgcgtttgtgccgagcttctatttcatattgcaaatataaataaaggaaggcagtttacgattctgctggtcagaccttacgttctgggatgcggggtggggagcctgtattatccctgcaccccagaggctgggggtgctcctgacccagtctgcccccacactgtcctgccagagggagccctgtggctgcagaggccccaggctgggccaggcactggctgtgagggctcctgccaggtctaccccacctgtgggcagggccttgggcagaggatagaagccaccgacaggctcaaatccctgctcctgcccctgcttacccccagtaaccaagcccagcattgaggctgggtactggcgcccagtaggtctgagtctttcaggtagaaggtagaagtgtaggctgcgtgtgcagcgagtggcaccggtgagcggcgctgggaaaccggagcgtgtggaccgggccatgaggacagcgtcctcactggggtggcagttggcttggaggtcacctgggggctcgctcagctaacaggagagggtgcttgttccccgcattcgtggtggtccctcctggtcacccattgaagcagtgtttgtggtggagcccctgagggcttggtggggttgagcagaatgaggaaaggtttcatggagcagggagggagacggctagggcagcaagtgaaggacagactcgccttcccatccctccaggggcactcctgccagccagcccctctcccgcttcccatgatggggtggctgttggaattctgcaccccatctcttctgattgttggggcccaggacaaggggacaggcatttgtgggcctaacctccccaggcagataggaggaggaagccatgtcccagcaggctagggcagagggacccccagtgccaacagtgctttatcagcgggcgccaggcagggccatccccagggtgaggacaacatctccctgggccctgttatcagtcacagagtccacaggacgctccttgggttaacgtgtaaccatgagccctcccctccaccccctgaagccactcgctcccagattaggtcgctctggggctatcaggccagcatggacgctggcaaagcggggcagaccctgaagactcactgctcagcccaggtgagagccttctgagctgtgcctggggctggggggacagggccctggaaccccagcagccggcgggtctgggagctgctgtccttgagttggttgggccctgggaagctgggttctggcagcctggtccctgaatgggtccagcctgtacagctggggtcccaggtgggggtgggacaggagccatgagatctgagtcccaagaatgggggctgggctgggtttcggctcagtagctccccactccccaaagcgcccagatgtctgcaggtggctgagccccttcatcctctcctgctgcgtgtacttctgcctctggattcccgaggaccagctgtcctggttcgctgccctggtcaagtgcctgcccgtcctctgcctggctgggttcctgtgggtcatgtccccaagcgggggctacaccca

SEQ ID NO: 7945 - DNA, 6000 bp, Homo sapiens
gtatgactctttccttactcaacatacaagcacttacactgcagagaaaccctatgactacaatgaatgtgggacgtctttcatctggagctcttaccttattcaacataagaaaactcatactggagaaaaaccctatgaatgtgataaatgtggaaaagtttttaggaatcgctcagcccttacgaaacatgaacggactcacactggaataaaaccctatgaatgtaataaatgtggaaaagccttcagctggaattctcatcttattgtacataagagaattcatacaggagaaaaaccttatgtttgtaatgagtgtgggaaatctttcaactggaactctcatcttattggacatcagaggactcatacaggagagaaaccttttgaatgtactgaatgtgggaaatcattcagctggagctcccatcttattgcccatatgagaatgcatactggagagaaaccctttaaatgtgatgaatgtgaaaaagcttttagggactactcagcccttagtaaacatgaaagaactcattctggagcaaaaccatataaatgtactgaatgtggaaaatccttcagctggagctcccatcttattgcccatcagagaactcacacgggagagaaaccatataactgtcaggaatgtggcaaagcattcagagaacgctcagccctcactaaacatgagataattcattctggaattaagccctatgaatgtaataaatgtggaaaatcctgtagccagatggctcaccttgttagacatcaaaggactcatactggagaaaaaccctatgaatgcaataaatgtggaaaatccttcagtcagagctgtcaccttgttgctcatcggagaattcacactggtgagaaaccctataaatgtaatcagtgtgaaagatcctttaactgtagttctcacctcattgcacaccggagaactcatactggagagaaaccatacaggtgtaatgaatgtgggaaagcatttaatgagagttcatcccttattgtacacctaagaaaccatactggagaaaagccctacaaatgtaatcattgtgaaaaagcattttgtaagaattcttcccttattattcatcagagaatgcatagtggagagaaacgctttatatgcagtgaatgtggaaaagcctttagtggtcactcagccctacttcaacaccagagaaatcacagtgaagagaaactgaattgaatttatgcgagtttttcgtttcttgtacatttgacaacacattgaggaaaaccctataaacataatcaagaggggacatttttcattaagagttcagtaagacttctcccacattatttactagaaaatatcatcttagaagaaaccccatgaaggaaaagaatagggaaaagctttcagcagttatttagcccttactcaaaatcagataattaacaatgaaggaaactctaaactccccttatggtctaccagtaattcatacttgaggaccatgactgtggggaatgaggcatcttttagcaagagctctcaccaattgtagattggtgtgaattgctaagggaaaaaccttatgcagagaaaagtttttgactggaaatacactgttttgcatcaagctggagtactggatggaaaactctacaataacattttgtgcataattgtagaaatacagattttgttgttataaggggagggtctgggtgcccaggagtagaatatgaagtgctaaatctgaatgtaagaaaaataatagtattgaatggggtatttactgttgattaacctccttagagaaaattaatgaatgagatgactaacggtagaaaagttattgcctaggagtgtgagactgatgttgctggacagaaagtgatccttagcccagtgtgtcagcgtccattgttactcatcactgcattgttgggcaattagtttgtaatttgttttaggcaatcactataaattataattatggacactgcatcagtatacataacatgaaggaataaaaaggatacagaattgtatatacatacttactgtaacacatctaaaaaaatgtatatgggtaaggacctgaaagatccatggaaaagttaacccagttgagatttttaaaaagttttacaaatacatataacacttatgtgctgggctttcttttaaatgctttccaagtgttaacttgtttagtcccctttactctgagataggtactgttaccccagttttacaaatggctaagctgaagcagagatgttgaaggatcctacctaaggggcacaactagtaagggagtagagctgagattggctccagagttcttgttttcagccaccattttatgctgcctctccagtgattttttttcccattttcttcagtgtttctatagcagagatttgataataaaaagaaaatcctaaacaatgagaaataaagttacctggtttctctgtctcgaaggatttatagtaacatgagaactagtatccctttggaatatgaagtctgtgttggacattcagaatcactgcattttctgggacctgagttccctagaactttgctgcctgcaaccccaaggataacagggcagcagggcctggaggacttgctggaggactgggcaagtcccttggtgggtttagaatgccacttacagagcagagggcaggggtgtttgttcctttccataactagacaccactgcacttcagagcaccattacccaaggtttaccttgaattcggtcttttatttttttgaaatcttctgcagatgaaaggcttacttgaaggagcaggattcagaagggaagagagctagccagtccacctagagtaatgaagtctcagtgttcacaggggaaaaggggaaagatggatcagaagacttgggtggcttctctccagttcataagtatttctaaaactgggggccaaggatccttcctggataggcttcaagggtattgagtggaacttgggctcataaagctcatctaatttttaaagggcccatggcttcccagtggttgagaaatgatggcctagtgatgtcattgggaggctgttattttcaccttctgactcttctagcttgggctcacttaggtgtgtaacatttgattgtagtcctttcaaggcctgacacattagtggtcacctgataaatgtggcaggggcaagttagttattgatggattttttttttacatgatttgtgcaaaggcccttggagagaatgaagttagcagtattatctcatcttggagaaagcagcataatatatccagaatcatactaccagtaggatgtggatattgtattctaatagccagagtgaatccaaattatctgatttagagattccaaaggatttcataagtcatatgcaatataccacaagcatcctggtaacttataaccttattactaagattattatcttgaaaaaatttctaggccgggcaccgaggctcatgccagcattttgggagggacaggaggattgcttgagctgaggagttcaaggccagccttgcaacgtagcaagatcccatctctgtttaaacagataagagtttttttaatgtcttaaagggcctcctggcagggcacagtggctcactcctgtcaccccagcactttgggaggccaaggtgggtgaatcatgagatcaggagttcgagactggcctggccgccaacatggtgaaagcccatctctactaaaaatacaaaaattagctgggtgtggtggcagatgcctgtaatcccagcggttccagaggctgaggcaggagaatcgtttgaacccaggaggtggaggttgcagtgagccaagattgtgccactgcactccagtgtgggtgacagggcaagactccatctcaaaaaaaaaaaaaaaaaaaaaaaagggcctcctgttggtcaggtcacatcacgagtcaaaagaaagtcccagacttctgcttcttcctggaagtattcccttcctctcacctatcatgcacagcctggacagtattgatttcagtggtccctaacatccagcactcccaggtcccctctgtctccctcatacatgacatagttcattgccttttttgagcccgtcttctattcctcccatctctgaagcctagggcccactttcagtcatcaggagtccccctttaccttcctgctgtgggtctcccctgtgcacattgcctcccttctaagggtgactgctttccttccactttcttttctttctttctttgtgcagtggtacgattttggctcactgctacctctgccttctgggctcaagtgatcttcctgcctcagcctcccgagtatctgggactacaggtacacgccaccatgcctggctagtttttgtttttgtgtttgttgttttatttttttgagacagagtcttgctctgtcgcccaggctggagtgcagtggcatgatctcagctcactgcaacctccacctcctgggttcaagtgattctcatgcctcagcctcccaagtagcttgaactacaggtgtgcaccaccacgcccagcaaatttttgtatttttagtagagatgggctttcactgtgttggccaggctggtcttgaactcctggcctcaagcgatctgcccaccttgacctcctaaagtgttgggatcataggcgtgagccaccgtgcccattccttttttcctgaacattttccaagtgaggttgttggaaatcacggatggggaactatgcatgcggagggctgactgtaattgatttctttctgcctcctcactaatctgcacactgcaggcagggacctggtctcatcatgcctgcacctccaagcactgccctcttacactgtagtctccccattggtcagcatggttccatgaaggaactccattatcacagcaaggactgacctcacactggtggctccaagtcactgcccaaacattctgaagggagtagaacttcttgattcctcagataaatagaggacagatgctggactgtagctaagtatttcctttcatctacgggataaaatactgataatttgagagtgatggacaaggttcagagtggtttcctcattttgtttttgtttttaatggaatgccaacttcatttatgcttgccgtatgcagatggactccatcccactggaaacataacaggcttaccaggtagcttcaaccactggttttatgtgactcagggagaattgaaaagctgtttcaggggagataaaaagaaggtaattacatttcaccgcaaaaagttttcttttcaaggcagtaaacggtcacaaccacccagaaacatcaccaaagagcccaaagtgttctttcataaaacccagttgcctgggattcaaggggctgcctcgagatccacgggtgagtcattgaattcctcattcagtggagtgagaatcgtagcctggagtcctcttatctgccatgtgaatgtgtactgtgtgcttgctggtagaaaggtccataaaatagagtataattagataaacatttgcttggaaattagatcttatgctcttcactctctgttaactgctttctctttagggattgccactttcttctctttttcatttcactttaataagcgcacacaaaaaccttgatcccatccagattacacaggtatgcctgtctgacttgaatttggtgcacatttggcagtagagcatgcaagtctagacacagaaggtttgtgagtgtacagaattcttttttttcttttttttttttttgagacagagtcttgctctgtcgcccaggctggagtgcagtggcgcgatctcggctcactgcaagctccacctcctgggttcacaccattctcctgcctcagcctcccaagtagctgggactacaggcacccgccaccacgccaagctaattttttgtatttttagtagagacagggtttcactgtgttag

SEQ ID NO: 7946 - DNA, 6000 bp, Homo sapiens
ggcacctccttccttcccagactgtgctgctggcttcctcactgctgctgctgacagcgcgtgcgaggagccccctgcacccactggcctcgctgactacagtggtgccgggagagattttcttcggggagctgggtcagctgaggacgtatttccagacagctatgtatccacttggcacgacgaggatggcgctgtccccgaaggctgtcccactgagacccctgtccagcccgactgcatactgtctggatcccgcccgcctggtgtgaagaccccagggccgcccgttgcactcttcccctttcacttgggtgcccctgggccacccgcaccacccccttcagcaccatcggggccagcccctgcgcccccacccgccttctaccccacactccagcccgaggcagcccccagtactcagctgggggaggtcccggctccctctgctgctcccaccacggccccctcaggcacccctgctcgcaccccaggtgctgagccacctacgtatgagtgcagccactgtcgcaagacgttcagctcccggaaaaactacaccaagcacatgttcatccactcgggtgagccagggcgggggaggagagggagcaatctctcatcggagagttaaacctgagggggaattgagcactagttacagggcactggcactgttctgttacttttggttagcagggggcctagaaattgagccttcccccaagtgcaaggtatgtgggggaggggaaagccccactctgtggagcagcaggcactggcttctgtggagggggatcctgaggctgggtagggaagcaggagcctgtcctggcctttggaagggtggtggtggaaacttgagcagcctgggatgcacatgatgggtatggagccttggcaggaggtcctggcaggttgggaaactatgctccagggagcctcctgtgtctctctggtttccagctgtcccgttataggctggcagcaagggaggatgggtttacaggcccaggggtagaaagccctcagaggtggtgggatgaaggccccaggaactcctgagactggggcatgagtaggaaaacataggtagtgtggggactccacagctgcagaggaccccgaaaagctgtggggaggttccctcggaccttggccgtgtcagggaggcggctctgcagtgctgcaggagaggtaaagagtgggagggtggtactggggaatgtggtgaggatgctccctgggggctctgagatggaggacaaaggaatggaaagcagaagcctgctgagcattgtcagaaaaagcaaaaatttggctggaaggccacagtgatagtgagggggtttctgcaggggctggaacttgggatttgactgtgagtggtggggaagccatggtgttctaagctggggagtgactgagatgtcagtttaaaatcacctctggctgccctgggagaagccaggggcctgggaataagggagttgggtgattagtctccagggaactgccagaggccccagggtagtgctggctgtgtgaagtgtgtgatctgagccaggtgcctgggccaggttattctggggtaccctctggcaggcactgcctttcagtccactgccactgagatagggtttttttttttttaattttttttgagaccgagtctccctctgttgcccaggctggagtgcagtggtgtgatctcggctcactgcaacctctgcctcctgggttcaagtgattcttgtgcctcagtctcccaagtagctgggattacaggcgtgcaccaccacacccggctattttttgtatttttagtagagatggggtttcaccacgttggtctcgaactcctggcctcaagcgatctgcctgccttggcctcccaaagtgctgggattacaggtgtgagccaccacgcctggctgagacaggcattttgttaacatctgatgaatctaggggtggactcagactgcctcccctcccctaacccagaatgaggagctctctctatcacaccaaggacattatagtggccagcgggcaggggttctgggcaactggggcttcctgcaggaaggtggcagatgtgcccaggtccctccttatgaaagggcactggccttgtcagactgagtttaggggactctatgggcataggcgaggggggccaggacccagtgtctccctgtgccgggtgggtaggggttgagggggagggtacctgagggtagagggagatcccagtgggcagtccagatggccaacagatgttccagacaggctgggttccttgcagacagggtgcttgctggatttaggggtgccctgtcacagtgatatcccaggataacagaaagggggtccctgccaggaagggatgggagaggggtacctcacagtgtatgaggatccctgttgggcaggaaagtcccaacgtgaagggaggtcctggagaggagggggtgtccctgctgggcaggaagatcccatagtgaggggagggttctctgataggcaagggatcccggggtggtggttcgggaggggaggggagcccctgctaggtccaggagcccaggtgggggtggggtggggtgggggcggggagctgtagagtctgacttgcgttcgcggcccgccctgtcttccgcaggggagaagccgcaccagtgcgccgtgtgctggcgatccttctctctacgcgactacctgctcaaacacatggtcacgcacaccggcgtgcgcgccttccagtgcgccgtctgcgccaagcgcttcacgcagaagagctcgctcaacgtgcacatgcgcactcaccggcccgagcgcgcgccctgccccgcctgcggcaaggtcttctcgcaccgcgcgctgctggagcgccacctggcggcgcaccctgcgccctgatggcgctggggcctggcctcgcccacggtggatccggggcctcccgcacagtcggccacgcccgctgcgggacccgtggttcccgccactagaccacgctccctcctgagcgcaggtcctctctctcccttcaccctttctccataccagggcctaagtccgccttactcctctcctccatgtacttgaaccctccaggtggtgccgggctggggctggggctggttagaccacttctgagaactggactatttcctgcgtaaaccgggcgctcaggcgcttggacccggcccaagatttgactccggttctcaccccgccctctcctggggtggtggtgggggctggggggccgcttgcctgccccagggtcaggctgggcaaggtccctagctctctacccaagctgttactccctcatggggcgcctaaggagactcaagtggacccatcatatatgggggctgggcctcgggactctcgctctaataaaggactgtaggccatggggcctaaaccacgaagctgtgagcacctggatcagtgcgtgccttgccctcatagacaagatgtgagtgtcagggttcagcgtccctgttcttgggtggcatccatgcggcccacaggctgtcctgggcaggaacaggatggtccactttgccatctaggacctctattctgtaggggctaaggtgggctgcatatataaccagcacttggttctcttggatccctcagtcctgtggggagtaggataggcaggccacatctgaggtgggtctccgagagggaggccacgtgaaagccccatcatactcctggttgctgctgtccacgacctttaaggcccctcccatagatcttccagtcaggctctaagggtcttttggacttaagacttcccctccccgaccttgatggacatggctgagcaccttacttgtggggagcccagggggatctttggggccaggttgcactgagggtatataagcccccatatatctgcccttggtgctgggggcaaagttcagggagggctccgatggccgtgttgggggcaggaaacagtgaggggtgggatcctggggctgactgctgggcggttggggacaccacccctactggccagccagtgtcccaggcccctgcatccagcggagagagcagccactctttgcccctctcctcttcagcacaatagtggctcctagcctaggtgccctgccataaggatttggagctggtggagtggggtatggccccaggccataccccagcctgacctgccaggctcctaggccaatggcagctcctctgggttcaccttctgagactgcttcctcaaggtgagaggccagggctttcatgatccaactgtgtgcatcatgggctgacttcagtctcctgaaccccaggactccatcgtcgtcaaagccagaggtggagcagagagtcagagcaagcacatgggtggggggcagagctgggtttgaatccaggcgatgccagtgttcctgtatttactgagcacttgctgtatgcctggcaggagggtacgattcctcggatcatgggacaaggggcttagcctggctgagcccctctcctcagggtttcagtgggtgtcacaggaggacctcccaatgaggtccaccttgctgtcctgttgcttttctgtttggcctgattggagtgttcccaagggcagggatttctgtgctctgagtgtctggtacccagcagggatgggaggggaggcaagggagttagatgccagccctggagggtggatggggcaagcaggacagcaggaaggaggctagtggtgcccaaggggcagagacctgggaacccagaggccagtgatggaaagggttagcgccaggcagagaggggctggacccacacacaagaccaggcagagcaaacaaacgtagaggagaagggctgggggcaaagtcctggggagaggaccagccactgtcagcagtgccagggccaccacccctggggaggagccattgggctactcttgaggggccagaggtgagcctgaacactccacagctgctgctcctagggaggagctggtaccatgggtgtcaggcaacagttggccttgctgctgctgctgctgctcctgctctggggcctggggcagccagtgtggccagtcgctgtggccttgaccctgcgctggctcctgggggatcccacatgttgcgtgctacttgggctggccatgttagcacggccctggctcggcccctgggtgccccatgggctgagcctggcagctgcggccctggcactaaccctcctgccagcacggctgcccccaggactacgctggctgccggctgatgtgatcttcttggccaagatcctccacctgggcctgaagatcaggggatgcttgagccggcagccgcctgacacctttgtagatgccttcgagcggcgagcacgagcgcagcctggcagggcactcttggtgtggacggggcctggggccggctcagtcacctttggtgagctggatgcccgggcctgccaggcggcatgggccctgaaggctgagctgggtgaccctgcgagcctgtgtgccggggagcctactgccctccttgtgctggcttcccaggccgttccagccctgtgtatgtggctggggctggccaagctgggctgcccaacagcctggatcaacccgcatggccgggggatgcccctggcgcactctgtgctgagctctggggcccgggtgctggtggtggacccaggtgagggccttggagccagtggagaatggaagggggcaagggcagggactataggacaggggttctgctgggactggcagaggcccttggtccccacctgcctactttcacaggcaattataatcaagacttatgagcagaaagtagttctcaggtcatcagagtttaattttcccacaatttgaccaaaaatactaatgatgggattctttaccaaacaacatggatgcttttctctactagctgctcctctgcctgcatctgtgggtctcagatcccgcctcgcaac

SEQ ID NO: 7947 - DNA, 6000 bp, Homo sapiens
tggggtgagcctggagatgcccccgggagcaccaaggcgtcagagcagctgaccagggccccaggcctcgccgcttccccaggcagagccggccccaagccccgcctctcccctgggcggagccagccccaagcccccctcccctgggcggagacagccccaggccccgcctctcccctgggcggagccagccccaagccccccctcccctgggaggagacagccccaggcaccgcctctctcctgggcggagccagccccaagcccccccctcccctgggcggagacagccccaggcaccgcctctcccctgggcggagccagccccaagccccccctcccctgggaggagacagccccaggcaccgcctctcccctgggcggagccagccccaagccccccctcccctgggaggagacagccccaggcaccgcctctctcctgggcggagccagccccaagcccccccctcccctgggcggagacagccccaggcaccgcctctcccctgggcggagccagccccaagccccccctcccctgggaggagacagccccaggcaccgcctctcccctgggcggagccagccccaagccccgcctctcctctgggcggagccagccccaagcccccctcccctgggcggagccagccccaggccccgcctctccctgggcggagccagccccaagccccccctcccctgggcggagccagccccaagccggctctcaccatagtgtgcctcctgccccatggacccccatccccccagacccctcctgattagctcaggtggggctgccgtggagaccacaccagcatcatcgcctgaggctccatgtccaatttccccggggctgctggagactgagcactgccccagcccctcaccaggcggtcactgaccccagggaggcctgtcagctctgcccaggctcagcgacgtggtcagctcggccagcctgcggggagggactcgactcggacaagggttccttcagggacctgtgccaggtgggccacgaagatccttccttcctcctttttttttttttttttttttttttttgagacagtcttgctctgtcgcccaggctggagtgcaatggtgcgatctcggctcactgcaagctccgcctctccgggttcacgccattctcctgcctcagcctcctgagtagctggaactacaggcgcccgccaccacgcccggctaatttttttcgtatttttagtagagacggggtttcaccgtgttagccaggatggtctcgatctcctgacctcgtgatccgcccgcctcggcctcccaaagtgctcggattacaggcgcccgccaccacgcctggctaatcttttttgtatttttagtagagacggggtttcaccgtgttagccaggatggtctccatctcctgacctcgtgatccacccgcctgggcctcccaaagtgctgggattacaggcgtgagccaccgcgcccggtcgatccttcctccttaaacctgatgcgggagccaggcccacccccatcgtgggcttcatggctacaactccacacgtacacacgcacacacgcatgcacgcacacagacgcatgcacacacacacatgcatgcacatggctacttattgaaccccctcctgcagcctccatcaatctcattcctcccccactctccttgcgaccctcaggtctggggtccttggactgggttcaagccttgtccaacaaggaggccctgccgtgatgggggtcctcactccaaagaaaaagccatgaggaccccagaactgaccagtgggtgggagacaggagagctggcccagctgggtcaagaagggtctgtcagggcctggggcgtgctccgctcctggacaacggcgccctcacagccccttcccctcagggcaacacagtcatctggaacgctccctcggcagctgtggacagggaggccaggatgtggggtctggggctggtgggatggctgggaccctccatgggaaggggggcttcctggctgggaccctccatgggaagggggcttcctgacggaggccgccgaggacaatgccgggaaggggattgatgttgggggcggggtcgagtctcccaaggacaaaaaggaggtccccgttgccggcggaagatacggtgtaggccttcctgtgggactaggactcagacccaggggtctcagggtcctccccggccctcaggctgctggcccacctcggtctctccatccctctgcctctgcctctctgtgtctctgtctctgtctccctgtgtctctctgccttctctcttcctcgctctgtctctgtctctctgtgtctctatctccctgtgtctctctgccttgtctctcttccttgatctgtctctccctctctgtgtctctgtctccctatgtctctcttcctcactctgtctctgtctctctgtgtctctgtctctctctctctgtctctgtgtctccctcacccccgccttccccacctctggccgttgaaacctgcgggtccctctgcctctgggaaccctccctcctccttcctgtgtccatcccacctgccctgtcctcagggggaccccagctttgttgtctccccgcccccacaagcctgtggatgtgagggctcggcacacggggactgtgagcagcgtgatcaccacgcgtgacccagcgggcgggcgggggacagggccctggagagctgggacacaccctgcaaggggcctcagccctcctggcgcccagtggtccctccccacctgcaggaagtagggtcgggggctgggaaacagcccattcaccaggcctgctgccccccgcccgggttaagggcccagcttcccgggaagggcctgcacctccggcctggggagggcccctcctcggagtctgctttccggtgaggcctttcccggcaccagcctgggcaggagggggatgggacccagggagacagggctgtgagctcacacacctgggccctcacctctgaggggactgtttccccaccccgggcctcagtttccctcctctaggcctcagtttctctcctttgcacccagcccctcctctaggcctcagtttccctcctcagcacccagcccctcccccgagcctcattttgcctcctctgcacccagcccctcccctaggcctcagtttccctcctttgcacccaggccctgccctggatctcagtttccctcctctggtcccagccccacccctgggcctcagtttccctcctctgatcccagcccctcctctgggcctcagtttccctcctctggtcccagccccgcccctgggcctcagtttccctcctctgatcccagcccctcctctgggcctcagttttcctcctctggtcccagccccgcccctgggcctcagtttccctcctctggtcccagccctgcccctgggcctcagtttccctcctctgacaggtaagccgattggcaatgcttggaaccccatggactggctgctgctttttattccatggccagggaaactgaggcacagacagaccctgaggtcagcaggaatgctccatcattttattcccgcgtgcctgcggtgcatggggtccagggtcacaggaccggcccctgggtggaggggagccagccatcacgactgccaccacaggccctcattgagctaggagcagagcaccctgggaaccacagcggaggagggtggggggcgagggggtgagggggtgggcagaacctgggtaaggtgaggagcagcccgggcagagtcccagaggccctgggagggtcccggtgatgcaggggggtaaacaagccaccagcggagacagaaccagtgtgcggggcttggaggaacaggtgggtggattccagtgcgtttggaagatgaggttcccaggactcgctgatggcagctgtgagtgggagtccagccagcatcccttccagatccctcttgtggaccgagatccaggtctcagtgtagaccaaggaacagaggcagcccctactcgggctcccaggctccagccaggcctgctaggtgggcggcctctgcccgtgtgatggaaggaagccaggctcagagatggggtgacttgtcccacgtcctggagggtctcacagctccaccacggccaggagacttcagtccagggggcctccatccccagcgaccttcacctgacccccaggggaccccagccaacaagacccggcctgcagctccggaacgggggagggctgctctccaccgcccctgtgcggccgcccgggaaagtgcaggcgggccgggcgcggtggctcacgcctgtgatctcagcactttgggaggccgaggtgggcggatcacctgaggtcgggagttcgaggccagcctgcccaacatggagaaaccctgtctctactaaagatacaaaattagccaggcgtggtgacgcatgcctgtaatcccagctactggagtggctgaggcaggagaatcgcttgagcccgggagacagaggttgcggtgagctgagatcgcaccattgcactccagcctgggcaacaagagcgaaactcagaaaaaaaagaaaagaaagtgcaggggacccgccgtcggggtgggggcggcgctgcccagcctctgtcccacttccatgcacttgacctcgaccctccggcctccgtctgcgatcttcccgtgcctgaatatgaggcttggaacagacccagaccttcctgcctgcccgtcctgagtggccccgggaccccgccccatctttggcccccagcccctgcctctctgccgcctccagggtcgggggtcaggccaggaaagccccttgggaagcccccggggagcagctggagcggggtcgccgggcggcgggaaggagtgggcgcctctatttaagcggcttccccgcggcctcgggacagaggggactgagcatggatttcggactggccctcctgctggcggggcttctggggctcctcctcggtgagaaggggagggggcgcgggagagaggagtgagttaggagggggctcaggagagaggagggggctcaggagaggggagggggctcaggagagaggagagggcccgggagagaggagggggcccaggagaggggagggggctcagtagagtgggggggctcaggagagaggagggacgcaggagagaggaggggcgcaggagagaggagggggctcaggagagtggagggggctcaggagagaggaggggcgcaggagagaggagggggcgcgggagagaggagggggcgcggaggggagggggcgcaggagagaggagggggcgcaggagagtggagggggcgcgggagagaggagggggcgcgggagaggggagggggctcgggggagaggaaggggcgcggtgagcggggaggggacgcgggagagaggagggagttaggagggggctcaggagaggggagggggctcagtagagtgggggggctcaggagagaggagggacgcaggagagaggaggggcgcaggggagaggagggggcgcaggagagtggagggggctcaggagagagaaggggctcaggagagagaaggggcgcaggagagaggaggggcgcggaggggagggggcgcaggagagagcagggggcgcagtaaagtgaagaggactcaggagagaggagggggcgcgggagaggggagggggtttggaagagaaggggggctcgggagaggggagggggctcgggagaggggagggggttcggaagagaaggggggcccgggagaggggagggggcccgggggagaggaaggggcgcggtgagcggggaggggacgcgggagagaggagggagttaagagggggcgcaggagagaggaggggctcggagggggcgcgggagagacgaggggtgctcagagttaaggggctccgagatagggggtgattggtgatcctgccagaggagggggctcgga

SEQ ID NO: 7948 - DNA, 6000 bp, Homo sapiens
ctgggctgctggtttcagccgactgtggagatcgaaggcacagttcctgaaacattaacagcagtgggagtggacaggatcgcagtctaggcccatcccatctgggtcccaaagtggttggattctatttctttttttttttttttgagacgaagtatcactcttgtcccccaggctagagtgcagtggcgcgatctccggtcactgcaacgtccgcctcccgagttcaagcgattctcctgcctcagcctcctgaatagctgggatgacaggggcacaccaccacgccccgctaattttgtatttttagtagagacagggtttcttcatgttggtcaggctgctcaaactcccaacctcaggtgatccgcctgcctcggcctcccaaagtgctgggattacaggcgtgagtcactgcgcccggccgatcttctttcaatatactttccagtttcttgggcaaactaagcttttttgtttggagaataacgtgggacctctgggaggggaggctccgggaggagaggcacagccagggcttcctctttagaatgtggtgtccttattactgcccgttttgcctcctcgtctgcctttgtttcctttggcctccagtgttcctgccttttgtgcaccctgcaacgcagaacagctacgtctttggggcccacacggcatcctggagctgtaaaatttctttttttttttttttttttcatatggagtttctctcttgttgcccaggctggagtgcaatggcacgatctcggctcaccgcaacctccgcctcccaggttcaagcgattctcctgcctcagcctccctagtagctgggattataggcacctgccaccgcgcccggctaattctgtatttttagtagagatggggtttctccatgttggtcaggctggtctccaactcctgacctcaggtgatccgcctgccttagcctcccaaagtgctgggattacaggcctgagccaccacgcccggcctaggagctgtaaaatttcttctttgtattttatttctttgcccccagcagttaaaagttctctttcttggctgggcgtggtggctcatgcctgtaatcccatcactttgggaggtggaggcaggcggatcacttgaggtcaggagttcaagaccagcctggccaacaaggtgaaaccccgtctctactaaaagtacaaaaattagccaggcgtggtggcgcgtgcctgtagtcccagctactcaggaggctgaggcaggacaatcgcttgaacctggcaggtggaggttgcagtgagccgagatcgcaccactgcactccagcctgggcaaaagagtgagactccatctcaaaaaagaaaaaaaaagttcctctatgggatggtctttccaattttcttttttctttctttcttttttttttgagacggagtctcgctctgtcgcccaggctggagcgcagtggtgcgatctcggctcactgcaagctccgcctcctgggttgaggccattctcctgcctcaggctcccgagtagctgggactacaggcgcccccaccacgcccggctaatttttttgtattttagtagagatggggtttcaccgtgttagccaggatggtctggatctcctgacctcatgatccgcccacctcagcctcccaaagtgctgggattacaggcgtgagccggcagctgcatattttcttatctgtttattaagtctgtttaagaattccacgggcctggccaggcgcggtggctcacgcctgtaatcccagcactttgggaggccgacgtgggcagatcacaaggtcaggagatcgagaccatcttggccaacatggtgaaaccctgtctccactaaaatacaaaaaattagccaggcgtggtggcgggcgcctgtaatcccagctacttgggaggctgaggcaggagaatcgcttgaacccgggaggcggaggttggagtgagctgagatcgcgccactgaactccagcctgggcgacagagcgagactctgtctccaaaaaaaaccccatgggcccttcatgtttcctctgttgtacgttaaatgctcgggaagtattttgggtttgcagatctgattcccgaatccttgtaattatcccatctccgagatcgctcatgttttttaggtcacattgtcatcccacccaggatcttgggccaggaatttacgctccgctgaaaggacgttctgaccggggggtgttcacgctcccagactaacacagcggcctgtgaatcatggttctctctctcctgagacgagagtactgagggtagacattaattcagcccaagcgtacagctgtggccccagaaattggtcaatttgatccgcgaatccaaaagggtcatctaacagtggtttgagttcttttagatttctaacctctgaactggttaaagggggcatttacgaagtcaatatcccttcctcccggtggtccttccctaaaggggaaaagggctgaggcaggtctttttgagcaggaggcaaaaggaaagttctgtgggtttttgtttgtttgtttgttttttgagacggagtctcgctcttgttgccgaggctggagtgcggtggcgcgatctcggctcactgcaagctccacctcccgggttcaagacattccctgcctcagcctcccgagtagctgagtagctggaattacaggcgcccgccaccacgtccggctaattttcgtatttttagtagaggcgaggtttcatcatcgtggccaggctgccagtcctgaactcctggcctcgtgatccacccgcctctgcctcccaaagtgctggaattacaggcgtgagccaccgcgcccggccgaaagtttcgaatatccctttggcattgttctgtttcccgttggagctttcctgaggaaggggcatgttctagtggctgtccagcggggatgtgggtggcaaggtccaggtggttctataggggagggatggaggggcggaggagcgggtgggggaggggcggaggggcgaggggtgggtgggaggggcggaggggcgggttggggaggggcggaggggtggggtgggtgggtggggggggcggaggggtgggttgggaggggcggagggggtgggttgggaggggcggagggggtgggttgggaggggcggagggggtgggttgggaggggcggagggggtgggttgggaggggcggaggggtgagtgggggaaggtggtctagaggatcccacccttctttagatatggggcgtctctgctaaaaatacaaaaattagccgggcgtggtggtgcgcgcctgtaatcccagctactcaggaggctgaggcaggagaatcgcttgaacccgggaggcggaggttgcagagagtcgagatcgcgccgctgcactccagcctgggtgacacagcgagactccaacacacacacacacaaaagatatggcgcgtctcattcattcacaagttcctcttcaaaggtttggctcgttcagcgccctcgttcttcgtttcctacttccaaggccaacctgacttcctcaccctctgggcctccccgtctgagtctcagtaaacaagtttcccgccggtcctgatctgcagagatggcacctgccacccactctgcacatccccctcccgtcgccacgggctcttcccgccagtgtagccacattcctgcccctttccagttagcccttcgcgttcggcttagtctgcggtcctcttgcattgcgactccgagtttaacttccaacacacactttcaacctccaagagacgcccccacctgtgtcgccccaatagcgacttttctcaccgtggtcgccgcggaacttcaagggtccttcctacccgcgttgctgagagtctgggtttacgcgtcacctcgggcgggacccgatcctccgctcctgaggcccccacaatgaagcagtcggacgcgtctccccaagaaaggtaaccgccagcctctcctgaaacagaatgggatccaaatgggatatttgggggcggcgagtcggtcccgcaaagagaaaccagcacttagaaaatttctcagcgagaccactttacttgtacggaagggggctgcctgcgtgggatgcaatctccagagcacacgggacaaaggaagggagcttctgttcctctgtcctttccctgttggctggggttggacgcccacaatctaagctgatcccggttggctaaaacttaaaacttttttaaaatagggtaaacgcgccacctgcgaggaaagaagaagggggtaaggttgattgacaactttagacctggaagttgagtttctgaagaggaacttacttgtcccaaccaaatggtgcacaggacgtttatactaagaaattattcattttctgagatccagattcaagtgccctttaagtatttttatttgggcggaggaggtcacttcctcccacctaatttattaatacgttcatatatatatatatatatgtacatttttaaaggcagagatgtgcgtctcgccatgttgccgcgtctggtctcgagctcccgggctcaagcgatcttcccgcctcgacctcccaaggctctgggagtacagacgtgagccacagcggccggcccgtgtttaactcagataaaatctgggtaacacactttcaacgcttcaaccccctcgggcgcaccgctctgcgctcattgcaactttgaaagcaggaaggaagaaatgcgcaggctccagccgcgtccccgcaggccccactcccgtttcctagcaacgccgggtcacgtgcgccgccgcccggattccgtagcgtgagcctgccggagccggcgcgtacatgcgagcgtgtgcgcgcgtgcgcaggcggggcgaccggcgtccccggcgctcgccccgcccccgagatgacgccgtgcgtgcgcgcgcccggtccgcgcctccgccgctttttatagcggccgcgggcggcggcggcagcggttggaggttgtaggaccggcgaggaataggaatcatggcggctgcgctgttcgtgctgctgggattcgcgctgctgggcacccacggagcctccggggctggtgaggagcgggtagggggcgggggtgcggtcctgcaggggccgggaatggaggccgcggtgccgacccgaagccgacgggagcctggggcctcggcgcggggcggcctggggtgcgaaaggccggccccgggggcttcccgcgccagcatggagcttgggggtgaagtcccagggtttgaggggggactagaggttcctcccggcgcggcctgccgggctcccccgggcgctccggcctcgagcccggcctctgtgtgtgggcgtgaagctccctgcttggaggcgggagccagggggtcctggccaggccggtcttggtcaggggaggtgggcgtcttgcttttcggtcacctggggttgggggtgacctgcttcctgggtgagggcgtctgcgaaggcggttggaggtggcccgcccgccggtcccatcggccaggagaagggagacccaaagcctgggtgagcgtcccctttggcctggagccaggggtcaggggctggttggtgcctgcccaacccgtcctgctggggctggactccgcaggacctggggaaagcggcctgggcgtggaatctggagacgggtccaccctgcctgcgagtgttagggtcagagaccctcccctgagactctctggggcccccgcaagggcccgtgcggcctggagcgatcatcttggcgctcccttctggaaaaggggcttttgtcctccaagagcacatggaggctctgagtgggtcagccctccggatcgggaagggattaccgttcttcacgggatttagccctggcgtcttgcctagggcgtgcacctgcccccgggtgttctcccagactcttaagacctcgcaggctccctcgaggggccctgcgtggaagggaaggcggaatctccctc

SEQ ID NO: 7949 - DNA, 6000 bp, Homo sapiens
cggcagatggggcgcctgggtccgtgcagggtcgtccgcccgagaaagcagcccctcacccctgggcactaacttcatcttttttctttgcacacagaaacgtaaacctgattcacaaaagtataaccactcagcatgtagctttgtacacctgccctcagcatttagtgtcctcgttcatccaacaagcatctaataagcactggggtacgcagtggtgggtgtccgccccgtcactgggtgtccagcgtggggtgcggaggtggatgtccaccccgtcggtgggtgcccggcgcggaggggtgcggaggtggatgtccgccccgtcggtgggtgcccggcgcggaggggtgcggaggtggatgtccgccccgtcggtgggtgcccggcgcggaggggtgcggaggtggatgtccgccccgtcggtgggtgcccagcccgatgtccaccccgtccctgggtgctcttggtggcaactcgctgaagcctgcctcggtttccccagaggtgagatggggaagtcaccaccgccaggtcatgagatgagattagatcatccttgccaagtatcaggaaaaggcctcagggctcccctgggaaccttggggtctcaggagtcccagctcccagtgggcaggggtagggttggggcggccagaggaacaagtgtttgttcatgggctggaccccaccgcggccccaaagctgggctgcctattcctgtcctgggcaaattggcctctcctccctcttaccccccaccccagtgggagcccacaaggacagggcctgccccatcccctccactctgggctgtggctctaagcagcacgtcccactctaggggctcagggcagggacagtgactcatccaaggtcccgccgtggagggcagagctgaaggagtgagaaggagctgctgacatggaactggcccgtgcggaaagactttggtcttccccatatttttcaccaggctcctggggcaaggtgagcccagcagggagaaggaaacttgtgtgaatcccaggccagcaggactgggggccctgctctcatcgcagacgctgcagacacggaggcctggggcaggggccctcagggctgtgctcctgcagagatggagcttgcgtgtgtggctgagactgggatgccaccccctttcctaagcctctgtttcctccgctgtaaatgtgggcccaggcctgccatgcacagctcatctctttaattttcttttttttttttgagacaagggtctcattctgtcacccaggctgtttgtgcagtggtgttgatctcggctcgctgcagcctcgacctcctgggctcaagtgatcctcccacctcagcctcccaagaacctgggaccacagatgacacgcacccctccccctggctcgtttagtatttattgagtcaaactgcagattttccaggcgggctcagtgcctgccctggcctgattttgtcttcctggtcttaaactgcttttcactccaaaggccccaaaattgtataagctttcagggcgtgcgacctggacctgtcctgactaagtgggaaatgtaggtccgaggttggtaaatccggtaaacaatgccgagagaggctgcagggggcggggagatggggaagaccctggggagggaatggcagggcctggggaggttcagcgaggaggggtctgggagttcggggtccagtgacccaggcacacaaaggccagactcgggcggaggagtacaagctgctggagggacccgggctttcttccaaaggcactgggagctgtgagtggttttaggccacagaccgatgtgactgactgaggggccaggccctggggctccatgctccctacacaagccaggtgcggtcccacctcaggaccctcgcacaggctatgccgcctgcccagagcttcctgcagcttcccgggccgcaccccctccttcaggccttctcccagcacctggccccctccccaccctgagtgtttggacaatgctcaccaccttctgctggacagtatcttacttgctactcataaggttgactgtgatacccagctttctcccctggctggctctctgagtcagctgtactggcctctgagtcaatactcggcctggagtaggtgcttaataagtttttgttgattttttttttttttttttttgagacagagtctcgctgtgtcacccaggctggagagcagtggtgccatcctgactcgctgcacctcccaggttcaagcgattctcctgcctcatcctcctgagtagctgagattacaggcatgtgccaccacatccggctaatttttatattttttattagaaacagggttttgctatgttggccacgatggtctcgaactcctgacctcaactgatccgcctgcctcggcctcccaaagtgctgggattacaggcgtgagccaccgcgcccggcttttttttttttttttttctgagacggagtcttgctctatcaccaagcgctggagtgcaatggtgtgatctcagctcactgcaccatctggctcctgagttcaagcgactctcctgcctcagcctcccaagtagctgggattacaggcgcccaccaccacgcctggctaatttttgtatttttagtagagatggggtttcaccatgttggccaggctggtctcaatctttaaatattttttaaattaaaataaatgagcatggctgggggggtggctcacacttgtaattccagcactttgggaggccgaggcgggtgggtcacctgaggtcagcagttggagaccagcctggcccaacatggcgaaaccctgtctctactaaaaatacaataattagccgagcgtggtggcaggcgcctgtaatcccagctactccggaggctgaggcaggagaatcgcttaaacccgggagtcggaggttgcagtgagccgaggtcacgtcactgcactccagcctgggcggcgacagagcgagactccaactcaaaaataaataaatacataaataaacagataaatacagagtactccggcctgggcaaggggtcagagtgagtgtgccgaggccagggagggtccccgtgcacactgacaggcgctggcctgggtaagcctgtgggctgcagagccgtcgccaggatctggtgacaaggaccccgagccacagcctcccttgtgacttgcgggttctgccggcgcctgcaggaggcgtctttctgcttctcccactgccaggcatgggcggttctcgtgccgtgcgggtcccgcctcctccctgctcccagccgcgagccctggggctctggcgacctgcccggcctgacatcttcccagggtgaacataaaagaacccccttcagctggagcacgcatctgcctcggggcgggccacagcctggcactgccaactgtgccgcccgcccggcctctcccgcaccaccttgggacaaacagctgtcctgcccgcctatgcggaggtggccggcggggccggcgtgggggcgcagggatccccagggtgtggggcagccaggccgaggcgagagacacggtcgggctcagcccatccactgtcagccgggcacatgctggccctccctcaagtaccactgagtgcctcctgggtgtaggaagagggccatctctgccccggtggcctcgaggtgcagatgggtggggggcacccggcacacgggacatcgtggctgagaggacgtcaggccaggtgccaggagggtcccaggagggcctcctgcctccaggtggggatgttcagcctccacttcttcgagtgtgactgtctgtctcctctctctcacttgccagcttcctcacctgccccctcccggctgtctggtgggctgggtggctagggacagaggcctcatgtcacctggcaccaagcagcacccacgcccagccggcttcggcccagaagcagagccttgggaagcacctgtctcagagctggggactggaggcactgggggcacagctgcacccggagtccgaggggtcggggaaaggaggcaaccccggggcagggggctctggtacccgtgcgaaggcgctagtgggctttgggtctccctgtgaccccaatctaaagcccaccagacctagaggagacccccgccgcacggctccccagggcactgtttgaggggtgggtgggaaccccacaccctcgggtggcttttccagttttccttgtctggctgggcttggcctcagtttcctcaaatgcagaccagggagaggagtgcctgagtctcccagaacggcgcccaagccggcctgcccctccccacgcactcaagggtctctgtccagggcccacaggcgacccagcaagggctcctgtgacctttagaaacaccctttcgtcgtggaagtcttcaaacctcacagaaagcaaggaggcgctggccgtggcggcctctcccgtctcccaggcccgcgtccaccctccccgcgccggtgccctccggacagaggtggaagccgcggcgcaggagaggcggctccggccgggcagcggggcccggtgaccttgggcgcgtccttacacgtcgcgggcctcagtttcccctcctggggagaggcccgcgcggggctccgaggcctcgggccgcgtgaccttggggcgcccccgaccccgcggcccgagtttcccggcgccgagcggaggcggcgcgcggggagggggcgcagccgaggcgggtctcccgcccccgcccctcccccgcccctcccccgccgcgaggctccgccccccgcggctccgccccgccccgcccccgcctcccccctccctcgggctccggccggcggcggcggcggcggctccgctccgcactgcccggcgccgcctcgccatggacgcgcgcgggggcggcgggcggcccggggagagcccgggcgcgacccccgcgccggggccgccgccgccgccgccgcccgcgcccccccaacagcagccgccgccgccgccgccgcccgcgccccccccgggccccgggcccgcgcccccccagcacccgccccgggccgaggcgttgcccccggaggcggcggatgagggcggcccgcggggccggctccgcagccgcgacagctcgtgcggccgccccggcaccccgggcgcggcgagcacggccaagggcagcccgaacggcgagtgcgggcgcggcgagccgcagtgcagccccgcggggcccgagggcccggcgcgggggcccaaggtgtcgttctcgtgccgcggggcggcctcggggcccgcgccggggccggggccggcggaggaggcgggcagcgaggaggcgggcccggcgggggagccgcgcggcagccaggccagcttcatgcagcgccagttcggcgcgctcctgcagccgggcgtcaacaagttctcgctgcggatgttcggcagccagaaggccgtggagcgcgagcaggagcgcgtcaagtcggcgggggcctggatcatccacccgtacagcgacttcaggtaccgcctccgggagggccggtcggcgcgagggggcccggggagccgggcgcgcggggagccgtccttggagcgcctggggagggcggggcggcgcgccgggccggtgacctcggggctcctcggtgacctcgggcgtgtccgggacccgccccggagtgaccccggcgcgcgaggctccgcctctgggggggctccccgggtgaccgcggagcgcccccctcccacgcaccccgacatcctccgccctgcggcgcggcgggtggggtgggccgcagggccagggtctgagcgcagaggggcagagaggacgaatagaggggaacgtgggccccagagaggcggcggagcgggagggaggaggaacgaagggcgcccgggaaggacgcgccccagggaggccgggggagagggggttaagcggctcccacggcgtccacccgcgccccgcctgcgaggaggcgcgcccggg

SEQ ID NO: 7950 - DNA, 6000 bp, Homo sapiens
gcgggggcggcggcctgggggggggcggcggcctcgggggggcgggcgcgaagccgcaagatggccgcggccgcctccccgccgtgcccagcccgggcgcccggagcatccccggccgccttacgctcgggggaaactgaggcggggcgcggcaccagggaaaggagccgcctggacgctgtgcggcgcagccgggtggggaggcccgggaatcgcagggggtcggggctggcgccggggtgctcggcggccccaggtcagcaccgcacgcgcgagacctttcccggagcgagaggagcgcacaggcggcagccgctcctgcccttcccggacttccgcccacacgcgacagcgggaaactgaggcccaaagccgggcagggtcccggcgggggctggtgtcctcagcgctcccggtcacaggctgcccgggccctggtactgggggaaggggccgcatatgtaggtcgggaaatgagttcaggctggagggggtggggacaggcgcaggatggtgaccggaggccggggaagatggcaggaggccgaggggaagaggggggctcctgggggaggcggctgcgggagccgagggcggaggttccccacggggcagcaccgcgcccccgagccggccaagggtggggatggcgagccaggggaggcagggacccgacgccagggctgagccgagacgccatcgtcctcgcccgacctcacagggagaaactgaggctggggcggggcctgagcgggggtccctctggaggcagccgggtggggggcgcaaggcccggatctcggtccccacgcccgccggactcctccgcgccctccctccggccgcttagcccacagccggctgcgatccccggcctgtcccccgtccgccccccgcagccccgagcccgccgcgcctacctcagcgccgggacgagcggcccatgggcggcgggctggcggcgggcggctgcgtggcgctcgcggctggctccggcgcccggtggccgcggagcaggcggagaatttatgaatggagagcgcggcgcgggggaggccggcgcgagaggaggggccgcgcacgtgaccgcgttggcggcgcgcccgctccgcgcgcccggtgctgcccggtccccggcccgccgcccccgctgcgctcgccgctgggtctggctggctccgcgccggccaccgcctccccttcccttccggcggggcggggggcggagcctgcgctcccgggcgcccactccgcacgcggagccgccccccgcacccgccgcggcggccgagccccgcccccggcccatcggcacgattcacctcgcccggtcctgaggtcccagggacgcagctgggggtgtcctggaattcacgactctgcagcccgaggtgcgccgcgtgcgcaggagggggtggggtccgggggggcacggactcccctctcacgttgcttggtccgtgggggttctggggcggcacagccagggcccctcggccacaattcccctttaagctgcacagcccagggtctctggacacaggcgccccgcctgcttccccacgcaggtcccctctggcactgtggaggactcgccatgcctctcctgccccctcccctgtgtgacagcgatcacagaccccggcacaaagctgagcagagcccatcggggcccaaacgtgcactcacagaggcctgctcctcgtggggtgacatcagaacgacacccgcagaaacccaaagcccaaagctgcccccgcttctccctcttagaccatcgaacctcatcctgcagatactcaggccacacacctgccaccagcctggcccgagcgccaccccaacccctctgagcccacgcctaacaccccacagcgcctcctctttctcgtcccaaagaaaggctgacaccgctctggcacgtggctggcccagctcagcctccccgcctctgcccttgcaggtgccctgtacccaggcctctgtccatgcagccagagattcaccccggtttccttcaactccttccccagcttcacagtctcggcgcttctgctcttggcttccagcccatgcctgggtcccctcctctgctacgtccctccaaggccctatgccttgcgccttgcctgttcctgtgtgctgtggggccaccactccgatagctgtgaactccaagggcagccccagggaacctggtgccaggcaaatgggaattgcatgggcaaaggttttgaggcaaaaaagtttgcaagtcaatgcctgtgaaggaagcagagaaatcgtcttgttcccagcaggaccatgacatgggcaggcttcagggttttttgtatttcggttttgctttttggagagacagagtctcgcactgtcgcccaggctggagtgcagtggtgtgatcacggctcactgcaacctccacctcccggattcaagcaattttccagcctcagcccggaaggtagttgggactacaggtgcgcgccatcatgcccagctaatttttgttttgtttttttttgtagagatggaatcttgctatgttgtccgggctggtctcgaacttctgggctcaagagatccttctgtctcagtctcctaaattgttgggactacaggtgtgagcccccacaccccgccaggtttctgatttttaataaagactccctctggctgtgtgaagaaaaggtacctgtactaaacggggggaggctggggcctcctaggcaagagatggtagccgcggtggccatgctgggtgcacaggccgggacagggcggaattccagaggaaccccaggtttggggctggagtaatggcgccctcacccgtgggcgaccctggagtggggactggagggaagtggttccacgagtgagactgagtctattaggcctcccagtttcctggagtggcagctggatatgcggtcctgagagccaggaggtgcacaggtcacgactcgaaaagtgaacaggcctcctcctctgcaccccccgagccagggccaggatgaccaggctccaagtgaccgtcacagcgctggcccggtgggaggagccaggcccacgccttcatcctgagtcggaccagcagggccttcttcaggtgcttgggttccaggggacagtggcgcccgccattgcactggcctgaacacgggcagggggcgagggtgcagcctccggatgtagggagccacggatcgtgtcggattcgcccacagcaggaggcattggatctccctggctgcacccttgtaaagccacagccccagggcctcccctgctccctgcacccctggggtccagcccaccgcgccaggctcaaggccctttccagggagcccgagccccaacccccgccatccccgattccgcattttcccggagcctaaggagcggggctgggggcccggccgggtgccgcagacctgcgtgagcgcgggggcggggcggtgacgtcatagccgcgagcgaggctgcgcgggccgctggctgacggcagcggagccccgagccgcccgcgcacgcgctcctgcgtcagaggcgcacgggggcgacggccaggcaggaggtggggggtcggcgagcgcatctccgggcgcggagcgccctctgccggcgtcgaggagcagcgcgccggggtccgggatccccagcgagccctcccgcgtcgcccgcgctgtgcccctcgccgcggtcgccgtttcctagaacagctgcacctgcagccttccaccctgtcccgtcctgcacactttctcggcttttactgtgatttatttttggcttttgccaccacctaccactacgacctgtttgtttttaaattttatttatttttttgtttgagacagagtcttgctcagtcgcccaggctggagtgcagtggcgcgatctcggctcactgcaacctcccccccccccccccgcccgggttcgagctattctcctgcctcagcctcccgagtagctgggattacaggcgcccaccaccatgctcggctaatttttgtatatttagtagagacgaggtttcgccatgttgaccaggctggtttcaaactcctgacctcaggtgatccgcctgcctcgccctccagatcggataaagtgctggaattacaggcgtgagccaccgcgcccggcctgacctgcttattaatgatctcaaatgtctgctaaataacccccggccccagagtgggattctcactctgttgcccaggctaggcagtggcgcaatgatagctcactgcagcctcaatctccttaggcccaagcgatgctcccgcctcagcctccccagtagctgggaccacaggcgtgcatcaccacgcccggctaattttgattatttgtagagacggggtctccctctgttgcccagactggtctccatctcctggggtcaagtgattctcctgccttggcctctcaaggtgctgggattacaggttggagccaccacacctggcccagagccggaaacttgatgttttcttgatgtctatccagggccctgcatccaatgagcgccccaaaaatctttttttttttttttgtacagacgggtcgggggtgggggcgatctacactattgcccaggctggtttccagctcctggcctcaagtgatcctctggcctcagcctcctaaagcgctggtattacagtcgtgagccaccacgcagccgaatcttgaatttcactgaagttcgttttactccacctcccaggacggtttcaccgcccttatctgaccaccccctggttctgccgcagcccgggccggaacaaaactgcaacccccagaatacctcacgacggggcactgcgtcgtcaacgtcgcgtgcgccctgccgggagtcgtagttcgcgcttgcgctctcgccgggactcctcctcccagacgtccctgcgcgtcgtcctcctcgccctccaggccgcccgcgccgcgccggagtccgctgtccgccagctacccgcttcctgccgcccgccgctgccatgctgcccgccgcgctgctccgccgcccgggacttggccgcctcgtccgccacgcccgtgcctatgccgaggccgccgccgccccggctgccgcctctggccccaaccagatgtccttcaccttcgcctctcccacgcaggttcgggcgctgcgggtcgggaccctccgtggccgccgcccccggagtccagggtccccacccccagggcgcgacccccgcttccgggcccccggacccgcgcgccccggaagccgaggctactcagccctggaccctcggccctgcctctgctgcccgagccctgcgctgccctcgtcccgggcacctccccgagataagcgtctcctgggtgccctccccgatctccctggccaaagcctgggtgtcgccggatcgttgcattcccatttcgcggatcagtagaatgaggcgcaactgttgaggaccaaagctgcaacttcggatccctgcgctgggttgtctcagtgcctcacatcagcgccaggtcctgccctgacccattacttagcaggacaggccgagtgcccggtgggcgcggggccggcctgccccgccatcattccccacgctgttgtctgcaggtgttcttcaacggtgccaacgtccggcaggtggacgtgcccacgctgaccggagccttcggcatcctggcggcccacgtgcccacgctgcaggtcctgcggccggggctggtcgtggtgcatgcagaggacggcaccacctccaaatactttggtgagtccggtggagggctgcagggccaggccaggctggggctccacatcccaggtcagtctccgtctcagttgaggctgcgagaaaaaatagttttaggccgggcacggtggctcaagcctgtaatcccagcactttgggaggccgaggcaggtggatcacctgaggtcagaagttcggagaccagcctggccaacatgatgtaaccccgtctcttctaaaaata

SEQ ID NO: 7951 - DNA, 6000 bp, Homo sapiens
gctgggattacaggcgcgagccactgtgcttggcctggatttgggttattgattgattgattgattgatttttgagacggagtctcactctgtcgcccaggctggagtgcagtggcccgatctcggctcactgcaaaccctgcctcccgggttcatgccattctcctgcctcagcctcccgagtagctgggactacaggcgcccaccaccacgcccggctaattttttgtatttttagtagagacggggtttcactctgttagccaggatggtctcgatctcccgacctcgtgatccacccgcctcggcctcccaaagtgctgggattacaggcgtcagccaccgtgcctggccttttttttttgtagttttagtagagacagggtttcaccatgttagccaggatggtcttgatctcctgaccttgtgatctgcctgccttagcctcccaaagtgctgggattacaggtgtgagccaccgtgctcggcctggatttgcattttcaaagcagctttgggagggtgctaagtcacagtggtggggacaggaggaggccaggctgggatggcagggcctggggaggggaccctgttggggcggctgcactcacgatctgggggtcggtggccacgccgctgctgtaggtggtggtgagggtggaggcgcaggcttcgctgtaccagggcacgcggccctgctgggtggtgctgcccacggaaagcgtgtggatgctgttggtgtagccgtcgcagttgcagttgtcgtagtgcaggccgccgttgcccgaggcccagatgaagagcgtgcccagcccgccgcggccctgggaaaccaggaggggcggggagggggcgtcggcctggcctgccacccctgccctcctcgggctgccactcaccttggtcacaccacgccggaaggcctcgcgggtgaggatgccggggccgtccaccgtgcggccgtcgtcctcgggaccccagctggcgctgtaaatgtggatgtgctgcggctgcaggctcagcgactgggcctcgatgacatcggtgatggtaccgtccagcatccgtacgcctgcagagccagggcgggagggccgctgccaccggccctgcccttccccacaccccagcccgccccgcgccactccacaccactccccagccctacctgggccctctctctgctccctggagtgggaccattcgtattggctcagcaccccccaagccctggagtctggggccctagcaccacccagcagtgagagggtgggctcccgagtccttgggcccagctccccgccagagtcacccccttccctctctgtcccggaatggtgccgctgggggaccccgggtacctccgattcgggcgttgaaagcgacccccacaccacagaagccattgttggccatcgcggccacctccccagcacagcgggtcccgtgcctggtgccagggccaagaggggctcctgtcacggcctccatccccctgccgggtactggggcttcccccgtgtgctgtgggagccctgctcaccggttctctttgctgggggtgtagcggggctgggggtccgggtcgtagtcattgaagtcatagctggccagggggtcctgggggcaggtggggatatgagggggccgggaggcgtccctagggtggtgccagcctcggcacctggggcagccctcgcccacagccacccgcggtctcacgtagttggcccagaggtccgggtggtccttctcgatgccatcgtccagcacagagaccacgatgccctggcctgacagcccctgactccaggcctgcaggatgctcaggtctggttgggcctcgctgttctgcagggggaggcggggttgtgaccctgtgagggcctggagttgagggcgccagcggccccgtccccgtctacccaccctggctgcctgctcaccatgtaccactgcttggagaaccaggggtccgtgggcaccacgacagagcgtttcacccgccgctgcagcgtctgctgctggaaccactgcacctgcagagcagagggtgcatcaggcctgtcccctgctcgcccctggggcccctcgtggttcagggagtgaggcagccccgtgccctgggaccctgtgtttgtgggggttgctctccagggtccccatgtgcctggggctctgtctgcagtcggaaggggtcgaggcttttggaccacctgtccttgggcccacagacgcgtcgttgctgccgcgggtgactgcaggtccccgggtccccaccccactctctcccccatccctgttctagatccttctatctctctcctgcatcacttccttattttttttctttttttgagacagagtcttgttctgtcgcccaggctggggtgcagtggcgcaatcttggctcactgcaacctctgcctcctgggttcaagcgattctcctacctcagcctcccaagtagctgggactacaggcgcacaccaccatgcccggctaatttttgtacatttagtagagatggggtttcgccatgttgatcaggctggtctcgaactcctgagcttaagtgatctgcctgccttggcctcccgaagtgccgggattacaggcatgaaccaccacgccaggcctggcttctctcttgcaaaccacatcaggaactggccactgctctccctcccggtgctgtaagcaggcagctgtccagtcctgttcaaggcacttcctggcctccgagggcttcccaggctccatcccaacccctcagcttgacatcccaggcattttctagacagggcccagcccgatgggacccaggcccctttctgagcgcctggacactgcgtcctgagggccactgggtgactgtaagcctcctactttttttttttttttttttgagacggagtctcgctctgtcgcccaggctggagtgcaatggcgcgatctcggctcactgcaagctccgcctcccgggttcacaccattctcctgcctaagcctcctgaatagctgggactacaggcgcctgccaccatgcccggctaatttttttgtattttcagtagagacagggtttcaccgtgttcgctaggatctcgtctcgatttcctgaccttgtgatccgaccgcctccgcctcccaaagtgctgggattacaggcgtgagccaccgcgccgggccaagcctcctactctttggaacccattacggtgtcgtaaaatccccttccctccatcccatgacctagacggtggggaagtcacgccgtctgtccctccttaccagagcccctggggcccagaggagggagggggaggacaagaggtgcccactgtgtaccaggccctggcaggcgccatgatttccgtatctgggtcttcctgcctcctcttgctgtatagacttggggcccgggcgggtctgagccacagaaagcacacagctgttcataacaaccacgagaaccacagaagatggctggtggccccaggaggcagctgagaccccgggcagggggttggcctccaggccaggctcaccttggggtttttcttcaggtgcaggcggtggccccagtgcggggtcagggactgctggaccacgccccggtgccgcaggtgaaagtactgcccgtcagggaagatctggggatgtggggaagcggccgcaccgatgggacccggctcccctgctgaagcccccgagggccggtaacagcccccttctttgtccttccccagcaggtgctctctgggagtcccagaagctgagcttggctgaggcaggggtgggctgggactcttgatatttagaagaccttgtgggctccctcccccttgtcggggtctagggttgttcagtcccctccaagcccccacttcccgtctatcccggtcccacccaccggccccaggttgacgaagccgaatttgcgtgccaggcgctcgacctcccggttaccctgggacacctggacggcccagctgctgacatagatgggggctcggaccggggcccaccccacagcccgggggcggacaagggccagggccaagaccaggcgcagccacagcgcaatcggggcgggccgcatggaggcggggcgggagcggggcctgcgcaaatcccctccctcccgccaaaccgccgagtgggcccaggcgtccgacccgcccccggcgccatagcaacgcagaaggcttcgactcccagggggccttgcggctactcagccaggaggggcgcgaagatctaacagaagcgggagagggacgcacgcctgcccgtcttccgcagacccacaccctcgggagcctcagttttcccatttgtacaacgacaagactaacccagagaagcgggttcactgttgcgataacgcgtcctaccctttgtttgacctctcccactttccaacacacccctccttcgagaatcagcccggcctcctgtccggcctaatcagaatcattcttttgcgtaatcccgcctcctccgataagcctcgccccgttcccgcccctaccattccgccctgcctcctttgtgatcagccccgccctccactggtctcgccaatgaatcgcgtcccgtttctccaatcggctcggatgtttctttagcccctccccccggttccgcccccccacgcctctcctcgccctggctccacccttcagccaataatcccatcctctgacaccgcccttccaatcagctacgtctcgctccggcccggccaatcggtgccctgggccgccgcgccccgccctctcccggcggggtctgggcagcggcggccgtggcggagggctatgcggcgggggagacggggcaggcccctcctcctttgtccgccctgccctcccattggtcctagcggggggccgggggcggacaccggcgcggggccggagcatcgcggctcaggctgcgggaaagcggtgcgcgtgcagcggggtgggtgccctggtccgcgggcgagctcgagcagccaaccccgggcgcgtcggggccatggacggcctgaggcagcgcgtggagcacttcctggagcaaaggaacctggtcaccgaagtgctgggggcgctggaggccaagaccggggtggagaagcggtatctggctgcaggtgagccgtcggcgctagcccgtttcgccgacgggcacaccgaggccatgggcctgggggtcgcagaccggactccttccccggctacggggtccggtccggccggtggagcgcgcgaggtgactgggacctcgaggtccgcccgcagcccttcccttgcccgcgccctgcgaccctgctcccgggccacccctctctagcttccgcccctggccgccccccgacgcctccttccgggcgctgggtgcctgccatgccgaagtccggttcttccagttgcccagtggccccagaggggtcgggatgccagtgtcctgcgcgtttcgccgtcccccttcccccgtggaccccggcctggctgcaacagtagagatcttcccgtttttctgaggggaggctcctggcgggaaggggaacggaccgtcctgggggcctgcccaggacccttctcctttcctcctcctctcctgccctagctcaccttcccccagctcaatggcttagtgccaccgagcgtaaatgtttgttaagacggagttgggttgtctgacggctgtgatgtggggaggctggactggggcccacagagccggagatccaggcaccccgattgtgactccattacagttcttccgtgactttcacccttggtgacgctgcgcgccccttcccctttccaaatctctagcaagagcatgtagtaaacgctccttaaatgcctccctccccacctttaaaacttttttttgagaccgagtcttgctctgctgcccaggctggagtgcagtggtgtgatcttggctcactgcaacctccacctcctgggttcaagcgattctcctgcctcagtctaccaa

SEQ ID NO: 7952 - DNA, 6000 bp, Homo sapiens
ggctcgcgcctgtaatcccagcactttgggagaccgaggagggcggatcacgaggtcaggagatcgagaccatcctggctaacacagagaaaccccgtctctactaaaaatacaaaaaattagccgggcgtggtggcgggcgcctgtagtcccagctactcgggaggctgaggcaggagaatggcgtgaatccgggaggcggagcttgcagtgagcggaaatcgtgccactgcactccagcctgggcaacagagcgagactctgtctcaaaaaaaaaaaagaaagaaaaagaaagtggagagaatggggaagggggtgtctgtgatgagctagaaagttagtctttttttaaaataaggaaaggaatgtaagctgatgctgataacgcttggtattgaggcgtgtctaggcatttaacaaaggcaaaaaggaaaaagaaaaagaagggaaaggaggggtactatgaattaaagaataaatgattgatcagattatttgaagagaaaccccattatatcccacaactagaacccctggcctgaagtggtccacccgcctcggcctcccaaagtgctgggattacaggcgtgagccaccactcccagtcttatttttattttattttgttttgttttgttttatttatttttttagagtctcgctctgtcacacaggctggagtgcagtggcgtgatctcagctcaccgcaacctccacctcccgggttcaagctattctcctgcctcagcctcctgagtagctgggattacaggcgtgcgccaccacatccggctaattcttgtatatttagtagagacggggtttcaccatgttggtcaggctggtctcagactcctgaccttgtgatccacccacctcggcctcccaaagcgctgggattacagctgtgagccaccatgcctggcctattttttttttccttttttttttttagacacagtctccatctgtcacccaggctggtgtgcagtggcgcaatctcagctcactgcaagctccacctcctgggttcacgccattcttctgcctcagcctctcgagtagctgggacttcaggcgcccgccaccacgcctggcttttttatttttagtagagacggggtttcaccatgttagccaggatggtctcgatctcctgacctcgtgatccgcccaccttggcctcccaaagtgctgggattacaggcgtgagccaccgtgccccgcccaggcctatttttttaaagacaggatctccctctgttgcccaggctggagtgcagtaatgctgatcaaagcccactgcagtcttgacctcttgggttcaagtgatcctgccacctcagcctcccaagtagctgggaccacaggcacacaccacacctgggtaatttaaaatttttgtgtagagacaaggtctcactatgttgcccaggctggtctcaaactcctgggctcaagcgatccttccaccttggactctcaaagtgctgggattacaggcgtgagcccccgagcttggtcctggtcatttcttgactgcctgtcacttggggccacccagcccgccagtgtctgacttaggcttctggctgattctctgcggccactaagctcacaattggggaaccgactccatgattttgcaacatttcgatgccggaccctgacgcattactgtgagtcgggagggtcacgttccgtttgttttttgagacggtctggctgtcacccaggctggagtgaagtggcattggtgtgatctcagctcactgcaacctctgcctcctgggctcaagccatccttctgccgcagcctcccggcatgtagctgagactacaggcgccaccattcccagctatgttgtttttttttttttaaagaaagagacaaggtctcgctgtgttgcccagggcaatttcaaaattcctagactcaagcaatccctccgcctcggcctcccaaagtcctgggattacactgggattacaggtgtgagccagcacaccggctgtgggccacattacttttgaaaagttctggataaaggccgggcgcggtggctcatgcctgtaatcccagcactttgggaggccgaggcgggcggatcacgaggtcaacagatcgagaccatcctggcgaacatggtgaaacccccgtctctactaaaaatacaaaaaaatttgcggggcgtggtggtgggcgcctgtagtcccagctactcgggaggctgaggcaggagaatggcgtgaatccgggaggtggagcttgcagggaggtggagcttgcagtgagctgagatcgcgccactgcactccagcctgggcgacagagtgagactccttctcaaaaaaaaaaaaaaaaaaaaaagaaagaaaaagaaaagttctggataaagaacaatgtcaattaaaaaaggggtcccatcagtagaggctgaaatcatgactgaaactagcttaaagcccaaagcaaaacaaaaacccgaaagaaggccaggcatggtggctcgcactatcccagcattttgggaggctgaggcaggtagatcaccagaggtcaggagtttgagaccagcctggccaacatggtgtactaaaaaatacaaaaattagccagctggagcgcagtggcgcaatcatagctcacttcagccttgaccttctggactccagtgatcctcccacctcggcctcctgagtagctgtcccagctgtcccacttactcagtgcccctccggacccagcaattctttttttttttttttttgcagagatggcagcatgtctcaaactcctggcctcaggcaaacctcatgtgtcagcctcccaaagtgctggaattacaggcacgagccaccatgcctggcctagattcatttttttagatgcagagaatctgggctttggatttaatgacttaccaaataaaggctgtcttttttttttttaaaacaaatcagcaaaacaggggctcttggctagtttgcatgaggcatccagggatggagagatgtgtatttaagctaaaaaaagaaaaagtgaaactcacagcagtctgagtttttattcagaaaaggaaaaaagaaagcaactgagagcgaaatagtttcctggaatgctgtttttttttttttttttttttttttttttttttgagatggagtctcactctgtcgcccaggcaacagagtgcaatggtgcgatctcagctcatcgcaaccttcgtctcccgggttcaagtgattctcctgcctcagccttcccagcagctgggattaaaggcccctgccaccatgcctggctaatttttgtatttttagtggagatggggtttcgccatgttggccaggctggtctcgaacccctgacctcaggtgatccacccaccttggcctctcaaagtgctgggagtacaggcatgagccaccgcatccgaccttgaaatgcactttctttgaaacacgtcctcccctttctcaccataaactccctcacactctgcaggtttacctaactgtatgcatctaattatgtgattacctaaaagttccaggaacaggctgggcacggtggctcacgcctgtaatctcagcactttgggaggccgaggcgggcagatcacctgaagtcaggagtttgagaccagcctgaccaacatggagaaaccccatctctattaaaaatacaaaattagccaggtgtggtggcgtgtgcctgtaatcccagctactcgggaggctgaggcaggagaatcacttgaatctgggaggtggaggttgcggtgagctgagatcgtgctgctgcactccagcctcggtgacaagagcgagactgtctcgaaaaaaaagaaaaaagaaagaacgttttagagctaatctggagacaggccaagcacggagacccacctgcaaaatcccagagatttcctcaaggtggtctgcaacccggcccttattaggatgaggccagcctgcgcttttaagccaccaaaattcatgaacacacagagcttataatcagcacctcccctgcacacccaccattcccagttccccttttttagcccctcaccccagcctcaagtttgaaggggtttctggaggcctaaaccagctgcctccctgctgcgaactctgaaaggaagtcaccttcctttcactgcactttttcctccttactggtttgtcaagactctggcatcggagcctgagctggttacagccaggcactgtcaagctgttgggggaggggatgacaaattccctcccgttgagaaccacttggttaaacctgtccaactggaaggagtaacaaattgctcataaaatatgcatgttttggtgaaaccccttctctactaaaagtacaaaaactagccagaaatcgcttgaacccaggaggtggaggttgcagtgagcctagcactgcactccagcctgggtgacagactgaggctacgtctcaaaaaaaaaaaaaaaaatgtgcttgtttggcccaggagaggcaagaggtcttcttcacctacgttactggtgagaaaactcaaacctgagggcggcccacgccggagtgcagtaacaggcagaactggaacctggccccatcccggactcaggggacgggtgtcatataccccctctgcctcatccttcccactctgctaaccttccaaagatcccccgggttccgagttttccctggccgcttgatgggattcgaacctgcaaactcagcgctcgcccagcgcagcggccccgcctctcctcccctcccgccgcccggaggtcatgtgagcgcagtgccggagcggggcggggcgaggcggcggcgcgcagtgcctactagcaattgtagtccttgccccaccttggcctggcgaagatcccgcccctggaactacgctcccgtcgtgctccgcggctccaggcggagacgaggcggggtgaggtgggttgggccgggccggttgctaagacttggcgaagcgctgcgctcgcgcccggatccctcaggtaagcgcgcggccccgaggtctcgggttctccaggctcagacttccccagagggggagtaggggctgacatggggggtctcggcggtgaggggcgccggccgtttgtggggagaaaacggggggcccaggccagcctcgcgcgcgtctcgggcgggccggtgggcgacgcggggaggcggcgcgaatgcgcgtgcgcgcgcgcgcgcggcgctggcctgggggaagcctcaggaccgcgctcccccgggcctagcgcctttctgcgcgtgtgcgcccttatggtcggtgcgggagaccccgtatcctccagctgcttccggtggcccttcctcaggtcatgtcccgcagtcccctgcctctgaaccgcgctctcgcgagtttccgtagccttcgcgtccttcctccccagctctgattcgcctttatgtggagattcccctaggccttggtacatccccagaattgaccatcgttcctcatcgttacctagagtatgagtttttcaggtttttgtatcacaggcccccagttatctcccacacactaccccgaggaccgaggttccccgctgtcttgcagagaaggcctccttgtagggtggccagaaacagaggatcgactccgtggaaacaaggacggctgggtgcagttcctcaccctataaccccagcactttgggaggccaaggcgagtggatcacctgaggtccggagttcgagaccagcctgtctaacatggtgaaactccatctctgccaaaaatacaaaaattagctgggcgtggtgtcacgcgcctgtaaaaccagctactggggaggccaaggcaggagaatcgcttggacttgggaggtggaggttgcagtgagccaagatggcaccattgtactccaggctgagcaagctagcaagactcactctccaaaaaaaagaaaaaaagatttttttttaataagccaggcatggtgacacatgtctgtggtccc

SEQ ID NO: 7953 - DNA, 6000 bp, Homo sapiens
cctgccttggcctcccaaagcgctgggattataggtgtgagccattgtgcctggcctctcacgtcaccaatttaacaaaaattaaaataataaaacatttaaaaaggttgtcctctaactgtgccgggcgccccgtcagtgtgtagagaccagtgggtgagctggcagctcccgtctctccaggccccacaacaatggggtttcctgctttgtgaggacgtctaggaccagtgagcgctcaagcccgtccatcggccgccacgaggcttcacgttggtaactcagaggttttgtgggtttgagagaagaagagccagcagggagccccacggctgcccccctcgtcccactgcccccctcgtcccgctgcccccctcaccccactatccccctcgtcccgctgcctgcctcggccgccaccccactcacctcgcatgtactcaatggtgccgtccagcacaaggttgaggagtgggtcgaagcccttcaggattccactggcttggagaaatcaccgggggagagaaaagagaaggcatgagatccgtcctgggcgcagggcccgccccagcatggcccaggtatggggctaactgctccagggatggaggactgagggtaggagagggctcccgggagtggccgatgacagccgcctccagagtgatctccaccacaggcagcagaccacgtctgcggggggccagatggcaaacacttctggccgtgtgggccacagggtgccggtcacagctgctggctcgggctgcctgggtggaggcagcttcggtaatgagtccatgtgtggctgaactgcggccggtcagctctactcacaggcactgaactgtgaatttcatgtaatttccacatcgtgagacagtcttgttttgatccctttctagctatttaaaagtcataaaaacaattctcagctcaaaagcagcagcaaaacaggcggcggcacgtgtacgcggtgggaccaccagccaggaagaggagcgaggctggcgcaggccacagcgcggatgcgcctgaggacgcacctgaggacgtcacgctcagtgagagacgccagacacagaaggctgcgcaccgtgagatcccatttctatgaaatgtccaggacaggccaatccacaaagacagggaagggatgcgtgggtgccagggccagggatgggacaggcagtgatggctgatggggacagggcttcctgtaggggagacagagtgctccgctctgacagcggtgatgactgcgctgcctgacctgtgctgagtccctcagtgagttcacggaatacaaaagaacaaatcccagccctgctgcttagggcttgcggggagcaggcaacagagatgctctgagacccaggtgcaaaggcttcgggggctgagacggtctctgtggcttctctctccacgctgcctgccccacccctcaagcttcgccgccttgggccacaacttgccaacttaggttagggctctctgacccggtggtgatctctgccatctgatcctgctccgcagtgtctggtgacactgagaagggtgaagggggagctgtgtgtccccagcagaggccagcccaccctctctgcctgggactcccctccactgccctgcaggctcctgcagccgaggcccagcagcagctccacctctgcgctcactgaggggcgtcccgcagccaccccctccctgctctccttcttacccctgtcatctttcaggtgcttcctccagacaccaacccacagcccttacggtgctgccctctgcacgcccacgccaatctcaggaagcaggcaccaccaatctcgggaagcaggcaccaccaatctcgggaagcaggcaccccgggcattattctgcctgcctgtctcctcccaaggcagggccgagagcccgtccacggctgctccacacacaccgagggccgccctgtgcggtggtgcgggggagggtctgcaaactacgacccccaggtgaacctgcccgccgctcctctctgtaagtcagagtctcgctggcccaccaccacactcgcccgctcaggcgctgaccagggtggctctcctgctctgctggcatagctcagtggttgtgacagagaccatctgggctgcaaagctaaagatatttgccgtctggccttctacagagaaggtctgcccgcctgcatacaagcttccgtccacctccacaggcttcagcttccacctccacggctccctctctctttgctcaagtccctcccctgcaaaatgaaactcacctataagatggggtcagatgcagatgttcaggtccttggcaccagcctgaccagtgagcccgccctcctcacggggagagatgtgagcactgaggtaggtaggtctctaacatggagccaaggtgcccctcctctggagtgtgggctagggcctgtgactctgacgggacaagatgtcactcctgcgcttaggttatgtggcaaagacaaggaactttgcagctgtaattagagcccctgaatcagctgactgagccaatcaagagagaaacaccctgggtgggcctgactgcatcaggtgagcccttcagggaccaaaccctttctgctttttgtgtgtgtgtgtgtgtgtgtgtgtgtgtgtgtgtgtgtgtgtgtttgagatggagtcttgctctgtcgcccaggctggaatgcagtggcgcgatctcagctcactgcaacctctgcctccagggcgattctcctgcctcagcctcccaagtagctgggactacaggcatgcgccaccatgcccaaataatttttgtatttttagtagagatggggccttgccatgtaggccaggctggtctcaaactcctgaactcaagtgatctgcccgcctcagcctcccaaagtgctgggattacaggcgtgagccacagcgcccagttaattgttgtacttttagtagagatggggtttcgccatgttggccaggctggtctcgaactcctgacctcaggtgatccacctgccttagcctcccagactgctgggattaaggcgtgagcccccgcacccggccccaaaccctttctgaaagatgattctcccactggcccgaataactgaatatggacaaatgtcagctcagcctgcagcactgtaggggcagaccaccacggtggaacagagtcccgagctggcagcgtccgggagctgcaagtgtccctagccaacactggccagaacggggaccctggccctgcaaaggtaaggcactgagctctgtcaataaccagtgggctcagaagaagaccccaagatgatggaccccaaaaaacaaccctcagttacaacctcctgagagcccttgaggctgtggtaccctggctcctgactcacagatcctgtgagataataaaatggtgctgtttcagctgctaaatgggtgatttgctatgaagggcagaaaacaaagggaagcagtgtgaccagcaagagcggccgctcactcatgtccttccatgtccggagtcagcatggtgtagactgagaaaacattttattcatattcctttttctttttgttttgagacggagtcttgccctatcgccaggctggagtgcggtggcacaatctcgcctctggggttcaagcaattctcctgcctcagccccccgagtagctgggactacaagcgtgcgccaccatgcccagctaactttttgtattttagtagagacagggtttcaccacgtaggccaggatggtcttgatctcctgacctcctgatctgcctgcctcggcctcccaaagtgtcaagattaaaggcatgagccactgtgcctggcctcctttttctcttttgagactgggccttgctctgtggcccaggctggagtgcagtggtgcggtcatagctcactgcagcctcaaaccctagggtgaagccaccctcctgcttcagactcccaaattgctgggattacacacgtgagccgccccgtccggctggggcactgtgatttttaataactctcatgccacccagttgtctacaatccagggacaaagaggtttgggtccccgtcttacaaaaaaaagaaaccaaagatccaagaggctattgaataagtgacgtgttgtctgactgcttacttcctgctgagagctgcctcaattacattacatgcctgtaaccattcattctcaccaccccctgtgaagtgggtggagttaccagccccatttgacaaatgaggaaacggaggctaggagaaggcagctcacttgcccagtcaaaaatgctaggctgggcatggtggctcatgcctgaaatcccagcaatttagggggctgaggcaggcagatcgcttgaggccaggagtttgagaccatcctggccaacatggcctctctactaaaaatacaaatattagccgggcgtggtggtacacattaattccagctactcgggaggctgaggcacaagaatcacttgaacctgggaggcggaggttgcagtgagctgagatcgcaccactgcactccagcccgggtgacagagcgagactgcgtctcaaaaaaaataatgaaaataaataaaagaggtgcttccgcatgcgtcctcatcatctctgttgctgggtttatttgaaatttttaaagagggggtaccgacagcgggagcctcctcaccttcgcggcctccctggaactttacccggatcgtcttgtcgatgtacttggacaagtccaagatgctctcctttttcttcttctccttatcctgcggggaaagcagagcgcatgagacctggagcgcggcccgagctccacgccccccggctccagattccgccgcgcgctcaccgccatcttgtcgcgccgtgtggctcttcgcaggcaccgccccgcgccctttgacctcccccacgcgcatgcgcggcgcatgcgtggcccggggtctcggggcgttgctgggaaacatctgccgttggttgcggcgggcaccggccgacatggcggcagcggtggcggctgcgctggcgcggcttttggcggcctttctgctcctcgcggcccaggtgagcgcggcaccggtcccgacggcaccgcgggctgcggcccttcggcctctctgtccccgggctacgcgcaggaacgaccccgctcggcccgtcttgggggtccagcctcggggatccgccgtccccgcgttgtcggccggcggtgccggggctcggccgtgaccttgcgggtctgtccccggctcctctcctttccccgcctcggaggccctccgccgctgcagcgccactcacttcccaccgggtctgaaatttgtgccccctccatcctccggttctgcttctccgtttcggggtctccagttgccgccggggacgcctctctccggctctgtggccttgagcaggcggctgcccacccctctccgagcctcagtttccccttaggcggaacgggcacggtgctaagctaacctcaccctagggggtgcggtgggggaacccagaggcgtcccgcgcgtcccccagtaactggcagcatcctggagcggccaggagtccagccctgcactggggtcggatccccgctccatcttttactccgtgaccttggacgatggaattcgtgtgcagaaggaggaccgactatggtgtggattctggaggttctgtccagggtgaccagcgcccagggccaacaggccttcattatgttcattgtgtgtcatttgatgtaaagagtgtcaggttctagtggggacagtctacgagatcgcactgtcataactgcatcttttattttcttaattccaaatcttccctctctcctgagttcggtggctcaggcaatggaacctggagcagccccacaaatgcagcccttaaccttcactaccccctcagagttctcactcttaaggcgtcgccgccacctggctcctcagtctccactcctccagccccaccgctatccctct

SEQ ID NO: 7954 - DNA, 6000 bp, Homo sapiens
gcctgggcgacagagtaaggctccgtcaaaaaaaaaaaaaaaaaaaattagctgggtgtggtggcatgcacctgtaatcccagctactcgggaagctgaggcaggagaattgcttgaacccgggaggcagaagttgcagtgagctgagatcatgccactgcactccagcctgggggacagagccaaactccatctcaaaaaaaaaaaaaaagagagaaaagcccaggcgcggtggcctacacctgtaatcctataatcccagcactttgggaggccgaggcgggcggattacctgaggccaccgtggctaccttggcccatccattggtgagaaggggtcacagccggagctcgcagggggcggagctcgcggagggcggggctcgcggggggcggggctcgcgggggcggggctcgagggggcggggctcgagggggcggggctcgcacagggcttgaatcccaggaggagggatcccagtgctcccggtggagtctgcctgccccaggtgtcctgttacatccctcaggggccgacagctgcccagttctgcttagggatccatgcgacacaggcagtttctcgcggaaaatgggtggatcccctgctccaacgagactgaaagcggcaggagcatggatgaacgttgcggtgttgccgttgcacatggctgccacctggccatgttctgggactcatgcttgtaaatccttttacatttcaaagccttagtgatgactcatcagtgggagaacacccggaacagggactggcaaatgattataaacggtcagagaggtggccgggtacagcggctcacatctggaggccgaggcaggaggatcacttgaggccaggagttcaaggccagactggacaacatagtgagaccccaatctctacagagtataaaaaaattaaccgggtgtggtggcatgcctgtagtcctatctactctggaatctaaggcaggaggatcgtttgagcctgcgaggtagaggctgcagtgagctatgatagcaccactgcattccagcctgggtgacagagcaggaccttgtctctaaaaaataaaaaaagattacgtatctattccaggggtcaggaaacaacatcctgtgggccagagccagatctggtctgcagaattattttttcattttattattattactagagactgggtgttgctctgtcacccaggctggagtgcagtggtgtgatcacaggtccttgcagcctcaacctcctggtctcaagcagtcctcccacctcagccttctgagtagctgggatcacagatacgtgccccaccatgcccagctaatttaatttttattttctgtcgacatggggtcttgctatgttgcccaggctggtctcaaactcctggactcaagcgattgtcctgccgcggcctcttaaggagatgggattggccgggcacggtggctcacgcctgtaatcccagcattttgggaggctgaggtgggcagatcacgagatcaggagattgagaccatcctggctaacatggtgaaaccccgtctctactaaaaatacaaaaaattagctgggcgtggtggcgggcgcctgtagtcccagctacttgggaggctgaggcaggagaatggcgtgaacctgggaggcggagcttgcagtgagccgagatcgcgccactggactccagcctgggtgacagagcaagactccgtctcaaaaaaaaaaaaaccaaaaaaacaaagataggattacaggcgtgagccactgcacccagccaggatttgaattttagtgtccataaagtgtgacgagaacatagttgtgtctaattctttacacgtggtcggctgctttagcgtgacaatgggagagtgaagggacacagtcctgactgccttgtgagcatgaaaatatttactgctgccagcacagtggctcacacctgtcatcccagcactttgggaggccaaggcaggtgggtcacttgaggccaggagtttgagaacagcctggccaatatggtgaaaccccatctctactagaaatacaaaaattagccaggtgtgatggcacacgcctgtggtcccagctacttgggagactgaggcatgagaatcacttgaacctgagaggcggagcttgtagtgagatcacgccactgcacagtgcacctgtggtcccagcactttgggaggctgaggagggaaggttgcctgaggccaggagttcaaaaccagcctgggcaatgtagcaagatcccctctccacaaaaaacagaaaaatgaggccgggtgcagtggctcacgcctgtaatcccagcactttgggaggccaaggcgggtggatcacctgaggtcaggagttcaaaaccagcctgggcaacataacaagattcccctctctacaaaaaaatagaaaagtgaggctgggtgaggtggctcatgcctgtaatcccagcactttgggaggccgaggtgggtggatcaactgaggtcaggagttcgagaccagcctggccaacatggcaaaaccccctctctactaaaaatataaaaattagccaggtgtggtgctgggcgcctgtaatcccagctattggggaggctgaggaaggagaatcgcttgaacctgggaggcagaggttgcagtgagcagagactgtgccactgcactccagccaggtcaacaagagtaagactccatctcaatagaaaagaaaggaaaggaaaggaaaggaagggaagggaaaggaagggaagggaaaggaagggaggaagggagaaagggaagggaagggagaaaggaaaatgagcatggcgtggtgacgtacacctgtggtcccagctatgggaggctgaggtgggaggatcacttaagcccggaaatttgaagttgcagtgagccgagatcgcaccacagcactccagtatgggcaacagagagactctctctctctttaaaaaagaaaaaataaaaatcaggggtggggtgtgaaggtcaggagcactttgggttttaggctgctggagggattttagtgtgtgtgtcgcagggatgatgtaatctgatggacacttcaaaggcacccttaacggctgtgaccagctcacagaggggcaggggagggaggaaagaggccagtccctccagacgggatgctggtgggctgtccagagccgtagctgcacagatggtgaggaatgactggattaggaatctcttttgaacactagccaacaggagttgttgatgagtgtgacagaaaaagagtctgtggtcacaaattctttgatgcacctcccttcgaaagctggcactcaggctgggcgcggtggctcacgccggtaatcccagcactttgggaggcccaggtgggaggatcgcgtgaggtcaggagtttgagaccagcttgggcagcataggaagactccctctctacaaaaaacttaattagctgggcatagtggcacacacgtggccctagctactaggaggcggaggtgggaggatcgcttgagcccaggaggtggaggctgcagtgagctgtgatcacaccattgcactccagcctgggcaacagagaaagaccctgtctcaaaaacaaacaaaaaaggaggcgggagggtgagaaagagagactggaagaggctgcactgtggctgtgaagggagaagaaggggccctgaggcttaagacgctggtaaagatgggaaacgtattctcccctggagcccccagaagggcccaggcctgcccacagctcgatggtgagccctgcaagatggatctcagacttctgactttcagaactgtgagataatcaatcagtattccatttttaaattctttgagacagggtctggctctgtcacccaggctggagtacagtggcacaatcacagctcactgcagcttccacctcctgggctcaagtgatcctcctgcctcagcctcctgagtggctaggattacaggcatgagccaccacatctggctaatttttgttcattttttgtggagatgggggtctcactatattgcccaggctggtctcaaactcctgggctcgagcaatcctctcacctcagcctcccacaatgctgggattacaggtgtgagccaccacgcctggccgaaaactcggtgtccctctaagcccccaagcgtggggtcctttgttacagcagctgtgggaacttcagacttactctttctagcaatggaccgcagcgacccacgggagtcctcatcctcacacagccgcccagccagcagtcacgttccaccttttttttttttttttgagatggcgtcttgctctgtcgccaggctggagtgcagtggcgtgatctcagctccctgcaacctccgcctcccgggttcaagcgattctcctgcctcagcctcccgagtagctgggattacaggcgcccaccaccacgcctgactaattttttgtatttttagtagagatggggtttcaccatgttggccaggctggtctcaaactcttgacctcaagtgattcacccaccttggcctcccaaagtgctgggattacaggcataagccaccgcatctggtcttttttttttttttttttggagtctcgctctgtcacccgggctggagtgcagtagcgtgatctcggttcactgcagcctccgcctcccgggttcaagcgattctcctgcctcagcctcctgggtagctggattacaggtgtgcaccaacatgcctggctaattttggatttttagtagagatggggtttctccatgttggccgggctgatctggaattcccgacctcaaatcgtcctcctgcctcagcctcccaaagtgctgggatgacaggcgtgagccaccgcgccccgccgtttttaagggtatagttgcaacccttgcttatgggaagagaagcaccttcagcctctgaccccgtgtttctgtcttgctgtgtggcatccagctcgctgtctgcgtgtctctgagccatggagcccactgtggctgacgtacacctcgtgcccaggacaaccaaggaagtccccgctctggatgccgcgtgctgtcgagcggccagcattggcgtggtggccaccagccttgtcgtcctcaccctgggagtccttttgggtaagtggctatgggattggctgggttcgcaatacaagggacatgtgcaaagtcaccgggaagtgacttgatggtgtctccttggccatctggaatcaaagggcagtgtctaggcgtggagatgaaggctgccctaggccaggcgggtgggcggggagtggagcagatgagttcctacgtgtgtcagttttcccgactaaagaagctcccgaaggaagttttcacagctggggtgacagagaaacagagacagggaaatgaccttgttttaaattttggcaaatcagcaaaatacccaaagtagtttttttttttgtttttttttttttttgagacggagtctctctctgtcgcccaggctggagtgcagtggtgtgatatctcggctcactgcaagctccacctcccgggttcacaccgttctcctgtgtcagcctccccgagtagctgggactacaggcgcccgccaccacccccggctaattttttgtatttttagtagagacggggtttcaccgtgttagccaggatggtctcgatctcctgacctcatgatccgcccgcctcagcctcccaaagtgctgggattacaggcatgagccaccgcgcccggccccaaaagtatttttataaaaccgagcaactgggttgggcgtggtggctcccgcctgtaatcccagcactttgggaggctgaggcgggaggaccatcggagcccaggagtttgagaacagcctaggcaacatgataaagccctgcctctacagaaaatacaaaaaattacccaggcgtggtggcacctgcagtcccagctactcaggaggctgaggcaggagaatcgcttgaacctgggaggca

SEQ ID NO: 7955 - DNA, 6000 bp, Homo sapiens
gccacagtttcagtgcagatgtaaatccggaagcctccagcacctgcagctcatagacagctctcgcccaccttctcccaggaccaagccagtcccgtccagtccagtgtctgagcagagtcagaatccacaccacccgccgcctgggctcagaaagttctgctttaagtcattatttctccactgtacgatggggaatgcggtgtgtgggggccatttacccaccaacacagcagctgtgaggcacacacggctattgaaaattcatggaaattgctgggtgtggtggctcatgcctgtaatcccagcactttgggaggccgaggcaggaggattgcttgagtgcaggagttccagaccagcctgggcaacatagcgaaaccacatctctacaaaaaaatcctccaaaattaaaaaaattagcccgagcatgttgttgcatgcctgtggttccagctactcgagaggctgaggtgggaggatcacttgagcccgggaggtcgaggctgcagggagcggtgatcgtgccagcctgggtgacagagtgagaccctgtctctaaaaaaaaattaaaaaaaaaaaaaaaagaaaattcattgaaattaaatgaaagttaggccaggtgcattggttcatgcctgtaatcgcagcactttggggggccgaggtgggtggatcatgaggtcaggagttcaagaccagcctggctaagatggtgaaaccctgtctctactaaaaatacaaaaaataagctgggtgcggtggcaggcgcctgtaatcccagctactcgggaggctgaggcaggagaatcgcttgaactcggagggtggaggttgcagtgagctgggattgctccactgcactccagtctgggcgatagagtgagactccgtctcaaaaaacaaaacaaaaacaacaacaaaaaagaaattaaatgaaagttaaaaatttagtctctcagtgtattgatttgctagggcagccatgacagtctcacagatggagaggcttgaaaacagacatttatgctgccataattctggaagccagaagtctgagatgaaggtgtgagtagggctgggtcctcctgaggctgacggggatctgcccaggcctctcccagttcctgctggtggccggcgtccttgatgttccttggcttggagaagcgtcagccgcatctctgcctccatctccacaaggcgccctccctgggtctgtatccaaactcccccaactccttcaaccttttttattttaagagatgaggggccgggcgccgtggctcacgcctgtaatcccagcactttgggaggccgaggtgggcggatcacgaggtcaggagatagagaccatcctggctaacacggtgaagccccatctttactaaaaatacaaagaattagccaggcgtggtggcgggtgcctgtagtcccagctactctggaggctgagtcaggagaatggcgtgaacccgggaggcagaacttgcagtgagcggagatcaggccactgcactccaccctgggtgacagagagagactccgtctcaaaaaaaaaaaaaaaaaaaaaaaaaaaagagatgagggtctcattaagttgcccaggctggtctcaaactcctgggctcaagtgatcctcccacctcagccttctgaatagctgagactacaggagtgcaccaccaagcctggctcattttcctatttttacatttattattattattgttattattatttttttgagaaggactctcgctctgtcgtccaggctggagcgcagtggcgcgatctcagctcaccacaacctccacctcctgggttcaagcgattctcctgcctcagcctcccgactgggactacaggcacgcaccatcatatctggctagtttttgtatttttagtagagacgggattttgccatgttggccaggctggtctcgaactcctgactcaggtgatccatctgcctcccaaagtgctgggattacaggcgtgagccaccgtgcccggccgatttccccatttttataaggccaccagtcacatgggattaagggcccaccctgctccagtatgacctcatcttaactaatgccatctgccacaaccattttccaaataacatcctatgctgaggtcctgggggttaggatgtgatcatgtagattttgatgggacagttctttattttcttttatattttagagacagggtcttgctctgtcacccaggctggagtgcagtggtgtgatcatagctcactgcagcctcgatctcttgggctcaagtgatccttctgccttgggtttccgagtagctgcaattacaggtgcacaccaccacacctggctaatttttatattttttgtagagacggggctgggtgctgtggctcacccctgtaattccagcactttgggaggccgaggcaggtggatcaccttaggtcaggagtttgagaccagcctggccaacatggagaaaccccgtctctactaaaaatacaaaattagccaggcgtagtggtgcatgcctgtaatcccagctacttgggaggctgaggcaggagaattgcttgaacccgggaggccgaggttgcagtggactgagttcgtgccactgcactccaatctgggtgacagagcaagactccgtctcaaaaaaaaaaaaaaaaaaaaaagagagagagagagagagacagggtcttgctatgtttcccaggctggtctcaatctcctgggctcaagtgatcctcctgcctcagcctcccaaagtgttgggactacaggcatgagctactgtggctggccaattgcagacagatggaactgtggccagccacttcaccagtgaagtcccaaacacccctctgcaggcatgataagctagggtagttcttatcttttcctgattcctgttctctgtgtgtttagtggggaccacagcaggcagggtggggtgttggtggaatttgggataagtggagtctgggcaggcctggagctctctgtctgccttctgggcccgtgttggctgaccctgttgccccctctgccctgctttggctgagctgaattatttcttggtccttcccttctgggggcttctcgcttaacctcctttgttgtccctgataaaggggccttgttagcccgcaccttccctccttcgtcacttgacttctgcctgctcattctttgtaccttagttttagcgtcacctcctccaggaagtcttctttgatttctcctcctccctaggtctcctctaggctcccacagctgcctgtgttccctgcatgacagctctgctttatactgggcacaactttccctctttcttcactcatctgctctggctcatcttttgagtttcagcttaagtgtcacctcctccaggaagcctcctctgatttcctctcctccctaggcctcctctgggcttctcccagctgcctttgtgtcctctatcccagctcccatcacccctggtcacacaatccacctcctcctttggacttcgagctccgtgtcggtggatagtgtggctttgctggggtcccggctgtgtccccagcacccaccacacggctggcacacagtaggtgctcagtgacccagcagcacactcagaaactccctttctagccgggcgcggtagctcacgcctgtaatttacagctactcaggaggctgagacacaggaattgcttgaacccaggaggtggaggttgcggtgagctgagatcaagccactgcactccagcctaggtgacagagactacatctcaaaaacaaacaaacaaacaaacaaacaaacagaattctcacatgctgctggcagggagagtgcttgattctttatcattatatctgaggaaactgagactctgagaggtgaagcgacttgcccaaagccacacagctgggaaatggaggagttgggatttgagcccaggctcttaatcggcaccaatgccacttctcacttgggacagaaaggaagccctgactccttaggcagctgtacggagcctgggatgataacgtgctgagagccagggctactgtctgctgcaccctggggctcagtctccccatctgtacaaagggacgttccttaggtacctccagccctgagacactgggttttaactttaaatttctgatgaacaacaaatacttttttagtataagtatgccccaaatatgaataaagataaatataaatacctgccaccgacccctgcacaaaccgcaggttccagactacaagtcccacaacccactgcggcctcccttaggaactgactatcatgactttctatttttcattcattcattcaaaaatggtataggccacccgccgtgcgccaggtcttgtgctagatgccggggatacatcatatgcacaaaacagacaaaagtttttgccttcgtggagtttgacatctacatcctcgggagttttaagtgatttttgtttttctcagcaatttctgccaggacgactacagttcccgtgaccctttgtgtgtttgacgggactacaactcccagaagacctagcgcgccaggcaggcacttccttttctctttatccccaacttccttccaggtcgcaaggtcacgtcctgtccccacctttcgcccctcaccctagctcccccaacgccaaagacaaggttaagaaagtgatatcgcgaaatagttttttaaagcattttattgcattttatgacttggagtttatgtgaaacctcaacggtattagccgaacagcctgccgcaccttccgggagttccagagtgggcctacaactcccacagggctccgcgagcgccggacggacggactacaattcccgacaggcagcgcggctggcggggcggttcgccgcggtgcccacaggacctcagggcgagtgcgggctgccccgcgcggcgcccgcaggaccccggcggctacccatgccgaggtgagtccgcgggagccgccgccgccgccgtcccgtcccagctgccgccccgcgcggccccgccgccggccaggatgctggaggaagcgggcgaggtgctggagaacatgctgaaggcgtcttgtctgccgctcggcttcatcgtcttcctgcccgctgtgctgctgctggtggcgccgccgctgcctgccgccgacgccgcgcacgagttcaccgtgtaccgcatgcagcagtacgacctgcagggccagccctacggtgcgtgtccccggcccaccctcggggctccccgggctccccggccacgccactccggcccggcgatccccaggccgatccctagctccggcctgggctgcccgacccatgctcaggccccaggcgaggcagagccctgccgccctggacccccgggcgccctggaatccctgctctccttgcctagcgcccagggaccccccgcgctcgctcccacagcccccggcccctgcctaggtctccctgccccggaacccatggccgggccaagcgtcccgcgtccctggagccctaagtcccctctctcctgtccccagctgggccggcgtctgcctgccttgccgagtttctccctcctgggccccctccgccccttaggcttcctggtccgggctcacttgagcagacgctcccgtcctgacctccagctcccagggtcctgttctggagaccatctggttggtctctggattcactgggtcacgtccgtgttcccaggcctctcgcctttagctgactgcgtttggagttaaaggtccctgcactgatttctgccaggctgagccacccgacgcggtggtccagcattccccaccccctcccacggccctgggtgccaagtgcattttgtccagtgcccaaattcaactcccctgaattttctcgctctagtcaccggcccccacgtcaagggcacatttgtccccagacccctgacgctctctggtcccagttcgtgagtcatgtttcagaatctg

SEQ ID NO: 7956 - DNA, 6000 bp, Homo sapiens
tcagcgcctagaggtgcctgctaccacacccagctcatacatatatatatatatatatatattttttttttttttttgaaacagagtctcagtctgtcgcccaggttggagacagtggcacgatctcggctcactgcaccctctgcctcccaggttcaagtgattctcctgcctcagcctcccgagtacctgggattacaggcgggtgccaacacgcccaggtgacttttttttttttttttgagacggagtttcgctcttgttgcccaggctggagtgcaatggcccgatttcggctcactgcaacctccgcctcccgggctcaagcaattctcttgcctcagcctctctagtagctgggattacaggcatgtgccaccacacccagctaattttgtatttttagtagagacgaggtttctccatgttggtcaggctggtctcgaactcccaacctcaggtgatccgcccgcctcgacctcccaaagtgctgggattacaggcacgagccaccacgcctggcccatgactgttatatttttagtacagacagagtttcaccatgttggccaggctggtctcaaactcctgacctcaagtgattcggccgccttggccatccaaagtgggattacaggcgtgagccactgtgcccagccatagcttatatatatatatatatatatataattttatttttttttgaaacatagtgttgtgctgtctgccctgtcacccaggctggagtgcagtggcgtgatctcagctcactgcaaccgccgcctcccagggtcaagtgattctcttgcctcagcctcctgagtagctgggattacaggcgcctgccaccatccttggctaatttttcgtatttttgtagagatgggttttgccctgtgggccaggctggcctccaactcctgactcaagtgatcctcctgccttggcctcccagagtgctgggatgacaggcatgagccactgcaccctgcctaagatatttttaaaaatttttgtggatgtggagatgggggtctcactgtgttgcccaggaatgagagtacagtggtgtgaccatgacttactgcagcctccaccgcctgggctcaagcaatcctcccagctcagcttcccaagtagctgggagtacaggcaagtgccaccaagactggctaattaaaaaaaaaaaaaaaggccgggcacgatggctcacgcctataatcccagcacttagggaggccgaggggggcggatcacaaggtcaggagtttgagaccatcctggctaacacggtgaaaccccatctctactaaaagtacaaaaatcagccgggcatgtgcctgtagtcccagctactcgggaggctgaggcaggagaatggcgtgaacccgggaagcagagcttgcagtgagctgagattgcgcctgggcaacagggcgagactccaactcaaaaaaaaaaaaaaaaaaaaagtgtgtgtgtgtgtgtgtgtgtgtgtgtgtgtgtgtgtgtgtgtctgtgtgtgtgtagagatggaagtctcactctgttactcaggctggtctctcctggcctcaagagatcctcccgcctcggccttccaaagtgctgggactacaagcgtgagccactgttcctggccaagcctcttattttaaagacgctgaagtcagaaagcctgtaggacaggaatgcagcattttcttttcttgcggttttttttttttggggtggtggggggcggggtggacagggcctcactctgtggcccaggctggagtgcagtggcgcaatcttggctgactgcaacctctgcctcccaggtttaagtaattctcctgcctcagcctccctagtagctgggactacagacgtgcgccaccacgcccagctaatttttgtattttcagtagagacagggtttcacaatgttggccaggctggtctcgaactcctgacctcaggtgatctgcccgaatgcaggattttctaccagctccagtcccctgcagaacccctgtccgattttgccagacctaagcagagactgctttgagcaatggcagccacgaaccttgacgtgtgcgggccggtagggaatgatgtgtttttctcacgactcattaaaacaaatacacggctatttaaagatcgctggactggccgggcgtggtggctcacgcctgtaatcccaacactttcagaggccgaggtgggtggatcacctgaggtcaggagttcgagaccagcctggccaacatggtgaaaccccgtctctactaaaaatacaaaaattagccacgcgtggtggccggcgcctgtagtcccagctactcaggaggctgaggcatgagaatggtgtgaaccccgcaggcggagcttgcagtgagccgagactgcgcccggcactccaacctgggtgacagaatgagtgtccgtcttggggggtggtggacatcgctggaccttaatcatctaaaatgattttttgcgccacctgctggtggcggagtgtcacacagggaagggctgagttgcctgtaggtatacagtaggtgttcagtaagccttagttttggttaatggtgtttctacattggctcagcatggggtcttggaaagagtttggggctccaggaacccatgctgtgcaaccttcagtgagtctggggccctttctgaaccttcatctataaaatatgtgtgtgtgtgtggctgggagtagtggctcatgcccataatcctaacattttgggtggccgaggtgggctaatcacttgaggccaggagttcgagaccagcctggccaacatggggaaaccccatctctactaaaaatacaaaaattagccaggcgtggtggcgggtgcctgtagtcccagctactcgggaggctgaggcaggagaatgacgggaacccgggaggcggagcttgcagtgagccgagatcgtgcctgcagtccagctgggcgacagagcgagactccgtctcaaaaaaaaaaaaaaaaaaaaaagaagggaagacatataaccttcatgcgatgtgagaaggtgcgttgaaatgccttctacaattcttgcttcggtcggaagtcacaaagggattgaacttcattttggctgctcccacttctgtgatggccgcaaaagggaagagaactacatgctcctttttatttattttgtatggagattgggtctcgctatattgcccagcctggtctcaaactcctggcctcaagtgatcctcccacctgactcttcaaagttctggaattacaggagtgagccattgtgcctggcctctacgccccttttaatcctcctgacaaccctgtgatgtaggggctattattttccccaattacagatgtggaaactgaggaacagagaggggcagtaagttgtctgaggtcacacagcaaataggtgagagctggttttagaactctcctagctctgaagttccaagtgggtccccacaagaggctttggcaatgctttattcgggcccttggagacccttgaggggctgactgtagctgacttgggtctctggactagtgttttgggtacaattgcagtggaggaggtgagatgtcatcttcggggaccctctaagactttgatattgttggccttgtttactaagcaaactcttaaccaaccttcaaatccccagctacgatgccccctcctccaggcagcctttcttttaccgctagagttttctctatgctcttcacccctagccacaacctgggactcctgtccctgcccagccctgactggataaggctgggaaggggtgtttatgtgtagctttgcccttttacccttttaaccttggggtggggcccaggcacagctgggcgcaggtttttttttttatagtaaggaatgtgggggtgcagccacgaccagccccgcccacccaggtgacttgaaggtttcctaccctggtccagtccctcctaggtctaaccttaggaatcccggaatcccaggcccctgagcgggaggctgggctgggctgggtgagaagaaggaaacgacctttactccctcccagagcctgaagaatttcctcctgccttgcactctgcccctttcttttccttcgttccttccttccttcccttctttccttccttccttttctttttttttttttttttttgagacagggtctcactctactctgtcgcccagactggagtgcagtggcgtgatatcagctcaccgcaacctccgcctcccgggttcaaccgattctccttcctcagcctcccgagtagctgaagcatgcgccaccacgcccggctaatttttgtacttttagtagagacagacgtttcaccatgttggtcaggctggtctcgaactgctgacctcgtgatccgctcgcctcggcctcccaaaatttggggattacaggcatgagccaccgcgcccggccctgccctgccccctttcttttctggatgctgggtgtgaagacagagcccgcaggccaagaccgcaggaaaaaggcacgcagccgctgttgtatcttcagagtccacgcctctggcctctggggcctccggttcccctctgtggaatggggcaaaccttccagagataaggtgacccagggaccagcgctatgctaaggaggtctctggccttcgacaagcttctaatccaagaggcctcccagatgcacctcaaaatgtgcccatttcgcggacggaaacaccttccaaatagtaggctccgttccaagcgcgggggttattcctgccgggtcttgctggcagccttgtcgggccgggctctggccgcggccgccggccccctctcggctgcgtggataacccggcctggagtttccgcctcaggacctggctcctgtgatgggaggtggggagagaaacctccgccgcgtccagggggcgtgtctgggcaggggcggggctgacccgagacctggaggaggaagaggggcaggtgcagccgggagctgcggagctggagggaggaggacgagagcccggccctcagcccgctgtgactctcctcagccccctcccccagcccggggtgggggccgattgactgtttccaggaccccctcgggtaggggggctggagagcccccaggtggaccatggcggtgagattccaggcgagtaaccctccaagggtggcagggggaggggctcgggctgaggtggggtggggggaaagcagggtttgggagtcggacccaggaccccagaacgcctacctacataacaggcagggaaactgagtcccagagggatgaagtggctagctggaggttgcacttcgagatgcgtccgcgcgtccgcgcccccctccctgcctccaaagaccatctcttctggagcctcctctgccccaggaccggcctcctttaataccgcagggctgggttcaaatcccgaattttctgtccactatgctgtgtgtaacgtggggccagtgagtgaaccctctccttccctcatccgaaaaatgggtgatcggcattttaaacagagagaaaaatgtgttttaagagcttggcgcatcgtaggtgggcagaaaagatgttcatccccctttgctgggggcgtgcagccggctgagcttgggcgcccgcggtggcacggtgggcagtgacttcatttgggggctggggtggctttggtgaacattcacctcctacaaggctgcacgagggagcaccagcatttattgggtgcctactgtgtacaaagctattaacaggcattaccaggcagaggcaggggtggggtgagcaagccggctggggtgcgccgtggcgggggcggggcggggggcgatccttgtctccggagggatttcaccctccaggcatggagcctgggctggtttcttcagacccaccagccagggtagactgggactgcagcggtatgcggccagacccaggccactccgccccaagcttcaggacccggcacttct

SEQ ID NO: 7957 - DNA, 6000 bp, Homo sapiens
ccctggcgcaactcgtgcacgtccacgcggccatccttgttactgtccagctcctcgaacaggcgaccccagcgctgccgccgctccgcgtcgcccgggctcccccgcatggcgcccgcccgggggggaggggaggcccggcagcggcggcctcagtgggggcttcgcggctccccctccccccccgggaccccgcagggtcagctcccgcggccgccggctccgcagcctccgcgcagtccgctcggctctggcacttgcgggaggtggtgacggctagccgtcgccgcccgcgccagaacttgcgtctcctcccccgacctgcattggggggaggggaccgagggcggagctgggggcgtggggagggaatgtctgggatggtctggtattgcacagccgaggaacaccagagttccttctgggaagacgggctagggagctcagtggtctcaggtctggtttcagagttccgcctctgcgtgcctcagtttaccctttccccctttgcccaagggggcaaggtagagcgctgtcggggattgggtttcataatccccttccacttgacctccccgccacacccactaatcttcaggaactcaagttctcgcttttcccagacgcacgcaagaaccgtgcaccatctcgctcgctctctgcccgcccgcgccttacaccttccccgctcggccgcagaaacagaagatccaggagcgatgctctcccactgtcccttcttcccgcccgcgcgcttcctttctcggttcccactctgactgggaaacagaaaatcaacgcgcggcgcggctgcaaagtcggtttcctattggtcagcgcctcctgggctgagcccgcccgccccgcctcttctcccacctaggcggggcctccccgcagacccccgactgcctccagcccgcagtcccaccgcctgccaggagatcttaaaggggccgcggccgcaatcagacgctgagcggcgtggggagggggtggctcagtgacccgggcgcggggttgaggatcccagtggtcgagcgctggaggcagggccccagcctgtcgcactcgctgcacctgcggaatgtccctactgctagtttcgggcgcagtttctcgatccaccattagggggaagggagcccagaccacttgacagcgaatactcgataacaaatctcactttgattcagtgctttgcacatgccagggcttttactcacctctcgagtcgtctttgccaaaaccctataaggtaggtggtactggcgttcgcactttgcagataaggaagcggaggttaagtcattctccccagtcctgatgaccactaaggggcaaaacagggtttaaagagatctgggatccttaaccatcactctataccctagaaagaattaattatcttttttttttttttttttttgaaacggagtttcgctgttgttgctcaggctggagtgcaatggcgcgatctcggctcactgcaacctccgcctcccggattcaaacgattcttttgcctcagcctcccgagtagctgggattacaggcgcccgccaccaaacccagctaatttttgtatttttagtggagacggggtttcaccatgttggccaggctggtctcgaactcctgacctcgtgatccgcccgcctcagcctcccaaagtgctgggattataggcgtgagccatcgcacgcagcagtgagttttttttttttttttttttttttttttttttttttttttttttttttgagatggagtttcgctcttattgcccaggctggagtgcaatggcacgatctcagctcaccacaacctccgcctcccgggttcaagcaatgctcccgcctcagcctcccaagtagctgagattacaggcgcacaccaccacgcccggctaatttttgtatttttagtagagacggggtttcaccatgttggttaggctggtctcaaactcctgacctcgtgatccgcccgcctcggcctcccaaagtgctgggattacaggcatgagccaccatgcccgaccgcagccgtgagttttgtatttttattagagacggggggggggggtttcacctgtggaccaggctggtctcgaacacctgacctcagattatcctcccgcttcagcctcccaaagtgctgggattacaggcgtgagtcaccgcgcccggcctggcctaattattctttaatcatcacttgtcacccaagggtcctcaggagggggtcttgttattatcatcatcctttatccaaagatacagcattggccggtctcggtggcttaggcctctaattctagcaatttgagaggccgagatgggaggatcgcttggggtcaggagtttgagaccggcctgggcaatatagcaagacacccaactctacaaataataataataattattattattttttttaaaaaggaaagaaaacaaagatacagtcgtgagggcatatttagttcacgcccagcctctgcctagacaggtgtgctggaacaggtgtgccccagacaaatgagtctcttctaagaggctccccagcagaggttttcatttacagttgttccttgcaggtgccatacagcatggagtgatacagaggtttttttccatgtaagtgcccctaaataggtgttttctcacagatacattcttgacaggtgggcctcagtgtatgtgagcccctgccctgatggttttacccacagatgtgtgtcaatgtgagtgtgccccgtgcagatgttccaagttcttcccctcacttgagctcaattccatacaggtgttcctcctacaaggtgctttctcttacctcacaggtatgtttctgagcaggtttccctccacccatgaatgcattctacagtctcccgccccgtaggtgtgtttcagttaagtatacacccatctgggtatgtttccatacaaccgagtcccatacaggtttacgtaaatgcaggtgtgtctcatacaggtatttacaagacactgacacccaggaattcccccaatgcaagtgccgtacatttcataggtgagccatgcagatatgttcctaaaacaggtctattccacatcagagtgccttagttagctgtttgtgatgataatgcaggcgtgttctatagagatactgtccaccctggtggtatgtatccatttggttatatttcttttctttttttgacagtcttgctctgtcacccaggctagagtgcagtggcgtgatctcggctcactgcaacctccgcctccagggttcaagcgattctcctgcctcagcctcccaagtagctaggattacaggcgcccaccactacgctagctaatttttgattattttttagtagagacggggatttcaccatcttggctaggctggtctcgaactcgtgacctcgtgatccacctgcctcggcctcccaaagtgctaggattacaggcgtgggccaccatgcccagccttggctatatttcgtatagctgtgattcaatgcagatttttttttttttttatgagatggagtttcactcttgtcacccagggtggagtgcaatggtgcaatctcggctcactgcaatctctgtctcctgagttcaagcaattctcctgcctcagcgccccccgagtagctgagattacaggcacctgccaccacacccggctaatttttgtatttttagtagagacaaggtttcaccatgttgggcaggctggtctggtttcgaactcctgacgtcaggtgatcctcctgcctaggcctcccaaagtactgggattacaggcgtgagccgccgcacccggccatctgttttctgtatgttcttatatgtgaacacctgtgcagttgtcttctgtacaggtttggttccacacaggtgtttaccatacagctgtttttttgtttttaaaatttttttagagacagggtctcactttgtcacccaggctggagtacagtggtacaatcatagctcactcactgttacctccactcctgggcccaatcgatcctcccacctcagcctcccaagtagctggggctacaggtgcgtgccatcacatctggctaattttcttattttttgtaaatatggggcctccgtctgtgggccaggctgatctcgaactcctggcctcaagtgattctcttacttcggcctttcaaagcgctgggattacaggatcacgccaccgcccccggcttattttcttctttttatttatttgtttatttatttatttattttttgtagagaatgaggcctcgctgtgttgcccaggctggtctcggactcctggcctcaagcaatcctcttgcctcggcctctcaaagtgttgggattacaggcgtgagccattgcgcctgggcaggtattttttctcattaagcgctccccatccaagtctgccctaggcaggagtgcctagtgcacgggtacatacataccccgtgcgtctccacacctgtgcgctcccacagatatgctcgcaatgcaggtgtaaggtccccctcacacctgcgcgcttccgcggtctccctccccgcatccccattaagggactggggtcccgttacaggtgcgcccacagcgcggccccgcccccttcttgactccgccctctcagcgaggctcaggtgcacaagccggaagtgcgctctcccaggtgagtgactaaactttccgggtcacgtgacagggcggagccggtggggtcggacccacagaacgaccgacggaccgagggttcgagggagggacacggaccaggaacctgagctaggtcaaagacgcccgggccaggtaggaaggcaggacgcaccgctaggcctgccccctcgcccgtccaccctgcccgtcccgtcccgtcccgtcccgtccccttcctttccccagcccaggaacgcgctcctgggagttaatctttaatcgctgacctctggcggctggggcggggcgggactcatgggtgccctggcgccagttgtctctcctgtgggcctgcgccggggtccccaccccgatcccaacgcctgggcctctccttctcctgtccccaggtgccccgtcgcaggtgcccctggccggagatgcggtaggaggggcgagcgcgagaagccccttcctcggcgctgccaacccgccacccagcccatggcgaaccccgggctggggctgcttctggcgctgggcctgccgttcctgctggcccgctggggccgagcctgggggcaaagtaggtaccagctgagagcgctgggggggaggggtctggattcctggatctctgctggggacgtggcttagaagcgctgggtatctggggcgcagagagggtcaagaattggggagcggggaagaaataccttggggaggggtctacagggttagggctcggggggattaagatttctagtttcttccttggacactgggagttggtctaggagacctgagttccccagcgaggtggaattgtgtgttggagtgggggctcctaagtaggacttggggggaggtaagggctgcgtacctgagtcttggtatagtgcaggtgtttttgggtgaactgggagctgggaggaggcctgccgagccgggtcgacctggttggctgaaggtgtagaccccagccattcagtcttagatttgttttgggagcctgtggggaggtgtgagtcagacactccagggaaaagctaggcccgcccagatccttaagggcccagggccgagaggtgagtaggggaggggtggacttctggacaccctactgggctctgcgggactgggtcgggggggtgtcctggggagcaaacacccaagggagaggtcttacctgcaagacacccaaccatctctgtgcgaatgaaaggcagagtttgaattgggacctgctagggggaggtgaaggggaatgcccaaagcaggtgcagatgggcggggatgggagagaaagatggagactgag

SEQ ID NO: 7958 - DNA, 6000 bp, Homo sapiens
caatgcctgtactcccattgtatctaggaagtaactaacttgcttttgattttacaggctcataggcaaaagggacttgccttgtttcagatgagacttgggcttttgagttaatgctggaatgagttaagactttgggagactgttggaagagcatgattgtgttttgaattgtgaggacatgagatttgggagaggccaggggtggaatgatatggtttggctgtgtccccacccaaatctcatcttgaaatattattcccataattcccttgtgtcgtagaaggtaccagatggagacaattgaatcatgggggtggtttccgccatgctgttcttgtaatagcggatgagttctcatgagagctgatgcttttataaggggcttccccctttgcttggcactcattttcctccctgccaccgtatgaagaagaatgtatttgctttcccctccaccataattgtaagtttcctgaggtctgccaagccatgctgatctgtgagtcaattaaacctcttttctttataaattacccagactcgggtacgtctttgttagccacatgagaacaaattaatacagcattcttgcctgacagtttctttctttcagcactctgagtatatcatcccattctctcctggcctttaagttttcttctgtgaaatctattgttagtctggtaggggttttcttatatgtgactagatgtttttctctggctgtttatagaattctgtctttgtcttttattttttacagtttgactataatgtgccttagagaagtccttttggcctgtatctatttgggattctctgagcatcctatatttggatgtctaaatcttcctaggcttgggaagttttccgttattattttgttaaataggtgttctatgccttttctctctgatacacccaaaatttaaatatttggtcaccttatgatgccccatatattatataggctttattcattctttttatgctttattctctttttgtttttatctgactagattatttcaaaagacctgtcttcaagttctggaattatttcttctgcttcatctaatctttttttttttttgtagctctcaactgtattttttatttcactcattgaattcttcagttccaggatttccgcttggttcttggtaaataacttctatctctttggtgaatttctcattcatattctgaatttttttcctgatttctttgaattttttattttttgagatgggggtctcactatgttgctcaggctggcctagaactcctgggcttaagggaccctcctgcttagtgaggattataggcatgcatcaccaaaacactcaggtagtctttgtattgtttatccgtgttctcctgtatctaattgagattctttaggttcattattttgaattattcttcaggcaatttcacaaatttcgttttcattggaatctgttactggagaattattgtgttccttctgaggtgtcatatttccttgccttttcatgtttcctgtattcttacattgatatctatgtatgtggtgtagcagttgcttcttccaattttttggattggttttcataggggaagactttttgctgttgatgtatctatggtgttggttgggtaagtcactttagctttgactgggtgcatgcagcagtgtagtctctatatgatttctttaaccataaacatcatgagtggtatctgtaaattcctcagcatcttaggctgcagttgttagcagaggctacaatgaggctttgctggggataggggtgccatgtgagccagtccttgggtcccagtggtggcagcggcaggctgggtgtacctgtgcctcggcccctgggggggatacacagatgccagtagtggtgaacaaagtgaggtgaaccccagatcttcagagagcacgctttggtgctggtggcagttgttctgggcctgttttttgagatagagttttaccttttagcccaggctggagtgcaatggcacgatctcagcttactgcagcctctgactcctggattcaagggattctcctgcttcagcctcccaagtggctgggattacaagtatgcaccaccacacctggctaattttgaatttttagtagagatggggtttcaccatgttggtcaggctggtctcgaactcgtgacttcaggtgatccacccaccttggcctcccaaagtgctaggattacagccatgagccaccatgcccagcctgttctaggcctgttgttaggtctcctgatggtacatgcatgtgcctagggtgactgatagagcagagcaatccccaggacccctggtagtgtgcttggccacctggaggacagtgccaggccatgcaggcctgtcctcaggcccccccagtggcattcatgcatgcaggctgtgacgggaagggaaaggcactgtgcttgggtggtggtggctgcagtggtggtggatgggaagagcctgtcctcatggtgtctgcaggtgcaaggtggccctgctgctaggagtgggggtttgctgtcaatggcagcagccccaggaaggtgtctctcaagttcttgggactttgtctacctttgtcctggggacaggctccccactgtgctccactgcgctccactgcctgttccctggtacgtaagacattatgtgggctgcagcgctggggatcctgctacattcctgggtccaactactgtggcactgcggtagtcttctggatggatctgaagggatatcagttggactccatggacaaggagatgcaggggctgttgggtcccagggcaggatgtagtctggtggggactggcttctccaaatggcactgtgctgcaactacctgtgtgttgggggatgtgtggaacccagagtcagctccctctctggagtaatgttgtcacatgaactccaagcagcaccttatactggtctcatggcccatgagggttgaggagctctcccacagctaggatttcaggagttcatggtgggaatgtgcactgcaggggatctctcacttaccctgttcctgcactgggaaccccccaacctggtgctcccagctgatccaggctgggccagctgccttgtttccctccttccaggccacagatgtttcctatcacttctctgctgaattccagtgttttctcttagttgctgtattcaaagtgtgattatctacccactgtttaattcttctttggggaggaggtgagtgccagatgcctccaatctgccatgttgaactgcctctgtatttctcatttttaaattgatatataacacatttacaacacagtacacaagtcttaaatatatagttcaagagattttgacatatgggccaggcacagtgactcacacctgtaatcccagcactttgggaggccgaggagggcagatcacttaaggtcaggagttccagaccagcctgtccaacatgatgaaacccgtctctactaaaaatacaaaaaaattagccaggcatggtggcatgcacctgtaatcccagctgctcgggaggctgaggcaggagaatcacttgaccctgggaggtggaggtcgcagtgagccaagattgcaccactgcattccagcctgggcaacacagcgagactccgtctccaataaataaataaaaatacaaaaattagccagatgtggtggcgcacacctgtagtcacagctactcgggaggttgaggcagaagaatcacttgaacccaggaggcggaggttgcagggagcccagatcagccactgcactccagcctgggtgacagagcgagactctgtctcaaaaaaaaaaaaaaaaaaagaaagaaagaaagaaagagaagaaattttgacatatgaattcatccatgcagccacttctcagaaaaaaatatggaacattgtcagcagaaaatttccttctaccccattctggtcagtttacacccactccttccagaaagcccccaatttgagtcccatcaaaggttagttcttctgcctattcttgaaattcatgtaaactcaaaatcttacagaatgtattcattctgtttgggtttcttaactcttgtgagattcatccaaattgttgtttgtatcagtactttgctttttcattactgtatagaattccaccctctgaatatgccatgatatttgttttcattcacctgctggtggccacatgggttgttccaatttgggttgggatagtctaactaaagttactataaatctttctattttgcccttgatgttattagaccctctttggttaactgggtggagtgtggaggaaaactgcctggattcgaatctcagctccaccatttaccagctgtgtgaccttgggctagtttcttaatctcgcagtgcctctattttcccctatctgtaaactggaggtcacatgatctactgcagggtaggaaagttaaatgaaggagttttataaagctgttggaaatgtgcctatcataggtatgaaataaacaactatcgttcatctccaactcccaaaaacaaaggaaattcccatgaatgagagcatccgcagaccaaaagagcagatcctggaggtcagagggcatggtggttccaggaactaggcggtactgcctgcccacccctgccctacgtagggaggcataacaaagtcgctttccattagaatgaattgaattttattaaaagcatcccatcgctcaaccatgtcatgagtggaggagtccttctccctgtcaaccccagaccatcccccaacacctccctgaaattcctgcaaggtcaggccgatctcaggctctgactcctttcactagcctttctggtgatgtgatcttacccagcttcctgtttgtcttcctgagagacagtagatttagaaagtgaggatcagagggtggaaaataaaagctgtggtccccaggagtcctgaacatctggggacagcgggaaaacatgagtgactccaaggaaccaagggtgcagcagctgggcctcctgggtaaggctgggttggaactctgggatcctgggtaaggggaagggatggcccaggctctgagctgatgtctgtcaattcagaagaagatccaacaaccagtggcatcagactttttccaagagactttcaattccagcagatacatggccacaagagctctacaggtaggcaagagttagggagcagatagtggaagacagagcctcccagacccctgggtcctggggaggtaggtgttggggtctggaatcctgggttctggggaaggaaggtctgagacctgggttcctgggtcctgaagaggacggggtagggatctgaactcctcacacctggggaggtgggggttgaggcttgggttcctggggcctggggaggtgggagaggggttctggactcctgggacctacagaggtgggggttggaagctggacacctgggtccatgggaggtagggactggagcctggactcctggaaccagaggaggtgggagaaggggcctggattcctgggtcctggggcaggtgagaactggggactggaatcctgggtcctggggaggtgggagctgggaccagattactgggtcctggggaaggtgagaactggggcctgaattcgtgggtcctggggaggtagaagcaggtatctgggttcctaggacctggggaggtgggagcttgggcctgggttcctcctgggacctggagatgtggaggctgggacctggatgcctgagtcctggtgttgcaggataatttaggaatcacagagatcaaggggttgaggaggatttattattattattattatttaggtgcaccagcccagtcagattaacatccaaaaagactgagccccaaacaaagagtcaagttaccttttaagcatttcatggggtagggggagatctgtgcagggggaagcatattacagaagcgagaaacaaaga

SEQ ID NO: 7959 - DNA, 6000 bp, Homo sapiens
gaacccgggaggcggaggttgcagtgagctaacaccactgcactccagcctgggcaacagagctagactctgtctcaaaaaataaaataaaaaagatgctaggccgggcgcggtggctcacacctgtaatcccagcactttgggaggccgaggcaggcggatcacctgaggtcaggagtttgagaccagcccggccaacatggcaaaaccccatctctactaaaaatacaaaaattagccaggtgtggtggcacgtgcctgtaatcccagctactcagcaggctgggagactcacttgaacccagtgaggttgcagtgagctgagattgcaccactgcacttcagcctgggagacagagtgagactccatctctcaaaaaaaaaaaaaaaaaagcttatttcagcatgtggttgcaaacatccccagggcacagatcccaagaaacctctcagaagacaggaagtaggccaggcatggtgcctcatgcctgtaaccccagcactttgggaggccaagacggtaggatctgcttgggcccaggagtttcagaccagcctgggcaacatagtaagactctgtctctataaaataaataaataaataaataaataaataattcagcagatgtggtggtgcatgcctgtggacctagctacttgggagggagggtgaggcaggaggatcacctgagcccaggagttcaaggctgcagtgagctaggatcatgccactgcatgccagcctgggcaacagagggagaaaaaaaagaagaatgaagaaggaggaggaggaaaggagaaggagaagaaggaggaggagaacagaaagtggaggaggagaaggaggggaaagagggaggaggaggaggggcaaagaaaaaggaaaggaaagaaagaaaagaaaggaaggaaggaaggaaggagagaggagggggaggaggagggggaggagaaggaaggcaaggaggaggagagggaggaggagggggagggggaggagggggaggaggaagatgggagggggagggggaggagagggaggaggaagatggggagggggaggggaggaagggggaggagagggaggaggaagatggggagggggagaggaggaggggggaggagagggaggaggaagatggggagggggaggggaggagggggagggggagggggaggaggaggaggagaaggcgaaggcgaaggcctagtgcagtgactcacacctgtaatcacaacactttgggaggctgaggcaggagttcaacaccagcctggccagcatggcaaaaccctgtctctactaaaaatacaaaaattagccaggcacagtggtgggcgcctgtaatcccagccactctggaggctgagttaggaaaattgcttgaacccaggaggcgaaggttgcagtgagcccagatcgtgccattgcactgcagcctgggcaaggactccatctcaaaaaaataaagaaagaaaaagaaggccaggtgcgatggctcacgcctgtaatcccagcactttgggaggccgagacaggcagatcacctgaggtcgggagttcgagaccagcctgaccaacgtggagaaactccatctctaccaaaaatacaaaattagccgagtggtggcgcatgcctgtaatcccagctactcgggaggctgaggctgggaattgcttgaaccccggaggcggaggttgcggtgagcagcgatcacgccattgcactccggcctgggcaacaacagcaaaactccatgaaacaaagaaggaaagaaagaagaaaggaaggaaggaaagaaggaaggaaggaaggaaggaagacaggaagagtcactccaaaggagagacaacctttctcacaggtcccttcctcaaagcggtcttcaaggaaccccttgtcccttgctaccgcttcaccttgctttgttatatatacaacatttgtcacaaactggcattaccttgttcttccgtttgtcttttgttttgttttgtttttaaaagccaggttctgagctgccacccaggctggagtgcagtggtgcaatcatggctcactgtagcctccaactcccaggctcaagtgatcctcctgtctcagcctctcaagtagctgggaccacaggtgcacaccatcacacccagctcatttttatttacttatttatttatttttgagacggagtctcactctgttgcccaggctggagtgcagtggtgcaatctcggctcaccacaacctccgcctcctgggttcaatcgattctcctccctcagcctcccgagtagctgggattacaggtgcgtgccactacgcctgactaattcttctatcatttttatttattttttgtagagatgggatctcactatgttgctcaggctgatctcagactcctgggctcaagcgatccacccaccttggtcagcctcctaaactgctgggatttaaggcgtgagccaccccacctggtctcctttattagtttacttagtgtatctctcccacccactaggacagaagctctcagagagtagagagccttgctggtcttgtcctgcaaggaagctgcagatgccgacagacaacaggtgctcttaaagctctactaaatccaaaaggaagttttgtctttggactccctgtggcggtgcccagaaggtccctgacttacaagtttccaaccctagaggtttccagtcgcaggcccagacctggtcaatgtcagggcttttttttttttcttttttcttttgagacggagttttgctcttgttgcccaggctggagggcagtggcacgatctcggctcacggcaacatccgcctcctgggttcaagcgattctcctgcctcagcctcccaagtagctgggattacaggcttgtgccaccacacccagctaatgttttgtatttttagtagagatggggtttcaccatgttggccaggctggactcgaactcctgacctcaggtgaatcacccgagtcggcctcccaaagtgctgagattctaggcatgagccaccgcgcccggccaagtcaaggcttcttttaccctgtcagggagaactctccgtctcccatcctaagtccaggtaggaacatttccatggatggtttggttttgttttgttttgttttgagatggaatcctgttctgtcgcccaggctggagtggggtggtgcaatctcagttcactgtaacctccacctcccaggctcaagcgattctcttgtctcagcctcccaagtagcacaagccaccacacccagctaatttttgtatttttagtagagacagggtttcaccatgttggccaggctggtctcaaacgcctgacctcaggtgatccaccctcctcagcctccgaaagtgctagattacaggtgtaagccactgtgaccagcccaagcctacagcacccggtattcctaggtggtctcccatccaagtactaaccaggtccgacactgcttagcttgcgaggtgagacgaggatcagatgcttttagggtggtatggccatagatacatccaaggtttttcttttcttttctttttttatctttttttttttttttttttttgagatggagtctcactcttcgcccaggctggagtgcagtggcgcaatctcggctcactgcaagctctgcctcctgggttcacgccattctcctgcctcagcctcctgagtagctgggactacaggcgcccgccaccacgccctgctaatttttttgtatttttgtagagactgtgtttcactgtgttagccacgatggtctcgatctcctgacctcgtgatccacccgcctcagcctcccaaagagctgggattacaggcgtgagccactgcacccggcctccaaggtttttcagacggagaacagatcaaggtccacctccacagatttgctcatctaagacccagctcaggcctcccaagtggggcggccagggtgggggtggggaggcagagaagctgggccccccaggacttcggagctgcttgtgccccactccccacctggagggcagaccacagtgttgggcagggacagacaggagggcatccccactctactcaacttccgttggttcagcccagttcccgcccatggccagagcttgaagggagaagccgtcccctccccgtcctctcctcccgcaactccactcccagcacctgaaaactgcagtcacctgtgccttggctgggctttaaggccaggtgactgggccttgcggggttagaaggagcccttccgcacttcctctttttcttttttttcttttggagacagggtccttcttggtggcccaggctggagtgcagtggcatgatcgtagctcgctgcagcctctcaacttcccagattcaggtgatccttccacctcggcctccagagtagctgggactacaggcacacaccaccacacctggctaatttttaaaattttgtttttgtaggttttaaaattttttgtagagatgtggtcccactatattgctcaggctggtttcaaactcctaggcccaaggtatcctcctgcctcggcctcccaaagtgttggattacaggcgtgagtcacagagcccggcctccacattttctcgacagggtccgtaagacctggttcccagaaaggtggccgtagaatggctttgggagttcagcgtccccagctccctcagtttccccagctgccagggtccagccagactgcaaagttgcaaagttctaagacccctgcatctcccgccagccccgagcccaccagggcaaagcagcctaagacggctgtcttcccccaaccctgctgatcgcgcggcgcctggagtagggtcgacctgggcgcgcctgcggcgaggcggggccgagtcgtccgggggcggggcggggcggctccgggtctcctgtccccgcctgccctgactcaccctcgcggcccgcccgggaactctgcgggagtcgcggcagctccgctcccagagacccaggagttgggcccagcgtccctcccggaacggtgagtaggtggctctttgcctctggacaccccacgaggtggcagggtgggggtcgggctgggagtccccgggtctggacaaggggcagagccgctccaggtgcgccggccctgtggccggggcaggccgtcccgacacaccaggagctggggtgggggtgccggccggtgcaaagggaaacctggcccacgaggtgcccgtcctgggagccaggcagacgcggccaagtctcagagtgaagataaacaggctgaagataaacttgactttgggggtctcaaccactttcccctccccttggcatctgggaagacattgacaactcatccccgggagactctcagagctccagaacctaccacttggggtgggttcaaccaagcctgacctctggtgctcttgaacttacacatgtcccagatcttcaagtctgctggcagaggcggcttggaaaaccactcggctgggaatccgcaggcctggggcctgacccaggacgggctacaaagatgccaccctcccccaccctagaccctcagtttctcccttgcataaatggttgaggctcagccggacaccgtgccttacgtctataatcccagcactttgggaggccgaggtgggcaggtcacctgaggtcaggtgtttgagaccagcctggctaacacggtgaaaccccatctctactaaaaatacaaaaattagtggcgtgtccctgtagtcccagctactggggaggctgaggcttgagtactgctcggacccaagaggtggaggttgcagtgagttgagattgggccactgcactccagcctgggcaacagagcgacactccatctcaaaaaaaaaaaaagattgaggccaggcacagtggctcacacctgtaatcccagcactttgggaggctgaggtgggaggattgcttggactcagaagttcaagaccagcctgggcaa

SEQ ID NO: 7960 - DNA, 6000 bp, Homo sapiens
tttgagacagggtctcgctctattacccgggctggagtgcagtggcgcaatcatggctcactgcagcctcgacctcctggactcaagtaatcctcctgactcagccttccaagtagctaggactacaggtacatgccagctaattcttaaaattctttaggctgggcgtggtggctcatgcctgtaatcccagaactttgggaggcgggcggactacctgaggtcaggagtttgagaccagcctggccaacatggtgaaaccccatctctactaaaaatacaaaaattagccaggcatggtggtgcacccctgtgatcccagctgctcctgaggcagtagaatcgcttgaacccaggaggcagaggttgcactccagcctgggtaaccaagtgagactccgtttcaaaaaagaaaaaaatgaaaaacctcttgggctcaagcgatcttcccaccttggcctcccaaagtgctgggactacaaggcttgagccatcacagctggcctaaaatgggaagtttaagtgcacctgcttcacagagagggccggtcatatccatctttttacatcactttgcacaggccctggcactgaccaggttgtcactgctccaggacaaggtttgccactgccctctcctcacccagggttctagggctgtgattccactcaaccactaggaacctcaggtgggtgcagggcctggcttggcaggagacatcatcaatgagaaccggttagcctgcttgctggactcatgctgggttgccaagtgccctgggaagctgggcaggggacaggtggcaggtgggagagatcaggtgccaagtacctattcgggtagatgaggatatttaggcatggagcaggggggacccttggagaaaggcgagcagaggaggtggccctcactgccaccactagcctcccctcatcgcctgagttctggtaattttacctctaaagccccctggaatccctccctcttctcctattcatcacccccgaaccaggccccaggtcctcccatccagctgcccacggtagagtgacaccttcccagcctcccactctgttctttcctaattttaagtccaattgttggccaggtgcattgactcatgcccataatcccttgagggatcactcgaggtcaggagttcaagaccagcctctccaacatggtgaaaccccgtctctacaaaaaatacaaaaattagccgggcgtggtggtgtgcgcctgtaatcccagctactcgggaggccaaggcaggagaatcacttgaacctaggaggcagaggttgcagtgagctgagatcgtgccactgcactccagcctggatgacagagtgagactccatctcaaaataaatcagtaagtccattggtgcctctccctggagagaacccaggagggcttattgtggctgggccagccctgctgtcctcccaggaaacttcctctcagtatagttcccccacccgctcatttctcagggctcagatgtcacctcttccaggaagcctgccttgaacacccactcactctcaagcttggggtccggcctgagctccatggtcagggatcggggtggaaggtgaggacaggcgagaagctgcccaactgcagaaggtgcagcctgggtcccttcctgcctggctgaccccaggtgtcttcctccagcttcccaacctttgccccatgtggtaccttccacctgaaatctctctccagccctggcctgcccaggtcctcttttgagctcccctactccacttctccggagtcctggggcttctccactggggcgtggactccaccattccaccatgtatcctgtattatattatcgttattgtttgtagataccggggtctcactatgttgcccaggctggtgtctcttttttttttttttaattgagacaggatctcactctgttgcccaggctggagttcagtggcatgatcatagttcacctcagccttgacttctgggctcaagtgatcctcccacttcagccttctgagtagctgggactataggagcacaccaccacgcttggctaatttttgtatttttggtagagatggggctcttgccatgttaccgaggcttgtctcaaactcctgagctccagcaatccactcacctcagccttccaaagtgctaggattacaggtgtgagcgaccaagcccggtcatatattattattaatacaaacaaatgccatgctctgagcaccctggagtatgcgacatgtgatattcaataactccctagtcacaacaactgagaagagttgctttattatctttcttttccaggtgtgcaaacaagctcttggagggaaggagaggagaaaataaacaggtgaatatggtgggggtggggtaaagcaggcaatggaggaaggaggaggggactgaggctcagggagaagtatgtatgcatttgaaaagggaaagaggctggggcacagtggctcttgcctgtaatcccagcaccttggaaagcggaggcggaaggatcacttgagcctaagcgttccagaccagcctgggcaacatagcaagaccccacctctaccaaagtttttttttttgttttttttaattgagacagagtcttgctctgtcacccaggctggagtgcagcggcacgattttgactcactgcaacctccgcctcctgggttcaagtgattctcctgcctcagactctcgagtagctgggattacaggtgcgcaacaccatgcccagctaactttggtatttttagtagagaaggggtttcgccatattggccaggctggtctcgaactcctgacctcacgtgatccacctgcctcggcctcccaaagtgctgggattacaggcatgagccaccacaccctgcctaccaaagtttttttatttaaaacaaaaaaaaattagccgggcatggtggcaggcatctatagtcctagctcctctggaggctgaggtgagaggactgcttgagccctggagtcccaggctgcaatgagctgggatcatgacattccattctagcctgggcaacagagtgagactcccatctttaacgaaattttttttgatagagtctcactctgttgtccaggctggagtgcagtggcacgatctccacgcactgcaacctctgcctcctgggttcacgtaattctactccaggctaatttttgtgtttttagtagagatgggattttgccacgttggccaggctggtctcaaactcctgacctcaggtgatccacccgcctcagcctcccaaagtgctgggattacaggtgtgagccaccgcacccagcctctaacagatttttttaaaaaaagaaaagagaaggtcgggcatgctggctcacgcctgtaatcccagcactttgggaagccaaggctggtggatcacgaggtcaggagtttgagatcagtctggccaacattgtgaaacccccgtctctccaaaaaaaaaaatatatatatatataaattagccgggtgttgtgggcgcctgtaatcctagctactcgggaggctgaggcaggagaatcgaatgaaaccaggatgcagaagttgcagtgagccgagatcatgccattgcagtccagcccgggccacaatgcaagactccgtctcaaaaaaaaaaaaagaaaaagaaaaaagaaaagagaaacagtgtagcagagggaaggccaagtgcaaacgccaggagtctgaacttggagggacaggttcttccacacttgcaacagaggtctcctgcctccctgaccgccccgccccccgcgcccctgtctgtgtgaggaaatcaaatctcagcttgcctagggccctgtggcagggaggccccaacttcaccccatgggtcttgggtctgctgagctgagtcagagaaaggtttattatccccattttacagaggcttattgtccaaaggcgaagccacttgcccagagtacatgcggtgggccagcgactatgaaaacccctggggctgtcctctgttcagggatcgcccaggctccctgcccctgcgcgctgctgagactgggtcattttcggttctaccaggcaagcgggggacccagcccccactgctgctgccctcagccaaaaccagggctgcgccaccacccacccggcctatctcccatcttatctccccagctctgtcgcctgacccctgcaccccaccaaatcgcagcctttgcccggtgccctcaccgcctcggttggcccccgcgcgcgcctcgggcgaacccctggactggccctccaacagggccccagactcggggtacccagggtggccgctgaggcctggagaaatctgggcctcccctgtgcaccatccaactgcgcgccccagaggctcagggcgccccgggagtgtgggggtgtggacagatgagcagagccagagcatctcgggcagaagaggggacctgggagggggccggggagacagacagcgaacaggggtgaagccggggccggacggagcgcgcagcggacaatactgggttcaaaggggagagataaggcgcagactagaaacgctaggctggacccgggccaggcgcgccgcggggcagagatgggcggagcgggaacgggggcgggggcgagaatgggggggcggggacgggggcggggatggggtgcgggtgcggggtcgggggccagggagaggcctagttgcgtcgaggggggcaagcgcctggaggacccggcgcccgctccaggccctgcccctccaagtcccccgccccgcgccaggccccgcctctccagggccccagccccgcgccaggccccaccgttccggggcgcgtgccccgcccaggccccgcccccacggccccgccccgggctccccccactcaagccttttttcccctgctgggggccgaggcccggccaggagcagagtccggctgcctggggcgggcggcgcgtgtctgcagctgctccgggtagcccgctaggcgcgccgtccccagccccgccgccggccctcggtgcgcccggccgcctgcacccccaggtaagcgagcaccccgcgccgcgaacaccgccccgaacgccaccctcacggcggtccccggccccgcctccgcggccatggcggccccagcccggcccccactcgcagctgggctccagcccccatcaccccgccggggactgtccccctcggggcttcccatcatggccgtctccccgagctatccgcgctcccccacgagggccggggcgcaacgggtgcccgaggacgcggctgtgaaacgggctggagcgagtaggggcgatcctggcctcgtgacgcgggggaatccggatgtgtgagccgggggagcgccccgtttccccgacgtgccagggctggggacgcagctggggccctggcctcggagtccgcagcccggccgcgtagacggcttctgagaaccgcttaaacacgtcattccaagcccgagctaacccatcaggcggccggggtgaggtggaggtgcccaggcggggataatgtcatttggcctggttggaccagccagcgagggctttttaggcccagggcctagccgggagtgtgtgcggagcagaaaagaggccagcctggctgaaacgcggagagggagggtctgaggtggagagaggttggccggggcctgggaagcggcgaggagagtgtggaacccgttctcggggcggtggggaccagggaggcttggaacagcaggtgcatggcgtgatcggattgtgtcttaagaacatcccgtagccgctgtgggtaggagagatggggatacttggaagggggcttctggcttgacctggctggaaggtgtgataggaagtgggtgaactgaaaattcgctttggcagagtaacatcgtctaattctgtctgtttgcaagtggagcgtgggggaccgatgtttctcctgggtagttaggagtatatagaagaggc

SEQ ID NO: 7961 - DNA, 6000 bp, Homo sapiens
atttttgtatttttagtagagacggggtttcaccatgttggccaggatgatctccatctcttgacctcgtgatccgcccgcctcggcctcccaaaatgctgagattacaggcgtgagccactgcaccgcccagccaggttacttttttttcctttgagacgggtcttttttttttttttttgagtcagtctcattctgtctcggctcactgcaacctccacctcctgggtttaagtgatcctcatgcctcagcctcccaggtagctgggattacaggcatatgcccagctaatttttgtgtttttagtagagatgggatttcaccacattggccaggctggtctcgaactactggcctcatgtgataaacctgctttggcctcccaaagtgctaggattacaggtgtaagacaccgtgcccagccttcttttttttgttttcttttttgtgtatttatttatttatttatttatttgagacagaatggctctgtcacccaggctggagtgcagtggcacaatctcggctcactgcaacctctgcctcccaggttcaagcaattctcctgtctcagcctcctgagtagctgggactacaggtacacaccaccatgcccggctaatttttgtatatttattatagatggggtttcaccatattggttaggctggtcttgaactcctgacctcaagtaatccacccacctcagcctcccaaagtgctaggatcaggaatttgacaccatcctggccaacatgatgaaaccccgtctctactaaaaatgcaaattctagatgggcatggtggcaagtgactgtaatccagctactcaggaggctgaagcaggagaattgcttgaacctgggggcagaagttgcagtgagccaagatcgttccattgcactccagcctgggcgatagagtgaaactccatctcaaaaataaataaataaataaataaataataaataaataaatgaaattatctgccaggcacagtggctcacgcctgtaatcctaccactttgtgaggccgaggcaggaagatcctttgagcccaggagctcaaaactagcttgggcctcatagcaagccccgtctctattatttaaaaattaaggccaggcacagtggctcacgtctttaatcccagcactttgggaggcctaggcaggtggatcacgaggtcaggagtttgagaccagcctggccaatacggtgaaactccgtctctactaaaaatacaaaaaaactagctgggcatggtggcgtgcacctgtattcccagctacttaggaggcggaggcaggagaatcgcttgaacccaggagacagaggttgcagtaagccaagattgcaccactgcactctagcctgggcaatagagggagactccatctcaaaataaaataaaataaaaaattggctgcgcgcggtggctcaggcctataatcccagcacgttgggaggccgaggcgggcagatcacgaggtcaggagatcgagaccatcctggctaacatggtgaaaccccgtctctactaaaaaatacaaaaaaatcagccgggtggggcggcgggcgcctgtagtcccagctactcgggaggctgaggcaggagaatagcgtgaacccggcaggcggaggttgcagtgagccgagatcacgccactgcactccagctgggcgacagagcgagactccgtctctaaataaataaataaataaataaataaataaataaataaataaaatatcattcgccactaaaatgaaccagggctcttcggaaaaatggttgagtccaggcctggggcaggcaaaagacaagacaagtcagcctggaagagtttgttgagccagttagtaaggaaatgccccaagatggaattagaaaatcaccatttggggccgggcgcggcggctcacgcctgttatcccagcactttgggaggccaaggagggcggatcaccaggtcaggagatcgagaccatcctggctaacacggtgaaatcccatctctactaaaaaaaaatacaaaaaattagccgggcgtggtggcgggcgcctgtagtcccagctactcggggggctgaggcaggagaatggcgtgaaccccggaggcggagcttacagtgagccgagatcgcgccactgccctccagcctgggcgacagagcaacgctccatctcaaaaaagaaaatcaccatttggttgctattatggtaataactgactcaggcaagggtcatcaattgatattaagctcttggaaacggcgtgtgttgaggaacaggctatttaattactttcgaagtatctccccagaaagcacttattaacaaagtgtaaagtcaggtgccgtggctcatgcctgaggttaggaatttaagactagcctggccaacatggcgaaaccccatctctactaaaaatacacaaattagctggacgtggtggtgcgggcctgtaatcacaactactcaggaggctgaggcaggaaaatcacttgaaccggtggcggaggttgcagtgagcagagagggcgccactgcactccagtctgggccacagaatgagactccatcgccaaaaaagaaaaaaaaaattggtcgggcgtggtggctcctgcctgtaatcccagcactttgggaggcggaagtgggcagatcacttgaagtcaggcgtttaagaccagcctgaccaacatagtgaaacctgcctctactaaaaacacaaaaattagctgggcgtggtggtgcgggcctgtaatcccagctactcgggaggtgagccaggagaatcccttgaacctgggaggcagaggttgcagtgagctgagaccacaccattgcactccagcctgggtgacagagtgagactctgtctcaaaaaaaaaaaaaaaaaattaaaattaaataaaatattaaaaacaacaacaacaacaaaacaccacagtgtaacatactaacctcacactggagaaactggcagacaccatttgaaccaagttagcacaatcgatagtggacaaaatcagcattgtatgcatcctgaaaacacaacgtcacatctgtttcctgccacaaatgcaaaatcatgagaaagtattagacaaatagcaatggaaggacttcctgcaaaattactagcctggaatttttgaaaaatattgatgtcatggagagaaggtaagattgataaaatgttccagaaagagagactaaattagagtcgttaacaacaaaatacaatgcttgatcctgggatggatttgggattttttgttttttgacacaggatcttgctctgttgcccaggctggaatgcagtggtgaggtaatggctcactgcagcccagaactcctgggctcaattgatcctctcacttcagcctcccaagtagctgggaccacaggaggatgccaccacaactggctaatatttttattttattttgtagagatggggtctcactgtgctgcccagactgatctcagactcctagacccaagagaccttcctgccttgggctcccaaagagctgggattgcagacatgactcactgtgcctggcctggactttggatttttaaaggactttattggaaacttttcttttcttttttttgagacagagtctggctgtgttgcccaggttagagtgcagtggcaagatctccgctcactgcaacctccaccttgcagattcaagcaattctcctgcctcagcctcctgagtagctggaattacaggtgcccacaacaaaacccagctaattatttgtatttttagtacagacagggtttcaccatgttggccgggctggtctcgaactcctgacctcaaatgatccaagtgctgggattacaggcatgagtcactgcacctggcctttgaatgggctctgggaattacatgataatattagatgaacattaattttctgattttgaaggttatactgtgattatgtgcaaaagtgtgcttatactaagtgaacatatagtgcagtatttttttaaaaattgatctgtcttagagatgggggtgggtgagtttactatgttgcccagactggcctcgaactcctgggctcaagtgatcctcttgcctcagcctccagagcagctgggactacaggcctgggccaccacacttggctaacttttattttattttattttattatttatttatttatgtatttatttgagacagagtctcactctgtcacccaggctggagtgcagtggcgcgatgtcggctcactgcaagctctgcctcccgggttcacgccattcctctgcctcagcctcccgagtagctgggactacaggcgcccgccaccacgcccggctaatttttttgtatttttagtagagacggggtttcaccgtgttagccaggatggtctcgatctcctgacctcgtgatccgcccgcctcggcttcccaaagtgctaggattacaggcgtgagccaccgcgcccatccttttaaattttttgtagagacgggaactcaccatgttgcccaggctggtccccaacatctggcctcaagcgatccttccgtctcggcctcccaaagtgctccgattacaggcatgagccactgcacccggccagtctcaaaaaaaaaaaagttaaattctgcagaggttttatttattagaggacgctggccgtctgcaggtggcgcagcagcaccccctcgtgcctggggcggggctggggcggggccagtgctggggcggagccggagctgggggcggagccaagacgcggcaggggcggagccagcagctgcggcacagcggggcctgtgcggcccaagtcgtccctgtggcctccggccccgcctcttagggcgggacgtgcaaggcgattggcgaatgcaggcgagaggcggtcgctattggtccgcggcgctgtcggctcggcgggcggtgcccggacgcaggtgccggccggagcggagctagtggcgccgacgggccgggccgggccgggaccggggccgaggcgaaccgaggggcctgtgcggccgcccggcccggccgcggatcaggtaggcacgggcctgcaggtagggccggaggacgccagtccgcgggccggccccgggttcgaggccggagctcggcacccgggcgggacggctgggctcgatcccttggccacagccttctcggggacgcggggacctcagttcccgtgtcaaggccggtgggaggtctccggggtccggcacacataggcgcctctccgagcctcggtttccccacctgtgaaactgggtcatcccattgccaacctgatggggcttctgggaggattcaggaggtggctggtgcagaaaacgcctgacacacagtaggcaactgctaagtggccaatgcccttccccaacctccttctcagagcggctctgcctgcaaaatagtaagttataatataatgacccagccactttgcacaaagatgctgaaacaggatgccctgtgctatgtgggtgctcaaaacggggtagtcaaatgggcatgttgagctcattcagttcttttgaaaccatactgagtaggtggaagcagtagaaatgtcccctgttatacagttgagagagtccaggctcaaagaggttaagtgtcttgcccagggccacacagcacataaggagtagagctgggattggaaccttgcttctcatgcagggaggaatgaatgcaataacaacctccacatttaccctaaaaaatattaatagagcttttattgagcacttactgtgtgtgccagggttgactgtgtgacctctcatcaacaactctgtaagctgatgatagtaattataataagagctaatagttattaacttcttaattttttactaatttatgaactacatatcattatgactccccgtcttttttttttttagacagagtctctctctcttgcccaggctggaatgcagtggcacgatctgagctcattg

SEQ ID NO: 7962 - DNA, 6000 bp, Homo sapiens
ccagctactcgggaggctgaggcaggagaatggcttgaacctgggagacagaggttgcagttagctgagatcagttgcaccactgcatttcagactgggtgacatcgtgaaactctgtctcaaaaaataaaaaatagaaaaataaaatagacataagaacaatttcctcttactttgcatctgccagtccacagaccatgctggcctctgtttttctttttttgagatggggtcttgctctgtcacccagattggagtgcagaggcacaatcacacagctcactccagcctcgacctcctgggctcaggcaatcctgtctcagcctccctggcagctgggacaacaggcatgcaccactgcgcctagccactgttagtttttagttaagtgtagagagtccagcatgggccaggcctggtggctgatgcctgtaatcccagcattttgggaggcttcggcaggaggatcagttgagcctaggagtttgagaccagccttggcaacatagtgagaccctgtctttactaaataaataaatatataaatatatatatattagctgggcatggtggcatgcacctgtggtcacagttactcaggaggctgaggtgggaggatcccttgaatccaggagttccaggctgcagtgagctataattatacttctgttgtctattctaggcaacagggcaagaccctgtctctaaagcaaacaaacaattttttaaaaatggtgacaatatccacgctgacttagggtgactatagattaggcatagttccgagtctctccctcctttgactgtcacttgttagggaagaagtggttattacctacattttacaggtgagaagactgaggcccagggcagggaagccttaatctaaggtctcagagctgtaggaagtggagccggggtgacaccaggactccttttggaggaagactcaggaaagatgcagaatacgtgtttttttttttttttttttttttttttgaaacagagtcttactccatcacccaggttggagagcagtggcgtgatcttggtgatcttggcttactgcaacctctgcctcccgggttcaagtgattctctcttgcctcagcctcccaagtagctgggaccacaggcagctaagttttgtatttttagtagagatgaagtcttgtcatgttgaccaggctggtctcgaactcctgacctcaggtgattcacctacctcggccccctaaagtgctgggattacaggcgtgagccaccgagcctggcccagaatgcagttaatctaataacaacacctacttcttcagcgctttctgcctgccgattcttttatatttaaaggctcttggcatctgtctgcttttaaagctcagggcaaccctgaaaggtgagttctggtgcctttctttctttctctctctctctctctctctttcttttctttctttctttcgacggagtctcgccctgttgcccaggctagagcgcagtggcactatctctgctcactgcaacctccacctcccgagttcaagcaattatcctgtctcagcctcctgagtagctgggactacaggcgccaaccatcatgcctggctaatttctgtatttttagtacagatggggtttcgccatattggccaggctggtattgaactcctgacctcaaatgatccacctgactcggcctctcaaactgctaggattacaggcgtgagccaccgtgcccagcctggtgcattgcatttcttattatccatattttcagttaagcaaactgagcctcagagtggaggagctgattgctcaaggtctgttttccatatgaatccctgcctggtatgtagctcactcacaaaggaagaaaaactttctgcctggactggaagggcaaggagaagcctgtgtggccatgggagtggaggaaacagctaagcacaaaggcccagaggctggaaactgcttagcctgtaggaagagcagcagggaggaaccccagggctggagcagtgtgattgaggggcaggtggctggagagatgggcagggcctcctaggcatggggtgactgacgcaccagtggtctgcaaaaacggagcatcacaccagtgcgcatgagctctcctgccccttgggggggccttccttgctcctgcagctgaactccctacacagcctgacacccatctttcctcaggccaactttggcctgtggtgccccaggagttgatgtacagatgcctcaggacatgccatgaggaagagagagacgagatggggtgactcatgcctgaaatcccagcactttaggaggccaaggcaggaggattgcttgaaggctgggagttagagaccagcctggccaacatagcaagaccctgtctctacaaaaagagaaagaaacagagagagagagaaggaaaagtgttttctttgcaaatctattctaatactttcatagagaagagttttagtttggtgttaacctgtctttaataatcctctaaggaccagcacagtggctcacgcttataatcccagcactgtgggaggccaaggctgtaggatcccttgagctcaggagttcgagaccatcctgggaaaaacggcaagaccctatctgtaccaaaaaataaaaataaaaaattagccaagtgcagcggcgtgcacctacagtcccagctacttgacaggctaagcaggggaggatcgcttgagttcaggagttcaaggttgcagtgagctatcatttacaaaggtagattgaaatattattgataggctgggcacggtgactcacacctgtaatcccagcactttgggaggctgaggtgggcagatcacctgaggtcaggagtttgagactagtttggccagcatggcaaaaccccatctctactaaaaaatacaaaacttagccaggcgtcgtggtgtgcacctgtaatcccagatacttggaaagctgatgcagaagaatcgcttgaaatcaggaggcggaggttgcagtgagctgagatggtgccactgcactccagcctctgtgacagagcaagactgtctccaaaaaaagaaaaaaatatattattgataatcgctgcattgaaggccaggcgcagtggtttacgcctacaatcgcagcactttgggagcctgaggcaggcggatcacgaggtcaggagttcgagaccagcctgaccaatatgatgaaaccttgtctctactaaaaatacaaaagttagccgggcgtggtggcatgcacctgtaatcccagctactcgggaggctgagacaggagaatcgcttgaacccaggaggcggaggttgcagcgagccgagatggcgccattgcactccagtctgggcaacaagagcgaaactccgtctcaaaaagataatcgctgcatcttactgcccaagttgccacaagcacacgtaacatctgatggtgccaattcgactgtctgcacttggaaaatggcacattggaggctgcacagcaccataaaactgatgccacgaatgcacacaaaaataagaccatacagcattatgcctagtacagaatacaccctgaattctgtcacagttcactttatgcaacattgcaagagtcctctcgctctttattattatttttaatttttttgagatggggtctcactctgtgaccaggctggagtgcagtggcccgatcttggctcactgcaacctcctcctcctgggttgaagcgattctcctgcctcaggctccccagtagctgggattatgggcgcctgccaccacacccggctaatttttgtatttttagtagagacagggtttcatcatgttggccaggatggtctgatctcttgacctcgtgatccacccgccttggcctctcaaagtggtaggattacaggcgtgagctgccgcgcccagccattaattttttttttaattttgtttttaacttttaggtttgggggtaaatgtgaaggtttgttaaataggtaaacacttgtcatggaggtttgttgtacagattatttcatcacccaggtattaagcccagtactcaatacttatctttttgttttttgagatggagtctcagtctatctcccaggctgcggtgcagtggcgtgatctcggctcactgcaacctccggctcctgggttcaagcgattctcctgcttcagcctcccgagtagctgggattacaggcgcccgccaccacgtccagctaatttttttatttttagtagagacgcggtttcaccatgttggccagtctggtctcgaactcctgacctcaggtgatccgccgcctcggcctcccatacccaaagtgctgggattacaggagtgagccatcgcgcctggccccattattagtgaattttaacagttttccgtttcttctggacgaactgtttgcaattataatgcgaattacggataatactctgatattattccatgccgttccgttgttgcctacaaagttcgcgctggagaaccgcgcaattgcgttacaaaaagaaaaaaatcacacaaaaagacacaatgttttaagaaagtttacgaatcgtgtgccggaccgcgggttgaacaagcttcatctaaaacttccaggaatctctagacaggatcattgcttcccctctgctccagctctggttacagaaagctgagagtgactaggtctaggtgtttgtgtggggtggggtggggagatgcctcctctatcggactcagaggacgcgcgccgggaacagccagtcggtgcctaacgcgagtgtatctcgagagagaagcgatcaacagctgccggtctgcgcctgcgcgcggcgggggcgtggcccggggcgagtggggccaaggaggcagccgggagcggcgggcgcaggtgttactggttgcgtcgggtcacgtgggcgcgcaggcgcagcgcggtgcagcccgttcgctcacacaaagcccagacgcggagaaaatggcggcaggggtcgaagcggcggcggaggtggcggcgacggagatcaaaatggaggaagagagcggcgcgcccggcgtgccgagcggcaacggggctccgggccctaaggggtgagtatcccacggtcctttgccacgggtaagggttcctctccgcggccgacgcgggcggcggctccgttaggtctgttggcggcctagccccggcgcggcctcggccccggctgttcccgtaccgcctgctcagggtagcggcgtctagggccgtgagcggggagccgggggagcctccagaatcgtcccctacaccgggcctcgagcctcgccaccctcagtccctccaggccggggccaaccccgtagtcgaggcctcaggcccagctgctgcgcatgggggttgatggcgcgggcccggaccggagagcctccgaggcctacccgaccgctccccgggagggtgacctcgggggccgggtttcagccccccgtcccctctcctcccggggtctgttttctgatccgtaacgtggggggaggagagagggtgcgcgcccgggaggcctcgcgcgcagtcagcccgagtcaacggtaaccgagcgagggaagcgtcaggaagggccgcgaagccgggtcggggggctcccctcctgccccgccccttagtccccgcgcgccgaccgcgctccgcgggaagtgcctccctcggaaccgcccctcgccccacgctctggccctggctcaagtccctcgccgtttcccgctcctcctccccgggtgcgccgcaggtattagtggagagatgggatctgctgcttagcgttcaccctcggaagcagacagatacgaagtcgggggaggaatcccctttttcccgtgtttcggggaagctgttctgtcaggaggcgggttcatttacttccagacttcatcagcttttcgagtcctgcttggggctctttgactccttggcttttaaaagtttctttaaaggaggaagcatcgacttgtgc

SEQ ID NO: 7963 - DNA, 6000 bp, Homo sapiens
gtagctgcagtaatggctcccgctgtaaaactgtgggaggacttaagtctccccagctggaaaaaaagaccctcatggggagcatcatttctgcctttcagggcttttgctgggctggagtgagggcgcgcagcttgggagatagatagtcgcctaagcctgacagttaagactggaatctggagccgggcgtggtggctcatgcctgtattcccagcatttggggatgctgatgcgggaggatcacttgagcccaggaattcgagaccagcctgagcagcatggtgaaaccccgtctttacaaaaaatagaaaaattagtcggatatggtgttgcgtgcctgtagtcccggctactcgggaggctgaggtgggaggattccttgagcccaggaaattaaggctgtagtgaatcgggatcgtgccacttcactccagtctgggcgaccggaggagaccgtgttagaaaaaaaaagactagaatctggaggcagcaaagcagggttggaaactgacttctccccagtatctgatgcaagttacttaacctctctgggcctgagttcgctcatttgtcaatgggaagatgcgctgtgagcaagagacagagttagaactcaaatctgcgtccgactgactctaaaggctaagatccttttgctcctctgggcttgttgaaagggtcagatgcaagacagaccataacaggatctgcaccgtcagcttatagttgtcacaacaagggataagctatgttttctttttttctttttgtcatttccaggttcgtaagaagaactcgctgaaggactgcgtggcagtggctgggcccctcggggtcacacactttctgatcctgagcaaaacagagaccaatgtctactttgtgagtagacgccctcacccttcatctcccccagacccccccttcccctatctctcatgatgaacacatatgcctctgagctgctgtgatttctggcttcaaagtaaacgctctgaagaagagatggggcaaaggtgcctactccgggcacctctgctagacccctccagagtcactgatcttttcttctcctgcagaagctgatgcgcctcccaggaggccccaccttgaccttccaggtcaagaaggtgagaggggtggaggtggtacaaagccatgtggggtgggagctggacttggggttgtccgcagccatgtgtggttggtggtcaccccctcctctctcctgtcctacagtactcgctggtgcgtgatgtggtctcctcactgcgccggcaccgcatgcacgagcagcagtttgcccacccacccctcctggtactcaacagctttggcccccatggtatgcatgtgaagctcatggccaccatgttccagaacctgttcccctccatcaacgtgcacaaggtgggtctggcctggcgaggtggcaggtatgggggggtgcagcggatagaggtgccacaggccctcagatggattgctcactcctcccagcgctgagactgggagctcctgggtctgctgagtcctgaggtcaaatcccactcctgtgtctgatgatgctgggcaaaagtgtccagagattcccccagcggtccacaccccgtgagctgcaccttttccagccggtggaaagaaatactgatggagctctgtttcccacgtgtgttgagtgctgggctgagcaggatcgtagcatctcttcttagggccctgttttacagagggaagctgcgggcccagtgctatggcttcggcctgtaatcccagtactttgggagggcgaggtgggaggatcgcttgaagccaagactttgagatcagcctgtgcaacatagcgagaccccatgtctacaaaaagtagatttttaaaaagcccggtgtggcggtgcatgcctgtagtaccagctactggggaggctgaggtgggaggatcacctgagcccaggaggtcaaggctgcagtgagttgtgttcacgccactctactccatcctgggtgacaaagcgagacactgtctcaaaaaaaaaaaaaaaagcaaatctgaggctggcagagatgctaagtttagattccagggggcaggactggatttttaatttcatctggctcctgagtcctagctcctaatccttgtcactagtgactctcagatgggacttataaattatatataagatatcagtcatcagggaggctaatacggctctgggaccagaatttcttgtttaccttttttttttttttttgagacggagtcttgctctgtctcccaggctggagtgcggtggcacaatctcatctcattgcaagctccgcctcccaggttcacgccattctcctgcctcagcctcccgagtagctgggactacaggtgcccgccaccacaccccggctaattttttgtatttttagtagagacaggatttcaccgtgttagccagggtggtcttgatctgacctcgtgagctgcccgcctcggcctcccaaagtgctgggattacaggcgtgagccaccgtgcccggccttctttactttttttttaagagacggggtctccgtacgttggtcttgaactcctgggcacaagcaatcctgcagcctccgcttcccgagtagctgagactacaggcgtgcaccaccacatccaactcatttttccatctactttttgtagacatggagactcgccgtgttgcccaggctggttttgaactcctgggctcaggcagtcccaccacttcagcctctggagtagctaaaactgcaggtgcgagctggaagcagcatttctagccagtgccacagtccacgaacagtgtgtgtatcccccaaagcccccacttccccaaactttgccatgagtctactggactatgctctcttcctccccttccaggtgaacctgaacaccatcaagcgctgcctcctcatcgactacaaccccgactcccaggagctggacttccgccactagtgagtgtcccagcaggatgggagacgagggggtgccgggtgggggcctccacatgcggctgatgacagcacttctgctgagacgctgtgattgctctgtccaaagtaaacgccctgacgcactgtgggaagggtgagatgggcaccgccagccccatcacgtgccccctgaccacccccttgccgtccactcatgttcctgcagtagcatcaaagttgttcctgtgggcgcgagtcgcgggatgaagaagctgctccaggagaagttccccaacatgagccgcctgcaggacatcagcgagctgctggccacgtgaggagggcatagggcgggaggccactgcggcccggggaccccagaacaggaccgggagcctgagctcccccactgagccctgttatgtcctacacacaggggcgcggggctgtcggagagcgaggcagagcctgacggcgaccacaacatcacagagctgcctcaggctgtcgctggccgtggcaacatgcgggcccagcagagtgcagtgcggctcaccgaggtgaggcccagggcagggggacccccgggctccaccagtcccaacggtgggctgacgcttcttcctcgtcccctcagatcggcccgcggatgacactgcagctcatcaaggtccaggagggcgtcggggagggcaaagtgatgttccacagttttggtgaggccggggccgccgggggtggggggtcatgggtgtggagctgcacccggatcttggtgacccgcgtctcttggctcagtgagcaagacggaggaggagctgcaggccatcctggaagccaaggagaagaagctgcggctgaaggcgcagaggcaggcccagcaggcccagaatgtgcagcgcaagcaggagcagcgggaggcccacaggtccaggcagagctgggaagggcagggccaagggggggtccctgggatgggcggctatgttgacccccacgccctcctccagaaagaagagcctggagggcatgaagaaggcacgggtcgggggtagtgatgaagaggcctctgggatcccttcaaggacggcgagcctggagttgggtgaggacgatgatgaacaggaagatgatgacatcgagtatttctgccaggcggtgggcgaggcgcccagtgagggtatggagtggggtctgcagcagggcacccagagcctgtccttgtctctgggggccctgacactgtctctccccacagacctgttccccgaggccaagcagaaacggcttgccaagtctccagggcggaagcggaagcggtgggaaatggatcgaggcaggggtcgcctttgtgaccagaagtttcccaagaccaaggacaagtcccagggagcccaggccaggcgggggcccagaggggcttcccgggatggtgggcgaggccggggccggggccgcccagggaagagagtggcctgagcccaagccgcaccggagcagcggctggattgaacgccccagattggggcccgagatgtggccctcggtttcctttcataaaggagttgtgtccccagcccttccactccagtaaagaactgaattggccaggggtccacgtcagcgtttgggatgggggattctggagccatacaaagcaacccagagagtcctgggccggccacacccgagagtccctcccacctggtttcttcctggaagctgggtctctcccctaccctgcacggggttggtttcattggtggcagcagcagccatgagtggcccctccccccagtcccaccaaagagccgtgcaagcagacaggtcacactttcagcagatgagcttgaacctcaggagggttgtggcacaatgaggaaggaaacgtgggtggaaaggcacgctggcctgctctgctggctgggccagtaactggggatggggctggggcagggcccactaagccactggtgactgggggaggggctggggaactgggtagcagacacaggctgaggatcggcacgggagcatggcagccaacgtctcgggtaaggagaaggcatgttggctgtctctgggggtctgcagattgtcaggaggtgggggtagtgggtattggtaaaacacctaggtctggggctgggcacggtggctcacgcctgtaatcccagcactttgggaggtcgaggggggtggaacacgaggtcaggggttcgagaccaccctgaccaacaaggagaaaccccgtctctactaaaaataaaaaaattagctgggcctggtggcacatgcctgtaatcccagctactcgggaggctgagacaagagaatcacttaaacccgggaggcggaggttgccatgagccgagattgcaccattgcactccagcttgggcaatgagcgaaactccatctcaaaaaaaaaaagcctaggtcaaggctgggtgtggtgatgcgagcctgtgattccagctactcgggaggctgaggcagggggatcacttgaccccaggaggtcgagactgcactgagctgtgattgcaccactgcacctcagcctcggtgacagtgaaatcctgtctccaaaaaaaagccacgtctagacgacacttcctccttaagcaggctggcgttgggagcagggaggcgcctccggagaagcctgtccccagcctgcagaggcaggggtggggtgcacaaggagtgagtgcccctgtgctgctgtgccctgggcactgtggtgagcactggcaccagtaatgggtaagcaggcccccccatcctcccgaaggagggagatttttctcaccgtcatcaggtggcgcagggtatgggggaaaataacgcagggaagggagagtggaggcacgagggctgctgtcaacagtggttagggtggccttggggcctctcgcaggcaggaccacggacgtgggaagaggagcctcaagaatgtctgggtgtggctgggcacggtggctcacacttgtaatctcagcactttgggaggctgaggcgggcagatctga

SEQ ID NO: 7964 - DNA, 6000 bp, Homo sapiens
aggtgtgagccactgcacacggccttaaattttatttattatttatttatttatttatttagagacttagtctcactctgttgcccaggctggagtgcagtggcatggtctcggctcactgcactccacctcctgggttcacgccattctcctgcctcagcctcccgagtagctgggactacaggcgcccaccaccactcccggctaatttttgtatttttagtagagatggggtttcactgtgttagccaggatagtctcgatctcctgacctcgtgatccgcctgcctcggcctcccaaagtgctgggattacttattttgttttttgtagagacaggttctcactgtgttgcccaggctggtcttgaactcctgatctcaagtgatcttcccacctcagtctctcaaagggctgggattacaggggtgagccactgcaccccaccttccctctactttttgacggtttccttctgctatgaatgtgcatgtccagttgtctgcttcttagaactgatatttaccttcctcatccatcagccattggaggaggactgggaccgctcagattattgatctgacccattctttcggcagggtttcctggtggctgtcttccatcaccaaaactggaatcagaagagtttccatagccctttttttttccccacatctttgctgaagcagagttttgaaaaacaaaaccacaaactaagctattccccagaagaaatctgtaatcaaagataagctctgccgggcacagtggctcacgccttttggaggccaaggcgggcggatcacctgaggtcaggagttctagacctgccaggccaacatggtaaaacctcatctctactaaaaatacaaaaattagctagatgtggtggtgggtacctgtagtctcagctacctgggaggctgaggcaagagaatcgcttgaacctgggaagtagaggttgcagtgagccgagattgcaccactgcactccagcctgggcgacggagtgagacgacctcacaaaaatttacataaataaaatgaaaagtaaaataaaaatacaaaagttggccgggtgcgtttgctcacgcctgtaatcccagcactttgggagggtgaggcaggcagataatgaggtaagaagatcgagaccatcctggctaacacggtgaaaccctgtctctactaaaaatacaaaaaattagctgtgcgtggtgacacgcacctgtagtcccagctatttgggaggctgaggcaggagaatcacttgaacctgggaggtggaggttgcagtgagccgagatcgcaccactgcactccagcctgggccacagagtgagactccatcttgaaaaaaaaaaaaaatacaaaagttagccaggggtgttggtgggtgcctgtaatcccagctatttgggaggctaaggcagaagaatttcttgaacctaggaaacggaggttgcagtgagccgagatcacacctctgtactccagcctggacaacagagcgagactttgtctcaaaaaaaaaaaaaaaaaaaaaactaaataggccgggagcagtggctcatgcctataatcccagccctttgggaggccaaggcaggtggatcacttgaggtcaggagtttgagaccaggctggccaacatggtgtaaccccgtctctactaaaaacacaaaaattagccgggtctggtggcgtatgtctgtaatcccagctactcgggaggctgaggcaggagaatcacttaaacctgggaggcaggggttgcagtgagctgagatcgtgccactgcactctagccagggtgacagagtgaaactctgtctcaaaaaattaaaaaagaaattcagcaagtaatgagttaaggaattcgaatattaaggcgagtgacaaggaacgcccaggatgtggcccaggatggagtaggggggacactcatttaggagaaagctcaggccacaagacaggaggagccagccttgttggggttgaagggaagagcattccaggctgagggaactgcaaggcgtttgcatgggacactatgggatggcttctgcccttggtgggcagcctctggtctgaggccattctttggcctgcctgactgtctggcaaccgggaggaagccctgcccttcctggagacagaaacaaaggtctaggaaatatctgcttcccttttccttgaaaaacgcttaagggaacggaggactgggaggtgccgtctctctctgccagcctgccccctaccatagccatcccactcccatctcagaaagtgacccgccatcctccaaaaggctcggaccctgatcaaggagtcatcccccttgtcccagcacctccagttggcccagcctccaaaacggatgtcaaattcagccctttctccaaggacactgcccagtccaggccccactatcattcatctggactagaacagtcacctcctctcccatctcctggctgcagctcttgaagcctcaactgggcccctgtgaacacttgagttagggcaaggtccttcctctgctcagaaccctctatacctcccacctcgctgggcataaaagccaaagtcctggccaggcacggtggctcacatctgttatcccagcactttgggaggccaaggggggcggatcactagaggtcaggagttagagaccaacatggtgaaaccccatctctactaaaaatacaaaaattagctaggcgtggtgacgcacccctgtagtaccagctactcggtaggctgaggtgggagaatcgcttgaacctgggaggcagagtttgcagtgagccgagatcacaccactgtgctccagcctgggtgacagaacgagactggggttcagaaacaaacaaacaaaacaacaaagtcctcctcaggtgacaggaacttgcacctatctgccctgtcatctccctgcccgctcctctcctcgaatctctcctttgctaagcctgctccagccacactgttctcctggctgttcctttttttttttttttttttttttttttgagtctcactctcacccaggctggagtgcagtgcctctatcttggctcactgcaacctccgcctgccgggttcaagagattctcctgcatcagcctcccaagtaggtggaattacaggtgtgcaccaccacacccggctaatttttgtattttgcatagagatgggggtctccctatgttgcccaggctggtcttgaactcctgggctcaagtgatcctcccatctcggcctcccaaaatgctgggattacaggtgggagccgcgcccaggtggatttttgtctgactctgttcattcctgtgtccccagtacctggaaggacgccaagcacacagtaggcgcttaaaaaacattgagccacatgttgagaaaagaacggcaccattgtggctgcaagtgggacttgggccgcgcgggggagctcgcgcacctcgggccggggcaagagctcagtggaacccgcccgaggaagaacccgtggcgcaggattttcccaggccttctgaggaccaggggcgtcccccgtcccaccctgtgactttgctcaggccgttccggggcgggaattcagaactcctcagccccccaagaaaaaaatatccccgtggaaattccttgggaatgaccgaggcgggggaaatatgcgtctctggatggccagtgactcgcagcccccttccccgataggaagggcctgcgcgtccggggacccttcgcttccccttctgctgcgcgacctccctggcccctcggagatctccatggcgacgccgcgcgcgccccacaacaggaaagccttaggcggcgcggcttggtgctcggagacttaagagtacccagcctcgacgtggtggatgtcgagtcttggggtcacacgcacaggcggtggccaagcaaacacccgctcatatttagtgcatgagcctgggttcgagttgccggagcctcgcgcgtagggcaggggttcgagcgccccttctccctgcctcgcctctgcgcctgggggctgctgcctcagtttcccagcgacaggcagggatttcgagcgtccccctcccctccctcgtcaagatccaagctagctgcctcagtttccccgcggagcctgggacgccagcggaggggctcggcgcgtagggatcacgcagcttccttcctttttctgggagctgtaaagacgcctccgcggccaaggccgaaaggggaagcgaggaggccgccggggtgagtgccctcgggtgtagagagaggacgccgatttccccggacgtggtgagaccgcgcttcgtcactcccacggttagcggtcgccgggaggtgcctggctctgctctggccgcttctcgagaaatgcccgtgtcagctaggtgtggacgtgacctagggggaggggcatccctcagtggagggagcccggggaggattcctgggcccccacccaggcagggggctcatccactcgattaaagaggcctgcgtaagctggagagggaggacttgagttcggaccccctcgcagcctggagtctcagtttaccgctttgtgaaatggacacaataacagtctccactctccggggaagttggcagtatttaaaagtacttaataaaccgcttagcgcggtgtagaccgtgattcaagcttagcctggccgggaaacgggaggcgtggaggccgggagcagcccccggggtcatcgccctgccaccgccgcccgattgctttagcttggaaattccggagctgaagcggccagcgagggaggatgaccctctcggcccgggcaccctgtcagtccggaaataactgcagcatttgttccggaggggaaggcgcgaggtttccgggaaagcagcaccgccccttggcccccaggtggctagcgctataaaggatcacgcgccccagtcgacgctgagctcctctgctactcagagttgcaacctcagcctcgctatggctcccagcagcccccggcccgcgctgcccgcactcctggtcctgctcggggctctgttcccaggtgagtcggggtggggattgccgtcgggccagttctccgaagccccgggaggaccggctcccgggtcaggtcatgcatgcttaggtagctgtttatgggaaggaggggctagagacagcgattgaaaggcaacagccagtaggttcgaatccagaccctgcatacctccacgtgtggccttgggctatagattgcagctttaaaaaagggtagggggttggagatggaggggaggggcgggcctcgttttgttgcccaggccggtcttgaactccgggggtctagccttacctcctgcctcagcctcccgagtagctgggatgagaggtgtgaaccaccgccttgcttggctagattgcgtctcttacagtttctcagctgtaaaacgggaaacgttatagcggccacctggcagggtatcttggcccagcgcagcacctggccccaggactcgatcatgatggtttgggaacttggctctgtgccaacccaacaaggcttaagggacccccacccccctcaagatgtatattctgttcctcatcctctctgcccctggggaagtccagggctgcttctacttgggggaattccagagctgacttatccgtggcccaaagctgagaagtgggacgccccagcacaccctcccccagctccagcccagctagggaagagggaaggggtcagagggtctttcatggtggtgtaagtttggggaaccaggagggtgggagattgacagcttggttaacagctcaacaaagcctgagatccaggccagcacggtagttcatgccagtaatcccaacactttaggagccccaggcgggcgaatcacttaaggtcaggagtttgagaccagcctggccaacatggcaacatcccgtctctactaaaaatacaaaaattagctggcatggtggtgggcgcctgt

SEQ ID NO: 7965 - DNA, 6000 bp, Homo sapiens
attacaggcgtgagccaccacacgcagcctttttgttattagactctgtcattactgacttttttttttttttaatagaaacagggtctttctttcccaggctaaagtacagtggcatgatcacagttcactatagccttaaactcctgggctcaagtgatcctcctgcctcagcctcccaagtagcagggactacaggtgtgcaccaccacacccagttaaccattcattcattcattcattcatttattttgagatggagtctcgctctgtcacctaggctggagtgcagtggcacgatctcagctcactgcaacctccacctcccaggttcaagagattctcctgcctcagcctcccgagtagctgagactacaggcgtgcaccaccatgccagactaatttttgtatttttaatagagacggggtttcactctgttggtcaggcttatctcgaactcctgacttcgtggatccaccctccttggcctcccaaagtgctgggattaaaggcgtgagccaccgcgccctgccaacctttttttaatttttcttagagatgggggtctccctatgttgcccaggcttgtcttgaactcctggcctcaagtgaccctcttgccttggcctcacaaagtgctaggattacagcctgagccatcacacctggccaacaggtttttttttttgttttgttttgttttttaaagaatgtctaggccaggctcatttactttcacctgtaatcccagcactttgggaggccggggtgggcagatcacttgaggtcaggaattcgagaccagcctgggcaacatgctgaaaccccgtttctactaaaaatacaaaaattagctgggtgtggtgacacgtgcctgtaatcccagctactcaggaggttgaggcaggagaattgcttgaacccaggaggcagaggttgcagtgagccaagatcatgccatcaccctccagcctgggcgacagaaggagactcagtctaaaaacttaattaattaattaattaaaaataaaaatacaaaaattaacctggtgtggtggtgtgtgcctgtaatctaagctactcaggaggctgaggcaggagaatcccctgaatcccagaggcagaggttgcagtgagccaagatcgagccactgtttgcccagtctagtgcactgggctgctgaatttatttgaccagacacctagcaatagactttgaagttcttttccacttttcactctaagatgctgctgtcatgaataaggaatattttgatccccttcacaaacactcggggccctcttaccagttttcactgaagatcttgacattcctatctgcttaggtgtctgggcgtgtttgggggagatactgaagaggtagggctcccaggcaggtgcagttcgtctgttaggcaggcagcaaggtccacttcaccagacacccccacctctgttttcctgcagggactccagaacgggtggaactggcacccctcccctcttggcagccagtgggcaagaaccttaccctacgctgccaggtggagggtggggcaccccgggccaacctcaccgtggtgctgctccgtggggagaaggagctgaaacgggagccagctgtgggggagcccgctgaggtcacgaccacggtgctggtgaggagagatcaccatggagccaatttctcgtgccgcactgaactggacctgcggccccaagggctggagctgtttgagaacacctcggccccctaccagctccagacctttggtgaggattgaagaagccagcagggagaaggtgggggtggggtatcctgcaatgcggtgcctgtggccacaggatcttttgagatgggtgtggccccggctaaggggtgcatgtgttctaggcgtatgtgacctaggctgctgagtggccctggaagaggatctcgcaggagggggaatgaaatgccccagagaagggcttcgggacgtccatccctgtctgctcacacctttcttctctccctagtcctgccagcgactcccccacaacttgtcagcccccgggtcctagaggtggacacgcaggggaccgtggtctgttccctggacgggctgttcccagtctcggaggcccaggtccacctggcactgggggaccagaggttgaaccccacagtcacctatggcaacgactccttctcggccaaggcctcagtcagtgtgaccgcagaggacgagggcacccagcggctgacgtgtgcagtaatactggggaaccagagccaggagacactgcagacagtgaccatctacagtaagaaggggcaggggcggagtggggcttcttgggggtgtgacctgaacccggggcggggctcactgtgtgcctattccaggctttccggcgcccaacgtgattctgacgaagccagaggtctcagaagggaccgaggtgacagtgaagtgtgaggcccaccctagagccaaggtgacgctgaatggggttccagcccagccactgggcccgagggcccagctcctgctgaaggccaccccagaggacaacgggcgcagcttctcctgctctgcaaccctggaggtggccggccagcttatacacaagaaccagacccgggagcttcgtgtcctgtgtgagtggggctgctggtcaatggcccctatcccccaaggcccaatctccctgaaggtcccataaggtcttgcctccaagtcctgcccccacccacctccatgtcatctcatcgtgtttttccagatggcccccgactggacgagagggattgtccgggaaactggacgtggccagaaaattcccagcagactccaatgtgccaggcttgggggaacccattgcccgagctcaagtgtctaaaggatggcactttcccactgcccatcggggaatcagtgactgtcactcgagatcttgagggcacctacctctgtcgggccaggagcactcaaggggaggtcacccgcaaggtgaccgtgaatgtgctctgtgagtgagccggcgggcagagctgggtgggggcaggggccatggacctaatgcaatcctcaccgcctgttgtatcctccccacagccccccggtatgagattgtcatcatcactgtggtagcagccgcagtcataatgggcactgcaggcctcagcacgtacctctataaccgccagcggaagatcaagaaatacagactacaacaggcccaaaaagggacccccatgaaaccgaacacacaagccacgcctccctgaacctatcccgggacagggcctcttcctcggccttcccatattggtggcagtggtgccacactgaacagagtggaagacatatgccatgcagctacacctaccggccctgggacgccggaggacagggcattgtcctcagtcagatacaacagcatttggggccatggtacctgcacacctaaaacactaggccacgcatctgatctgtagtcacatgactaagccaagaggaaggagcaagactcaagacatgattgatggatgttaaagtctagcctgatgagaggggaagtggtgggggagacatagccccaccatgaggacatacaactgggaaatactgaaacttgctgcctattgggtatgctgaggccccacagacttacagaagaagtggccctccatagacatgtgtagcatcaaaacacaaaggcccacacttcctgacggatgccagcttgggcactgctgtctactgaccccaacccttgatgatatgtatttattcatttgttattttaccagctatttattgagtgtcttttatgtaggctaaatgaacataggtctctggcctcacggagctcccagtcctaatcacattcaaggtcaccaggtacagttgtacaggttgtacactgcaggagagtgcctggcaaaaagatcaaatggggctgggacttctcattggccaacctgcctttccccagaaggagtgatttttctatcggcacaaaagcactatatggactggtaatggttacaggttcagagattacccagtgaggccttattcctcccttccccccaaaactgacacctttgttagccacctccccacccacatacatttctgccagtgttcacaatgacactcagcggtcatgtctggacatgagtgcccagggaatatgcccaagctatgccttgtcctcttgtcctgtttgcatttcactgggagcttgcactatgcagctccagtttcctgcagtgatcagggtcctgcaagcagtggggaagggggccaaggtattggaggactccctcccagctttggaagcctcatccgcgtgtgtgtgtgtgtgtatgtgtagacaagctctcgctctgtcacccaggctggagtgcagtggtgcaatcatggttcactgcagtcttgaccttttgggctcaagtgatcctcccacctcagcctcctgagtagctgggaccataggctcacaacaccacacctggcaaatttgattttttttttttttccagagacggggtctcgcaacattgcccagacttcctttgtgttagttaataaagctttctcaactgcctcagccttgtgtgagttgaggggaggtgtcacatccagctggagtcctttctaagcagccacagcctgatcctcccacttcctcccccaagaaaacattgtgggttgatggccataccctgaggttctggtccaaatcggactttctatgaccttctgggtctctagtgaaaactaaagactcctctccagaaaaaaacatttggtttctaatgaggcctggaatcttattcttgacctggggagcggaatccctttttgcagtactcccgggccctctgttggggcctccccttcctctccagggtggagtcgaggaggcggggctgcgggcctccttatctctagagccggccctggctctctggcgcggggccccttagtccgggctttttgccatggggtctctgttccctctgtcgctgctgttttttttggcggccgcctacccgggagttgggagcgcgctgggacgccggactaagcgggcgcaaagccccaagggtagccctctcgcgccctccgggacctcagtgcccttctgggtgcgcatgagcccggagttcgtggctgtgcagccggggaagtcagtgcagctcaattgcagcaacagctgtccccagccgcagaattccagcctccgcaccccgctgcggcaaggcaagacgctcagagggccgggttgggtgtcttaccagctgctcgacgtgagggcctggagctccctcgcgcactgcctcgtgacctgcgcaggaaaaacacgctgggccacctccaggatcaccgcctacagtgagggacaggggctcggtcccggctggggtgaggggagggggctggaagaggtgggggaagggtagttgacagtcgctctatagggagcgcccgcggacctcactcagaggctcccccttgccttagaaccgccccacagcgtgattttggagcctccggtcttaaagggcaggaaatacactttgcgctgccacgtgacgcaggtgttcccggtgggctacttggtggtgaccctgaggcatggaagccgggtcatctattccgaaagcctggagcgcttcaccggcctggatctggccaacgtgaccttgacctacgagtttgctgctggaccccgcgacttctggcagcccgtgatctgccacgcgcgcctcaatctcgacggcctggtggtccgcaacagctcggcacccattacactgatgctcggtgaggcacccctgtaaccctggggactaggaggaagggggcagagagagttatgaccccgagagggcgcacagaccaagcgtgagctccacgcgggtcgacagacctccctgtgttccgttcctaattctcgccttctgctcccagcttggagccccgcgcccacagctttgg

SEQ ID NO: 7966 - DNA, 6000 bp, Homo sapiens
gacctaatgcaatcctcaccgcctgttgtatcctccccacagccccccggtatgagattgtcatcatcactgtggtagcagccgcagtcataatgggcactgcaggcctcagcacgtacctctataaccgccagcggaagatcaagaaatacagactacaacaggcccaaaaagggacccccatgaaaccgaacacacaagccacgcctccctgaacctatcccgggacagggcctcttcctcggccttcccatattggtggcagtggtgccacactgaacagagtggaagacatatgccatgcagctacacctaccggccctgggacgccggaggacagggcattgtcctcagtcagatacaacagcatttggggccatggtacctgcacacctaaaacactaggccacgcatctgatctgtagtcacatgactaagccaagaggaaggagcaagactcaagacatgattgatggatgttaaagtctagcctgatgagaggggaagtggtgggggagacatagccccaccatgaggacatacaactgggaaatactgaaacttgctgcctattgggtatgctgaggccccacagacttacagaagaagtggccctccatagacatgtgtagcatcaaaacacaaaggcccacacttcctgacggatgccagcttgggcactgctgtctactgaccccaacccttgatgatatgtatttattcatttgttattttaccagctatttattgagtgtcttttatgtaggctaaatgaacataggtctctggcctcacggagctcccagtcctaatcacattcaaggtcaccaggtacagttgtacaggttgtacactgcaggagagtgcctggcaaaaagatcaaatggggctgggacttctcattggccaacctgcctttccccagaaggagtgatttttctatcggcacaaaagcactatatggactggtaatggttacaggttcagagattacccagtgaggccttattcctcccttccccccaaaactgacacctttgttagccacctccccacccacatacatttctgccagtgttcacaatgacactcagcggtcatgtctggacatgagtgcccagggaatatgcccaagctatgccttgtcctcttgtcctgtttgcatttcactgggagcttgcactatgcagctccagtttcctgcagtgatcagggtcctgcaagcagtggggaagggggccaaggtattggaggactccctcccagctttggaagcctcatccgcgtgtgtgtgtgtgtgtatgtgtagacaagctctcgctctgtcacccaggctggagtgcagtggtgcaatcatggttcactgcagtcttgaccttttgggctcaagtgatcctcccacctcagcctcctgagtagctgggaccataggctcacaacaccacacctggcaaatttgattttttttttttttccagagacggggtctcgcaacattgcccagacttcctttgtgttagttaataaagctttctcaactgcctcagccttgtgtgagttgaggggaggtgtcacatccagctggagtcctttctaagcagccacagcctgatcctcccacttcctcccccaagaaaacattgtgggttgatggccataccctgaggttctggtccaaatcggactttctatgaccttctgggtctctagtgaaaactaaagactcctctccagaaaaaaacatttggtttctaatgaggcctggaatcttattcttgacctggggagcggaatccctttttgcagtactcccgggccctctgttggggcctccccttcctctccagggtggagtcgaggaggcggggctgcgggcctccttatctctagagccggccctggctctctggcgcggggccccttagtccgggctttttgccatggggtctctgttccctctgtcgctgctgttttttttggcggccgcctacccgggagttgggagcgcgctgggacgccggactaagcgggcgcaaagccccaagggtagccctctcgcgccctccgggacctcagtgcccttctgggtgcgcatgagcccggagttcgtggctgtgcagccggggaagtcagtgcagctcaattgcagcaacagctgtccccagccgcagaattccagcctccgcaccccgctgcggcaaggcaagacgctcagagggccgggttgggtgtcttaccagctgctcgacgtgagggcctggagctccctcgcgcactgcctcgtgacctgcgcaggaaaaacacgctgggccacctccaggatcaccgcctacagtgagggacaggggctcggtcccggctggggtgaggggagggggctggaagaggtgggggaagggtagttgacagtcgctctatagggagcgcccgcggacctcactcagaggctcccccttgccttagaaccgccccacagcgtgattttggagcctccggtcttaaagggcaggaaatacactttgcgctgccacgtgacgcaggtgttcccggtgggctacttggtggtgaccctgaggcatggaagccgggtcatctattccgaaagcctggagcgcttcaccggcctggatctggccaacgtgaccttgacctacgagtttgctgctggaccccgcgacttctggcagcccgtgatctgccacgcgcgcctcaatctcgacggcctggtggtccgcaacagctcggcacccattacactgatgctcggtgaggcacccctgtaaccctggggactaggaggaagggggcagagagagttatgaccccgagagggcgcacagaccaagcgtgagctccacgcgggtcgacagacctccctgtgttccgttcctaattctcgccttctgctcccagcttggagccccgcgcccacagctttggcctccggttccatcgctgcccttgtagggatcctcctcactgtgggcgctgcgtacctatgcaagtgcctagctatgaagtcccaggcgtaaagggggatgttctatgccggctgagcgagaaaaagaggaatatgaaacaatctggggaaatggccatacatggtggctgacgcctgtaatcccagcactttgggaggccgaggcaggagaatcgcttgagcccaggagttcgagaccagcctggacaacatagtgagaccccgtctatgcaaaaaatacacaaattagcctggtgtggtggcccgcacctgtggtcccagctacccgggaggctgagttgggaggatcctttgagccctgaaagtcgaggttgcagtgagccttgatcgtgccactgcactccagcctgggggacagagcacgaccctgtctccaaaaataaaataaaaataaaaataaatattggcgggggaaccctctggaatcaataaaggcttccttaaccagcctctgtcctgtgacctaagggtccgcattactgcccttcttcggaggaactggtttgtttttgttgttgttgttgtttttgcgatcactttctccaagttccttgtctccctgagggcacctgaggtttcctcactcagggcccacctggggtcccgaagccccagactctgtgtatccccagcgggtgtcacagaaacctctccttctgctggccttatcgagtgggatcagcgcgggccggggagagccacgggcaggggcggggtggggttcatggtatggctttcctgattggcgccgccgccaccacgcggcagctctgattggatgttaagtttcctatcccagccccaccttcagaccctgtgctttcctggaggccaaacaactgtggagcgagaactcatctccaaaataacttaccacgctggagtgagaccacgaatggtggggaggggagggtcccacggacatattgagggacgtggatacgcagaagaggtatccatgtggtggcagccgggaaggggtgatcagatggtccacagggaatatcacaaactcgaattctgacgatgttctggtagtcacccagccagatgagcgcatggagttgggggtggggggtgtcaaagcttggggcccggaagcggagtcaaaagcatcaccctcggtcccttgttctcgcgtggatgtcagggcccccacccaccgagcagaaggcggactcaggggcgctccagggtggctcgagctcacacacgctgagtagacacgtgcccgctgcaccctgggtaaatacagacccggagccgagcggattctaatttagacgcccgcgaacgctgcgcgcacgcacacgtgtcctcggctcgctggcactttcgtcccgccccctccgtcgcgtgcgggagctgacccggaggggtgcttagaggtatggctccgcggggtcaaaaggagaaggatcagtgagagaggcatccccacaccctcccctagaactgtcctttccccatccagtgcctcccaaatctctcttagtccccaaatgtatccccgccctaaggggcgctggtgggaggagctaaatgtgggggcggggctcggagtccagcttattatcatggcatctcagccagggctggggtaggggtttgggaagggcaacccagcatcccccgatcccagagtcgcggccggggatgacgcgagagagcgtggtcgcccccagaaggccctgggccatcatgccggcctccacgtagaccccaggggtcgctcactcctgccagctcgccttcaccaaggccaggagcttagcgcacgctcgcctcccgcccccccgccgcctctgccgccgccccctccttggaaaccaagttaccaacgttaaaccaatccccaagcgcaactctgcctcccccacaccccacccgccgcgccgcgcggagccgtcctctagcccagctcctcggctcgcgctctcctcgcctcctgtgctttccccgccgcggcgatgccagggccttcgccagggctgcgccgggcgctactcggcctctgggctgctctgggcctggggctcttcggcctctcaggtaagagccccgctctggttcggggtggacagggcgggggcggagtccctggacctgagaaacggcctcctgtccctcccagctctgccctcgcctcgctcccacgcctctgcccccacctcgagcctgagtcttctccccttccccctcctccccaacacacacccgagccccagcttcctgactcctcgatagcccctacccgcttcgagatcctaggtgttcttccgcacccaacccttcgccctggagacccagtgtctctcctgtccgctccccgggtacctccttacgctgtgctgtgcaccatggtccacggactggcatcttccccactcgcggtccgcgaagactccatctctccaactaccctgactcagaggcgctgttcccgctccacccagagccctggcaaccgggtccctcagctgttcccgcggttccttccatgagcccagccttgcgtcccggctccgtgttcttcaccgggtgtagggtccttcctgatccttgacccagcctcgtctctcctttgcccttgccgcaaacgcactctcctcgtatcccggcattctgccaggaccctgagaactggttcatcccccatcccccatcccgggtccccttctctcagccttgctgtgttcatccaagaacccacctttcctctcctctacgccctccccccatgctttcccgccgctccatcggcgctttggagaccatggctctctgctaccacgtcccagagacaccctcgaggtttagactctgggagtgcgcctttaaaccggaggcctgggcaggacgcgggacgcctgggttctttccctggctgcagcctctcctcctcctccccgccctctgagaacccttgactcgacataggggcgctaagatgtcagggagttggctccccaggctcagcccgcgtttccctgggcagc

SEQ ID NO: 7967 - DNA, 6000 bp, Homo sapiens
tgtttgttttatgccaggggctatgctgtatactggggacgcagccggaatgaaagacacacaaatccctgtccttatgcaggcaataggcaagagggcagataattaacaaccaataagcaaatgtctaacatgtcagatggtgataagaagcaaaatgtatcacatctgtaatcccagggttttgggaggccgaggtgggaggaaggcttgagcccattgagcacaggagtttgagaccagccttgggcaacatagcgagacactggtctacaaaaaattttaaaattaggcaggcatggtggtgtgtgcctatagtcacagctacttgggaggctgaggcgagaagatcatttgagcctaggaggtttaggctgcagtgagctatgattgctccactgcattccaggctgagtgacaaagcaagactctatttgataataacaacaaagagaaagtcataggggtcaggtatagtggctcatgcctataatcccagcactttgggaggccaaggtgggcagatcacttgaggtcaggagttcgagaccagtagtagagacatggtaaaagccagtctctgctactaaaaatacaaaaatcagccaggcacgttggtgtgtgcctgtagtcccagctacttgggagcctgaggcaggagaactacttgaacccgggaggtggaggttgcagtgagcctagatggcaccactgcactccagcctgggcgacagagcgagactctgcctcaaaaaagaaaaaaaaaatgaaagaaagaaaagaaaaggtcataggacagagaggaaagggatggttgggtgtttttttttttttttttttggtttttgtgggttttcttttagatggagtcttgctctgtcacccaggctggagtacagtgccaggatcttggctcattgcagcctcgacctcttggtctcaggtgatcctcccacctccacctcccaagttgctgggactacaggtatgtgtcaccacacctggctaatttttaatttaatttatttatttttgagacggagtttcactcttgttgcccagactggagtgcaatggcatgatctcagcttgctgcaacctccgcttcccaggttcaagcgattctcgtgcctcagcctcccaagtagctgggactacaggcatgcaccacctcgccccggctaatttttgtagtaatagaaacagggtttctccatgttggtcaggctggtctggaactcccgacctcaggtgatctgcccaccttggcctcccaaagtgctgggattataggcgtgagccactgcgcctggcctcacctggctaatttttgtacttttagtagagatggggtttcacagtgttgcccaggctggtctcgaactactggcctccagtgatctgcctgtctcagcctccccaagtgctaagatgacaggcttgagccaccacgccttgccaaggtgatatttcaggcaaggcctgaaggcaacggagctgtatggatgtctgagagaagagcattctaagcagagggaccgagcagctagtgcaaaggccctgaggtcagaccatgcctgctgagcgtgggacgtacccaggaggccagtgaggctgaacagagtaagccatggagagagagagggaggaggtgagggcagggaggtgacagggcaggtcatgcaaggctttgtgggctgtggcgaagagctgggctttttcctcggaatgaggtgggaaccatggaggtttctgagcagagcagggatgtgtcctgacttaggtgtgcacagatgtctctggccgctatagtgaggatagaaagtgtctgtgttggtccaggcaggagatgacagggctgtgtgaaagggtgggtgcttgaggagcaggtgagaagaggttggattctggatagctctgaaggcaaaactgatctcaagcagagaggcagcccaggttcctggccagagcacgtgggaggatggagcggagtcatgggataatcagaagcttggacaggccaggcacggtggctcacacctataattacagcactttgggaggctgaggtgggaggatccctgaggccaggagttccagaccagcctgggcaacattgcgagaccctgtctctactaaaaatacaaaaaattacctgagtgtggtggcgcgtgcctgtgatcccagctactcaggaggctgaggtgggaggatcgcctgagcccaggaggtcaaagctacagtgagctgtgattatgccactgcattccagcctgggcgacagagtgagaccctgtctcaaaaacaaaaaagcttagatgccgccgcactgagtatgagatgctcacgtgtgttggggggagacagatgtcacataggtgtgcagctcagagacaagggtttccagagggcttaacttttgggactcctcagtgtggagctggtgggtggggcctgaataaattgtccccagggcaccctgtgtagttgggaagagaagaggcctgtggctcgctctctttgtccactgcttggaatgggtagggtgggaccagccagcctttgggctggcagagacttcgagaaccacagggcttctttaggagtctgggtcaccccagggcatgacctggcgcctcaggccttgcctgtggtccaggtgtttagacagggcccctctgctggtggctactaggaggagagggcgcctttttaaggataagttgagttagtgaccagagccctgcctgcgagtcctagagtctaaggcagcagctacaattattggacaccaaatgtatatgatcacgctgactgtataacctcatgctgtctgtgtacacccagcactaaatgtatattcctgctgaggatacctccacaccacctgtataatgccatgttaaccaaataattggctgcactataaatatctataaatattcaagtagaggcaggttgtggcgtggtgactcgtgcctgcaatcccagcactttgggaggttgaggtgggaggattgcttaaggccaggagtttgagcccagcctgggtaacacagtgagatcctgtctctatttttattgtattgtatttttttttttttttgaggcggagtctcgctctgtcgcccaggctggagtacagtggcataatctcggctcactgcaacctctacctcccaggttcaaacgattctcctacttcagcctccccagtagctgggattacaggtgcccaccaccacacctggctaatttttgtatttttagtacagacagggttttgccttgttggccaggctggtcttgaactcctgacctcagtgatctgcccgcctcggcctcccacagtgctgggattacaggcatgaaccaccacacccggctaatttttgatttattgattgattgattttttgagacactcgctctgtcacccaggctggagtgcagtggcacgatctcggctcattgcaacctccgcctctcgggttgaagtgattctcctgcctcagcctcccaagtagctgggactacaggtgcacaccacaacatccagctaatttttgtatttttagtacagacggggtttcaccaagttggccaggatggtctcgatctcttgacctcatgatccgcccacctcggcctcccaaagtgctgggattataggtgttagccaccacacccagcctattttcttttttctttttctttttggagacagagtctcactctgtcccccaggttggagtgcagtgaggcaatcttggctcactgcaacctccacctcctgggtttaagcgattctcctgcctcagcttcccaagtagctgggattacaggcatgtgccaccacactggctaatgtttgtatttttagtagagaaggggtttcaccatgttggccaggctggcttagaaatcctgatcgacctgcctcagcctcccagagtgctgggattacaggcatgagccactgcacctggcctatgcctgctctttgaggtcagttttggtttcatactttagcctcattttgcagttgaggaaactgaggcttaaggaagataagccctttgttaagtatcctctagttcagagggtgcagaaggagcatttgaattcagggcgacccaggaggatgtgggctccacaagggtggagattgggtctctctggttcctcactgtatgcggtgccccgcccaaggcctgcacccactaagggctgaataaatacttgttctaagaccaggcccagtagtgcacgcaggtaatcccagcactttggggggccacggtgggaggagcccacgagtccaggagttaaagatgagcctgggcaacatagcaacatcccatctctacaaaaaaaattaaaaattagccgagtgcagtagagcacctgtagtcccagctactcaggaggcttagtcaggaggatggcttgaggcagggaggtcgagactgcgatgagctgtgattgcaccactgcactccagcctgggcaacagagggagatcctgtctcaaaaaaaaaaagcagcagacagaaagaaaactaatttcctgcacagcttggagaagttttcagcaccaacattccacagttggttgtctgggtttgggcagtaggccgttttccctcccagtgcctcagtttccacacctgcaaaacgaagccacggaaacgccctttcagggtggccaggggttctaggcggcatcgcccggtggcagggtgttcccagggtgaagccgcagggttcccgggtgggggcggggaaggctaaatgcggccggccggtgagtggcgggagcagctgcagccccgcccgcgccctcccgggtcccttagtctgggcagctgcccagctcgggccggtctgaccggtttgggccgccccgcctggcgctgtgctgggaggagccgccgccagtcgcgcggtcagtgcctccctccagactcgggagggtcgagggggcgcgggagagagcgcgggcggccgccggggctggtcgcctgcagggatgggggacgagcggccccactactacgggaaacacggtaggcagcgacccccgcccgtagccccgggccgacccctcggtccctcggagggggccttgagagaacatggggcgcagggaagggggctggagggggagcgcaattgcaaatctgcgcctggagcctccccaccatcagccaggccccttcaccccacttatcccccgcagcctcgcagacgaccctccttactctcccctacccgaaggacctgcccctgtacccctctgcctggcactgctgccggcgcctccttccccctatcccacctcagatcttccccatctccacctggttccgtggtggtcaccatttcagccctcttcccagtgggtggccgccagttaataagtttgttcacagttagtgatccctccttcctcccctgtcctggcctgccagaactgggggcttgggtgtggtcacctggaggtgggtgaggcagaaaattccacaggtctctgaattttattcttgccaaggcaaagacacccctaggggcttttgggagggggctctcccagccctgtcttggttcaggtctccaatcccatccatcttaatcttcttgactttcaggaacgccacagaagtatgatcccactttcaaaggacccatttacaataggtaagagctctgggttttggggggttctccccgctaatactaccccaatccctgtctcttcacaccccctcccatctgttctccaacaaactggtgacaaatatttgaaacttttttttttttttgagatggagtcttgctctgtcaccaggctggagtgccgtggcgcgatctcaatctcggctcactgcaaccttcgcctcccgggttcgagcaattctcccacctcagtctcccaagtagctgggattacaggcttgcaccaccacacctggctaatttttttttttttttgtactt

SEQ ID NO: 7968 - DNA, 6000 bp, Homo sapiens
gaaaccctcccttctcatcactgcctgggtataccttatatactaaatatttttaatattatcaaggatcttggctgggtgtggtggctcatacctgtaatcccagcgctttgagaggctaagtcaggaggattgcttgagcccaggagttcgagaccaatctgggaaacatagcgagacccctgtctccacaaaaaataaaaaaattagccgggcgtggtggcacgtgccattggtcccagctactctaaaggccaaagcgagaggatcgcttgagcccaggagggtgaggttgcagggagctgagatcacactactgtacttccagcctgggagacaaagcgagaccctgtctcaaaaaacaaacaaacaaacaaaaacccatctcctggttctccttaatttcacttccctcttttccagccagaagctaaggtagctgaaggggtagaaattgcagatctttctttatgtagcaagagagaggaactgggaaagcagtgagtgtccctgtaggacaggggtcttcttattttattttatttttttgagacagagtctcgctttgtcgcccaggctggagtgcagtggtgcggtctcggctcactgcaacctccatctccccagctcaagcaattcttctgcctcagcctcctgagtagctgggattacaggtgcccacctgtaattaaccgcatccagctaattttgtagttttagtagagacggggcttccccatgttggccaaggctggtcttgaactcctgacctcaggtgatccacccgcctcggcctcccaaagtgctgggattacaggtgtgaaccactgtgcctggcctgacaggggtcttctgatcactcctcagtgcctcccaacccaccatacagagcacaaagtgttaaccctaaggcagaatgtgaacatggggaaacaaatgcaattttaaaaaacaaccagccaaacaaaaaaatccctaatggtggaaatgctgtttgtttttttttcatttggtagcaatgattaccatcatgctcctctcctgccacaatgacgtcagcccctgatgctgaaacttggtgacacttctgtgcttgtccccagtgagggctgaggtgcacaacctgggaactcctagaacaagtgactgatgccaaaggtgtggaccagcctctgcaaggacagacacctttcttttgtgtgtcccagactttttttttggatggtggattctgatttgcctccttccccaacgatggctattaaaatacctgaaaccataaaatgcccctttgtcaaggatggatctaggttttgtgaggcgtaaacaaatacatttctgccgcaaagtttacatgaacaagtgagcaggcgaacctactgccgcgctcctctctgaccttgaagggtgggcgcaagctcaggtctcattcattcactatttgttgttcagtgctcccaaacacccaattgttgcccttgacaacaaacacatgaatttaagaagaggagttcaggccaggcacggtggctcacgcctgtaattccagcactttgggaggccgaggggggtggatcacttgagatcaggagtttgagaccagcctggccaacgtggtgaaaccccatctctactaaaaatacaaaaattagccgggcgtggtggcgttgcgcctataatcccagctactcaggatcctgaggcaggagaattgcttgagcctgggaggcagaggttgcagtgagccgaaatcgcaccactgcactccagcctgggcaacagagaaagactccgtctgaaaattaaaaaaaaaaaaaaaaaagaggagagtttgttgactaatatgggtcgttgacataaatattctgtgtgtgattgtattcaacacatttcattttttggttgtgattttttttttttttttttttttttgagacggaatctcgctctgtcgcccaggctggagggcagtggcgcgatctcggctcactgcaagctccacctcccgggttcacaccattcttctgcctcagcctcccgagtagctgggactacaggcgcccgccaccacgcccagctatttttttttgtattttttttagtggagacggggtttcaccgtgttagccaggatggtctcgatctcctgaccttgtgatccgcccgtctcggtctcccaaagtgctggcattacaggcgtgagccaccgcgcccggctggttaattgtgctttttaaaaaatatctcccatccccataaatatgtacacctactatgtgcccacataattaaaaattaaacaattttaatcccctaaaaataaaaaaggagaccaagcatgtggagaaataaatgtctcaacacaccataagggtgtattggagtggcccttctatgattttgacaatgatattaaacgtcctggccgggcgcggtggctcatccctgtaatcccagcattttaggaggccgaggcaggaggatggcttgaacctaggacttagaggtcagcccaggcaacatagcgagaccgcgtctctacaaaaaaaaaaaaaaaaaaaaaaagcaagtatcttgcatttgcaattcgtcggatgcctgcaaagttccgtgggtgtgtgatgtaggaatctggggcacgggaagttattcttgcttcatttcctgacgctgaccggctgggcggggtccctggggcacccgggcacatttggacgtgtttggcagggagagtcctggcccagccccggcacgtagggccgcgcttccacgggccgccgccaggagacgcgcgaggctgtagatgcggctttgcagagaagctgggagggtagaggggctggggcggtcgaggggcggggctgcgtgcagccggcccagattcctttccggccagttccttccaggagctgctcccacgtctacagcgccgtctgctactcacccagctctcttgtatctgagcctcattttcccaccgtcctttaagcccgttttcccactgctcatttgcagccaagtttccatctcgcatctttgcgtcccccttctctgcaccctcctttgcacccccattttcctgctttcccttgagtccacatttcccagacctcctttgccccctacattttccaatgctctcttgcatgcccatttatcaccctcttttgtgcccccatttccaggccctcagcccctggttctgaggttccttacttcaaatgaccttttttttttttttttttttttcctgaaacggaggagtctccctctgtctcccgggctggagtgcagtgatgtggtctcggctcactgcaacctccgcctcccgggttcaagagattctcctgcctcagcctcccgagtagctgggactgcaggcacccgccaccacaaccggctaattttttgtatttttagtagagacagggtttcactgcattagccaggatggtctcgatctcctgacctcgtgatctacccacctcggcctcccaaagtgctgggattactggcgtgagccaccgcgcctggcttcaaatgacctcttaaataaaggtgtggaaggacacactcctggctgtgaacagcacccgtggtccaggaggagacagcactcctctgtgaacatcttgcttagttctacatgttccaagaagcaggcgatttgacagacattcattaaattaattaaagtgtaaggtattttctcccatttgaaccatccgccttcccccaatccatgcaggacctggacccagacacaccccagcccagggctggacagagaggggatcggggtggggcaatgtgaagctgctatggttagggtggggaggtatgggggcaaagtgggctacagactgcaggatctaggcctggaggtcttcagtgctgacatacagaaggtttttggtcctgaaatgctaactacatctatcaccatggagaaaagcccaatgacctgctacttgggaggctaaggtgggaggatcacttgagccagggaggtcgtggctgcagtaagccatgatcacaccactgcactccagcctgggcaatggagcaagatcctgtctcaaaagaaaaaaacccagtgaccaatggctcacagttccaggactctctgccttacaggttcctgccctcatgttactcttggggcttcaaagcctggtcttgcttcctgtgtggcctcaggcagttcccttggcctctctgagccctgtatgaaggatgggccaagtatgggcttgggcttgggaggcccggtggcttgtagctagatttctgcatcacagagcctctggatccattcattcattctccgcgggtttcttaagtactgcagtgccaggctttggggacacagctgtttttgtttttgttttgttttgtttgagacagagtctcactccgtcaaccaggctggagtggaatggcacgacctcagatcactgcaacctccacctcctgggttcaagtgattctcctgccccagcctcccaagtagctgggattataggcgtgtgccaccacacccaggtaatttttgtattgtttgtattgttagtaggtctcaaactcctgacctcaggtgattcgcccgtctccgcctcccaacatgctttgactacaggtgtgagccactgcgcctggcaggggtcacagctgttaataggacagcccaagttcccccctcccccgcttggatcccccagtctactaggagatgtcaactgtgcaagtggttagctctgggcactatgcccacagggtcctggtggcatctggagggtaccagggtagcataccatgcctgttctctttccctgctgtgacctgtttgaaggatgaggagccaacagggggcagtttggggcacctgatttccctggaccatgagccttgctccagaacccaattgtgatgtgataaaaggcttatgaccagggcagggggcagctgctgggccgccttggacaaccatcaggcagccaggacacagaggggcagagcaagtcagcattggcgccccttcctcagatccctatcatcttgggaaacagtagcccagaggttcaggaagatgttaacttaaatgttcagggtgccccagtctgttcagcatggctgaaatccacactccgtattcttccttgaagaaactgttatctttactcaatggcttcgtggctgtaagtatgtcacaatccaggcccctggtttgttgcagcccttcctccacagtcagctccctgaaagacagaaataagttgatccaaattggcatcgagatctgtggttccctggagaagcaggagggatgtagggcagacggaggaggaggagcagggagcgtggggacctccatcaaccgagagctggtgaaatccagcacagatgagtgtgatctgggggagcccaggtgggtgatggaagagcttggctctaagtcaaatcctgtagccgaccaagttgtttgggaaggccaggagaaagggttattttcttgatcttttaaatttgtcacatttttttccttaccgtaaaagtaacccgaaatgtacattgctaaggaattgtcaggccgggggcgctggctcatgcctgtaatcccaacgctttgggaggccaaggcgggtggatcacgaggtcaggagttcaagaccagccttggtcaatatggggaaaccccatctctactaaaaatacaaaaaaattagatgggcgtggtggcacgtgcctataatcccagctactcaggaggctgaggcatgtgaattgcttgaacctgggcggcagaggttggcagtgagccgagattgtgtcactgcactccagcctgggcaacatagcgagactctgtctcaataaaaaaataaaagaataaaaacataaaaagaagtaattgtcttcattgtagcatagtctaaggaaaagctgccaggaaagagaaggaaatgaaatatcactcctcctcttcacttgtaacatttt

SEQ ID NO: 7969 - DNA, 6000 bp, Homo sapiens
taggaggctgaggtgggaggatcatttgaacccgggaattcaaggctgcagtgagctatgttgccaccactacaatccagcctgggcaacatagccagaccctgtctctgaaaaaaagaaaaaaaaaaaagtctggtttctgaaccagcaggatcaatgtcacctgggaactggttggaaatgcagattcttagatatgttccatacctgttgagtcaggagctctgcaggtaggacacaaagatatgtgttttgtttgtttgtttttgagacagagtctcactctgttgcccaggctgaagtgcagtggcgccatctcagctcactgcaacctccacctcccaggttcaagcaattctcctgcctcagcctcccaaggagctggggctacagacatgagccaccacacccggctaattttttgtatttttagtagaggcggggtttcaccatgttggccaggctggtctcgaactccggacctcaggtaatcctcctgccatggcctcccaaagtgctgggattacaggcgtgagccaccgcgcctggcctgatttctgttttaacaagcctacccaaagattctgaagctcactcacatttgagaaccattaccctgggttgttgggagaatcaaatacattacagagatataaaatgctttgagcagctgagggctgtggctcatatctgtaatcccagcactttgggaggctgagacaggcggatcacctgaggccaggagttcgagaccagcctggccaacgtggtaaaaccccgtctctactgaaaatacaaaaattagccaggtgtggtggtgggcgcctgtaatcccaactacttgggaggctgaggcgggagaatttcttgaatctgggaggcggaggttgcagtgagccaagattgtgccattgggactgtacctctagcctgggtgacagagcgagactccatctaaacaaacaaacaaacaaataaacaataaaatgcttacagtagtgtgcctggcctcgtagcacatactgcactgggcgttcactgctattatgatcttcgaagaggtccaggaccctaacgttgtggggatctggttgtgtcaccttaccccgccttttgggattatgcgtttctggtctctgcaggttggagaccttctcgcctctctgtcaatgatgttgacaataagctgggccacatcaccctgtccctagcgaaaggttatcacttcgctggggacatgagaaaggtcgggttgggggggccgtgcctgtctcccctctgctggagaagataagggaggcactcagctttcttcaggcagagtgtgggggagccacgatgtataaatggggggccaagaggcagcagagacactggcccactctcacgttcaaagcatctccgtccagcatggccaggtacatgctgctgctgctcctggcggtatgggtgctgaccggggagctgtggccgggagctgaggcccgggcagcgccttacggggtcaggctttgcggccgagaattcatccgagcagtcatcttcacctgcgggggctcccggtggagacgatcagacatcctggcccacgaggctatgggtgaggctggggagagagtggatgtagaaggggaacaggtggctggatgggtcccaggagctaaggacagagataagaggaggttgctggaggaggagggtccctgtcctgccacattcagccagggacacctgcccagccttgaaacaagggctcaggagttagcagagctgcagagctgggatggggtgttgcaagccatccatgggggctggaagtctgaggacaggtgggggcggggagcgtgccatttgcaaagacaacaccgaagtgttttccaaccctttccagcaggtaatgtgaagggtgtggtatacacatagctgggtttgtcacctaatgcatgacctctccccagcaagttggtttttcttccgtctctgagtgtcttttttttggagatgtggtctcactccattgcccaggcttgaatgcagtggcccaatcactgctcattgcagcctcgacctcccaggctcaagtgattctcctgcctccgcctccagagtagttgagaccacaggcacctgacaccatgcctggctagttttaaattttttttttgtagaaacaggggtctcactatgttgcctaggctggtctcgaactcctgggctcaagtgatcctcccacctcggcctccctaagtgctgagattagagtctctgagtgtctttatcttcaaatgggagacacagttcctgaatcttgcaggattaagtggtatgattaaatcaaaacagattagggcagagtctcagcagggcagcggcacaatctgggatccatcaggagagtcagagggaacagaagacctagcttcatgaggggcagggacctggcaaatagatattcatgatggtgagaaggaggataggtatgagcgtggacatagaagacacaccacttggattcagatagtagctctacaatgtaatagttgtgtgttcatgtgctactattttttttttttttgagacagaatctcattctgttgcccaggctggagtgcagtggtgcaatcttggctcactgtaacctccatcacctgggttcaagcgattctcgtgcctccagcctcccaagtagctgggattacagatgtgtgccaccatacctcgctaatctttttatttttagtagagacagtttcaccatgttggccaggctggtctccaactcctgacctcaggtgatcctcccacctcagcctcccaaagtgctgggattacaggcatgagccaccgcgcccagccatgcaaattctttactgagtcctgcctcagtggtctcctctggaaaatacgggtgataactgcacccacctcaactggttatcactgagaagaataaagaagttaacctgctaaagcacttaaaacgttgtttgacacaaagtaagtgatcaataaattattattattattattattattattattattatttttgagacagggtcttgctctgttgcccagactggagtgcagtggtgtgatcacagctcactgcagcttcaacctcttgggctcaagcaattctcctgcctcagcctcctgagtagctgggactacaggcttgtgccaacatgtctaactttttattatttgtagagacagggtagtgctgtgttgtccaggctgttcttgaactcctggttctggtgatcctccagcatgtgcccctggaagtgctgggattacaggtgtgagacaccgtgcccggactcaatagtcatttttgagtgctcatcatgttccagacattgttctaagtttttttttttaatgaatattaactccttataaaacttgagaaggttggagtaattatttttttccactttgcagaaaagaacattgaggctccaagaagtaaatttacttgctcacgattagagaagctggattcatgctcagtcagcccagctcccaaatgtaccaggtcctcaattaataaagagtaaggagaaataaatgacagggctgggtgcggtggctcacgcctgtaatcccagcactttgggtggctgaggtgggcacatcacttgaggtcaggagtttgcgaccagcctgaacaacatggtgaaccccatctctataacaatacaaaaatcagccaggcctgctggcagacacctgtaatcccacctactctggcagagccagaatttgaacccaggactgggtggaataaaaactctgaactatgtctatgactgttgtcacaagatcagagctagactggccaggagccatgactgtgggtgcagcagcagctgagccctgatcactaactctgttcatcttttgcaggagataccttcccggatgcagatgctgatgaagacagtctggcaggcgagctggatgaggccatggggtccagcgagtggctggccctgaccaagtcaccccaggccttttacagggggcgacccagctggcaaggaacccctggggttcttcggggcagccgagatgtcctggctggcctttccagcagctgctgcaagtgggggtgtagcaaaagtgaaatcagtagcctttgctagtttgagggctgggcagccgtgggcaccaggaccaatgccccagtcctgccatccactcaactagtgtctggctgggcacctgtctttcgagcctcacacattcattcattcatctacaagtcacagaggcactgtgggctcaggcacagtctcccgacaccacctatccaaccctgccctttgaccagcctatcatgaccctggcccctaaggaagctgtgcccctgcctggtcaagtggggacccccccatcctgacccctgacctctccccagccctaaccatgcgtttgcctggcctacacactccactgccacaactgggtccctactctacctaggctggccacacagagacccctgcccccttcccagtccaaactgtggccattgtcccctgaccagctaaaatcaagcctctgtctcagtccagcctttgcacgcacgcttcctttgccctgctttccatcccctctccctccaactcccctgccagagttccaaggctgtggaccccagagaaggtggcaggtggcccccctaggagagctctgggcacattcgaatcttcccaaactccaataataaaaattcgaagactttggcagagagtgtgtgtgtgtgtgtatggttgttgggcgtaggacaggtttcggggatgcgcggtacgcggtaccacccctcggaggcccccacccccagacgcccaggccgcctccccactccccctcaagcagccccagccggggactttccgtcgcggggaaggggcggggaccctgagcgaaaggtgcggaggcggcctgccggggtggttcggcttcccgttgccgcctcgggcgctgtacccagagctcgaagaggagcagcgcggccgcgcggacccggcaaggctgggccggactcggggctcccgagggacgccatgcggggaggcaggggcgcccctttctggctgtggccgctgcccaagctggcgctgctgcctctgttgtgggtgcttttccagcggacgcgtccccagggtgagtgctggagggagctcgtgtcccgggcgctgccgctgcgctccccgcgaaggcgccagtgctccaggataagccacgcgtatgcagagcgaacggtagaggtgcaggcgccactcggctcctcccggggcagggacccggcgacactggggaatgggcggcagcgaggtcgaaccggagccccggggcggggtgggggagctctctgggtggttaacaggatgtggcgagcacagggaaagggggggtttgcacggagcccgggcaggggtgcctagcgcctcccttcctgctgctcatttccctaagcccccccaccttgcaattgtcagaagtccaagttctggggtgtgcaggcggaagggggggattcgaccccctttcctgagaccctctgactccctctccaggcagcgccgggccactgcagtgctacggagttggacccttgggcgacttgaactgctcgtgggagcctcttggggacctgggagccccctccgagttacacctccagagccaaaagtagtgagtacagggaggtgacgtggggaaacaggctttggaggtggccgctcaggccccaggctgctttggttgaaaggttccaggagtcaagcctggccaacatggtgaaaccctgtctatactaaaaatacaaaaaaaaaaaaaaaaaaaaaattacccaggggtggtggcgcgcgcctgtagtccctgatactcaggaggctgagacaggagaatcgcttgaacccgggaggcggaggttgcagtaagcccagatctcgccactgcactccagcctgggggacagaggga

SEQ ID NO: 7970 - DNA, 6000 bp, Homo sapiens
gtcaggagttcgagaccagcctggccaacatggtgaaaccccatctctattaaaaatgcaaaaattagtcaggcatggtggcgtgcacctgtaatcccagctatttgggaggctgaggcaggagaatcacttgaacctaggaggtggaggttgcaatgagccgagatggtgccactgcactccagcctggacaacagagcgagactcgttctcaaaaaaaaaagaccttcaaaaagcgctatagccatatgagccaacaatcccactcccagtgggatacccatgtgaaatgaaaacctttgttcatatataaaaattcatggctgggtgcggtggctcatgcctgtaatcccagcactttgggaggccgaggcgggaggatcacaaggtcaagagatggagaccatcctgaccaacatggtgaaattccgtctgtactaaaaacacaaaaattagctgggcatggtggtgcacacctgtaacccagctattcgggaggctgatgcaggagaatcgcttgaacccagaaggtggaggttgcagtgagccgagattgcgccactgcactccagcctgggtgacagagcgagactccatctcaaaaataaaaataaaaaagatactattataatgttcatttcctggctcctctcaatttcatcaacatagcaacaccagcagggtaaaatctactttttttgtttttttttttgagatggagtctcatgagcgaatgtttgctgaggctttattagttattaccaacagcagttaaaccctaactgtccttcaatggatgaatggataaacaaatgggatccatccacacaatggaatactattcagctataaaaaggaatgagctacggatacaaaaaaacaacattacagatgaacctcatatgcattatgtgggtgaaagaagccaggctcaaaaggctgcatgattccatttcactcaaccttctggaaaaggcaaaagtatcaggacagaaagcagatgaatgcttgccaggggctgggacctgcaacaaatggagtagtttggagaattttttgggttggtgtaaatgctctgtatcttgattgtagtggtggttgcatgaccgtatgtgttcagagctgtacactaaaatgggtgaattttactacatgtcaattacacttcaatgaaaaaaaaaaaaagaaggagaaaaaccaaacaacccaggcaagacaggatagggcttgggaaacctctctctgggattcctgacacagcagaaacttgctaacgagccctggcttgtctagtcccagcttcacctcccctcacacacccagcgagccagctcattcatacacaacccaaaccagccaagccaggttctggaaaaagtcaagatccgacctgatctgcccatgggaaatacaaaaggagcttgtgagacacgacattaccaaacacatcacatctctggcattcaaatggtctcgggttccccccaaacctgaggtccagaaaagctcatccttggaagctgccgcagcttaggccgtctcttgcagtttctcccttggaaattactttaataaaggagctagttaccatcagctcaacaacgacccaacagatctaccagtcaccattgtgaatcagccactgctgggactgtgaagggaccagcaggatctagctgtccctacagacaggcactgtcagggggccacagtacagtgtcctcagtggcttgaacaaagtggccagtcttcattccaagggtgggtttcatttctgctgacagcctggttaccggaagccagatgggcaaacaaggggttcctcaagcctgcaacacccctcaaaaacaaagaggaattctactttggaggctggatcttgcctttctgccagcttcttatgggtgaggagggggtggaaattatttgtatgttccggttgacacgcagcatagtaggtgcatgaggatgatttggtgcctgttgagtaagtgtggggctcagaaaagcagtctcaaaagggaatttccaaaacgttctgagtttatgggaatatgtatggaatctcttcaaaatgacacctacttgtacaccatcatgccctatctaactgcaacccagagatggaagactcacctcttcagatcacattaaataagttgaaaatttgcataactggtgaaggagcaacacatggatgggtcttagggtttcaaccctatccccatggcccctcacaatcaagtacctcaggtaactcaatctgataggattttaactgtggtctcaggccgagtgggatggctcatgcctgtaatcccagcgctttgggaggccgaggagggaggatcacttgaggccaggagttccagagcagcctgggcaacataatgagatcccatctctactaaaaaattaacttgtggcctggaagcaaatactctcccccagcacccaagaagggcagggagtgaggcctgtcatgacacagaaggcctcaaaactcaaactgccaccagaaaaatatctctgctttttttttttttttttttttttttttttttttgagacggagtttcattcttgtcacccaggctggagtgcagtggtgtgatctctgctcactgcaacctctgcctcctgggttcaactgattcttctgcctcagctacttgagtagctgtgattacaggtgcccaccaccacacccagataatttttgtacttttagtagagatggtttcgccatgttggccaagctggtctcaaactcctgacctcaggtgatcctcctgcctcggcctcccaaagtgctgggattacaggcctgagccactgcgtccggccagatccttgcttttgaaagcacacatacagaacaccttcaggttttcatctgtttttcccagatagcaccagtgaaaaagataatgagtttccagaagaccacatagcgttggcttcctgtactcgcagtcagggatccccaaaggctacagcttcagaagtttccagagccaaatctggatgactgagttccaagcactgactcacccttgcctccgcctgctcccctgtgaatcagtgatctacctttaaggacttctcatcgtgtctctcatgacaggcctgtgaattccagatggttcaacagctcatgaaagctcaggggcaggatctggaaacaagagtaaggagaggaggtgaagaagtgtgccaggtactgcctgttcctttgtctgtcaaaagtcttttctttttttttcttttttttttgagacagaatctcactctgtcgcccaggctggagtgcagtggtgcgatcttggctcactgcaacctccacctcccgggttcaagcgattctcagcctccctagtagctgggattacaggtgcccaccattacacctggctaatttttgtatttttagtagagacagggtttcaccacgttgtccaggctggtcttgaattcctgacctcatgtgatctgcctgtcttggcctcccgaagtgctgggattacaggtgtgagccaccgtgcctggccagaaatttatgtgtttttcatttacagcacatctcaatttggaccagtcccatttctttttcttttttctttttttttttttgagacggtctgttgctcaggctggagtgtagtggcgagatcttggctcactgcaacctccgcctcccgggttcaagcaattcttctgcctcagcctcctgattagctgggactacaggtgtgtaccaccacgcccggctaatttttgtatttttagtagcgatgaggtttcaccatatctgccaggctggtctcgaactcctcacctcgtgatctgcccccctcggcctcccaaggtgctaggattacaggtgtgagccatcgttcccggcctggaccagccccatttcaagggctcagtggccccattggagccactagacacgattctggacgtcaggcagagaccaatgtagttcccctgtccatagggcggagcaaagtgtggaggggggccgggcggggtggctcaggcctgtaatcctagcactttgggaggctgaggcgggaggatcacctgaggtcaggagttcaagaccagcctggccaaccatggggaaaccccgtctctactaaaaaaaatacaaaaattagtcgggcgtggtggcgggtgcctgtaatctcatctacttgggaggctgaggcatgagaatcgcttgaacccgggaggcggaggttgcgtgagccgtcattgcgccactgcactccagctgggggacagaacgagattgtttcaaaaacaaaacaaaacagaaaaacaaagtggggcggggctttcattaaaaacggcagtgaagccaccccagaatggggctggggctcaaggttcttgcaggttgggggttcccaaatggggagcttttcgcgactccgtttcgcctttccttccctcccactcaagagtctcctcccatagtgacctcctcgccaaccagactccgcagcccgcgaccccagcccctagccctctcctgctgttcccggtgtaccccgggggccgcccacctcagaatttaccccttcggcgccgcctgtcatgtggatgctgccttgcctgtcactcaacttcttaccccgcccccgcgtctggcctaaccgtcgcttaccttggtttccacagcgacgccatcagggggcgtggcaaagggacgcgcggggcagagacctcctttggattggtggatggtcaagccccttctctttagcccctcctacaggcgttccgcccccttcgattggtctcgcaagttgattggtcaatcccctggtgctagtcctagtcttggttcggaccggccccaaggagcaggggcgaacgtgggcgcctcgtgccctgattggccgacggggcgcgcgcggcctggaggggcggggcggacgcagagccgcgtttagtctatcgctgcggttgcgagcgctgtagggagcctgtgctgtgccgcgcagttaggcagcagcagccgcggagcagtagccgccgtgggagggagccatgaagcattacgaggtaagaagcgagaaacaggggccgtgtggccactgctgacccattctttttccttctttgcgggaccacgggaccccactttctggtcctgtgccccgaaggaagagccagacggcgcaggcgcagtgggcaagcgttgcgccccgggccactcgtaaattccaatgcgcatgtgcgcaggaagtatttataaatctgcaacccaggctgttttgggggtactttttcttgggggtctctgcaggggctgggacgcttgcaggttccttgcagctcccccagcgggctgagttgcagactttgtcatgggagccacgaaggtgcgggacccttgctcccaatccgagggagtcttgcacaaatcttgcgccacgccgccgtcaccagcgtaggaaggggctttgctatcagtattcttgtgtacgacctttggaccccttccctcgcccgggacgttcccgggagacttaggcggtgagggaggtgcagctccacggctggctttcgcagagcagcgaagctgatcttgctttctggttatcaaagaggtcatctacgtcaacccttgggtgtcaccaaggagaaatcttatacccacccacagccactcttgaagcccaagtcttctgactcctaacttgggtctctttttcccttaaaacgaagtcttctgatgtgcttatcgccctaggtgataatataatattaataattcaaccaattatccctgaattattgctgacttttaagtaactatcatcaaataataaaatttgttattaaaattcaaaataacaatttagcaagtgcttactcttgtgctggtgagattctgttaccttgtataagaactattattattcctgtttgtaaggatgaataaagtctcagagatataaagtgacttgttcaaaggcccct

SEQ ID NO: 7971 - DNA, 6000 bp, Homo sapiens
acagaggtcataatgattagatacaggttataacatacaggctaaaacattttgtatgtaaaaccatcagtgaaactttataagagagggcacagtggcttatgcctgtaatcccagcactttgggaggttgagacgggcagatcccttgaggagaagctcatcgctcctgaggccagtagttcgagaccagcctagccaatatggtgaaactctgctctactaaaaatacaaaaattagctgggcatggtggcacatgcctgcaatcccaacaactcgagaggctgaggcaggaaggttgcttgaacctaggagatggaggttgcagtaagatgagactgcgccactgcactccagcctgggtgacaaagaccctgtctcaaaaaaaaaaagaaaagaaaagaaaaactttatgatttataaatataaagcaaaacttcatggtttagaaacaaaggattgtgcttttccatatcagtggaaaatcagaacatcaacagttggaagaactcataagatctgagtaattaaagataagatttgaggaactcacaagattctttactcaggaacaggatgtaacccatgcatcaagagatcttttccgggggctaattgggactaatgtgactggtaggttatcagcagagaccacgtctgtcttgttcaacctgtgtcccaggtcctagcaccatgcctgctaccatttaagtgttcatgtgaagtttgttgttgagaaactaattacctaaaagttagaacttgacctttgcattttatcgaggaggctatgagactcagagggttacacagctagtgagtggcagagcctggacttgaactcagttgtgctgaagccagaatgtgttccttcctgagcattcaaggacagggaaggtgaaactccagctagtgggcagcccgtgtgcttgttctagggagactgcaggccgattcctgggagctgggtcttcatggtgacacagtaagaacaactcacctattggctgggcgcagtggctcacgcctgtaatcccagcactttgggaggccgaggtggttggatcacttgaggtcaggagttggagaccagcctggccaatatggtgaaaccctgtctctactaaaaatacaaaaattagctgggtgtggtggctcatgcctgtaatctcagctgctcgggaggctgaggtaggataatcgcttgaacctggtggggcggaggtttcagtgagccgagattggcaccattgccctccagcctgggtgacaaagtgagactctgtctcaaaaaacaaagcaaagcaaaacaaaacaaaacgaaacagaactactcacctatgttgtggatcaactgtgtccccactgtaccaaatccttatttatttaaaaaaatttgttttggacccttttcacaagatggtgccgaaagtgaagaaggaagctcctgcccctcctaaagccgaagccaaagcgaaggctttaaaggccaagaaggcagtgttgaaaggtgtccacagccacaaaaagaagatccacacgtcacccaccttccggcggccgaagacactgcgactccggagacagcccaaatatcctcggaagagcgctcccaggagaaacaagcttgaccactatgctatcatcaagtttccgctgaccactgagtctgccatgaagaagatagaagacaacaacacacttgtgttcattgtggatgttaaagccaacaagcaccagatcaaacaggctgtgaagaagctctatgacattgatgtggccaaggtcaacaccctgattcggcctgatggagagaagaaggtatatgttcgactgactcctgattacgatgctttggatgttgccaacaaaattgggattatctaaactgagtgcagctgcctaattctgaatatatatatatatatcttttcaccatatacatgcctctctgtcaatttctggttgggctgggaggccacacacagacactgacatgacagggcttgggcaagactcctgttctacttatccttttgaaatattcaccctgccactccaccatgtgtgatcactccagagatctttgtgactagagttagtgtcctaggaaaaccagaactcagaacttgcctccatggttgagggtaacaagaagctgtacaagaaccccttttatccctggaagaggctgtgtatgaaaccaatgcccagggtttgaagggcgttagcatccatttcaggggagtgtggattggctggctttctggtagcattttgtcctcacacacccatctactgtgtccaaccggtctgtctgcttccctcaccccttgcccaataaaggacaaggacttcagaggaaaaaaaaaattgttttaattattacatttatagcatcccagcttgaaaaacgaagcaacagagacgtgtagaaagttaaaaggtttctactccaattgtaatttctccaattccatcgtggtatgtgcattcttctggatttttttcagtgtgcatacacatgtgtacatacagacacatacacatacactcgtacgttttttatattgatgggaccattactcacatctttaatttggaacttattctctgctctctctccctgtgtctgatagaatgctggcaatgctttgtgatgctttaggagacacatttgtcagatgtgaagacttaggcttaggaattgatgggtggtgactgaggctggtcactctgtggtctggtgcactttcccactgccccactctgggtaggggtggaagggcccctgcagagaagcaccagcttctgttttcccatgagtgactcccctccctccaatactcactaggggactttccataagccaggctgtgtgatttggcccctgagatattcctggttggatgagaaatcttggggagactccagccttctcaggcacaaaactcccagagtagagagctccctctggactatctctcctgcccttggcctcaatttcctgttctgctacctggtccaggaatcaggacctcagtgatgaaacttggcttctcccaggctgcagagtcctgctggggtgtgagtccttgctcatggctcatgaaagttcaacatatgcttatggcttcaatattgggccagatttcacttcccaccttggccttcccaaggatgaattgtgtggtcccatgtgttggtgatctcagcatgaactgcaaaggaagaagaactcatgtgcatttttgcgcagctgggtgccgcatcccatggctgcccttggagggtctccctcttcattcatgtctctgctaaaaggtcacctcctcctggaagccctccctgattctctgatttattggattgtctgatttattggatcattgcctgtctctttacgtgatgtgatacctttgacagctgagcactcactgttgcatccccagtgcctggcacatagtaggtgctcaagaaacatatagttgcatgaacagccctgagaggcatagatttttctttttattttataactgaaagaagccctgagaatcagaaaggttaaggggttaactcccagcatccctgcaaagcctggagccaggaatcttaaaacaagtctacttaaacttgaaggattgtatagggatttcctggggttctattaagatgcaatcctgagttagtatttctggattggggcatgggattctgcatttcctgccagctctcaggtaatgctcatggcgcaggtccctggaccacactttgagtaactgagccttacagttaaagtgcatgttgccagctccttcccttcacctcctctttttgaggctctttcctctgaagactcctcctctgtccccctctaaagcccctcattccacatcccatctcccaaatgcaaaatctgagctcacagcaatttgggaggccgaggtgcgcagatcacgaggtcaggagttcgagatcagcctggccaacatgtgaaaccctgtctctactaaagatacaaaaaattagctgggcgtggtagtgggcgcctgtaatcccagctactcgggaggctgaggcaggagaatcgcttgaacccaggaagcagagtttgcagtgagccgagctcaccctccatcccgtcgcgccaatgcactccagcctgggtgacagcgcaagactccgtctcaagaaaaaaaaaaaaaaaagcctgagcccaggaggggcagtactgcccatcatcaaagcaaggacagagcagaaggagactccactcagggtcccctggctctgccttccactgtctcgacctcgtctgctctcagcttccctcagcgttacccttcacaggccccctctgtcctcctatgctgagcccagcatccaggttgctttcccagctggtctcgttatctccagaatctgaccctgggtaatccccagtggtgctgcattctttgttcctgctcctgtcagtcaggtctcagcctaggtcctgggctgctgggaggcaggacttgaattcctgccaggctggcagtggagggcaacaggcttctgtctctgaatctcctaaatctgcactgagaaatggtgcacagcattctcctggcccacatttggaggggaacttgggggatgttttgggagaaggcttggcctcacccagctcacctggcatctgaacacttcattcctttacctaccttcccctggtcttggaaaggcagggtggctgcacattttggggctcagatcaccattggctgccctccaacttaccctctgccttacatgagaggtaccaaggactgagtggccatgctcggtcaccctgaattggttcttctacagttatggtccccaccagtccccgggttttggttggctgccctggcacaaaggaggcatccaggctgtgaggattggctagtccagccccgcccagcctcctgaagtgtttcctagatctggggccaggagcaaaaacctcctggcaaaggaggagaggaggttgtgcgggacaaccttctcctgacagaaggtgccaggctgggggtggcagggctggatagggaggggcactgcccaagactgggatggctccagggagctggccctggtgatgggtgcttgcaggtaaccagaggtcaagttggctggtggttctagatgaggctgtctggtttctggtctctagtttccttgatctctaattttgtgtcacttctcctctcccctctcccttggcctcttcccctgagattccctgaatctccctccatgctcttaaccatgtttacccatcattggtcctggagctccccagcccctttcctaggcctcaggacctcaccctccatcccgtctgccctgcaggatgtcgctgctgagcctgtcttggctgggcctcaggccggtggcagcatccccgtggctgctcctgctggtggtcggggcctcctggctcctggcccgcatcctggcctggacctatgccttctatcacaacggccgccgcctccggtgtttcccgcagccccggaaacagaactggttcttgggtcacctgggcctggtgagtggcaggaggatggatctagtgtctcagggtggaagggtggaaatggggctcaggctgagggggtgggctcgggtctgggacggcagagaaactcactcattcctctgatcactcactcattcctcttcccactcattcctctcctcactcactcattcctctcctcactcactcattctcctcactcactcattcctctcctcactcactcattcctctgcgcactcactcattcctctcctcactcactcattcctctcctcattcactcattctcctcactcattcctctcctcactcactcattcctctcctcactcactcattctcctcactcactcattcctcttcccactcactcattcctctcctcactcactcattcctctcctcactcactcattcctctcctcacc

SEQ ID NO: 7972 - DNA, 6000 bp, Homo sapiens
acccaaggcctgcaacaagtacaacccagctaccactgatgattattcagggcctatgtcctctttaatctgcaggtggtaaatcctgccaggactgggtccttcccttcaaggcagcatgtttcctttgtccaagagtgtgtttagaaatgttgtctgggagctagagcgtggaatgggagcctcaggatgctgtctggtgccctattcttctgtggctgagctggtatccaagctgcctctcctcaagcagaaggaagaagtctctcctggagcagcaagctgtgctgcctggagttgtgggagggatgatgcttgccaagactcccttggctgccctggctggtgcctcactaggttgtgtgcaccccaagttctctggctctgagcccagcgcagcaccaggacttgctccagaattgcagtccttgtagctggatttaccacatactgattgtagagcccttgggcctttaacaaacataggtggtagcctttcaagtttatttaggaccctggagcactttagcctgcaatggtggtactagctggaactcaggttctgaccactgggatggacaattcccttctgactagggctggcctaaatgcttcctctgtcggcactggctaaattctaccccatgttgctttctgctgtgacagggcagcactgagtttcaatgcaaagtcccatgatcactgtgctctctcccctccactcaagcacccagattctctctccagccatgaggccacttctgggagatggggaagtgttagtgtaggcaatttaagactcttttggccaggcacagtgggttactcctgtaatcccagaactttgggaggccgaggcaggcagatcacctgaggtcaagagttcaaggtcagcctggccaacgtggtgaaaccctgtctctactaaaaatacaaaaattagctgggcgtggtggcatgagcctgtagtcccagctacttgcgaggctgaggcttgagaattgcttgaacccgggaggcagaggttgcagtgagctatcgtgccattgcactccagcctgggtgacagagcaagattctgtctcaaaaaaaaaaaaaaaaagaaaaaaaagaaaaagaaaaaagaaaaaagaaaaaaaacctgtcttttgtacattctttagtgcctctttaaatttttaatttttgtgggtacatactaggtatatatgtttatgaggtacatgagatattttgatacaggcatgcaatgcacagtaatcaaatcatggagaatagattatccatcccctcaagcatttatcctttgtgttacaaacaatccagttacattcttttcattattttaaaatgtacgattaagttattattgactatagtcaccctgttgtactatcaaatagtaggtcttattataggtctaattaattctttctatctttatttgtacccattaaccatccctaacttcccctcactcctccactccccttcccagcctctggtaaccatccttctactctctatctccatgagttcaaagtacctctttttttgatatgatgttaaaaccagataccatgatcactcacctaatttttggttcttatgaaggtattttcttgtgtggatatttgttgtatttggcgttcctgtggaggagacgatcaatgacgcattttattctgccatcttgctctacctcctcctttttgtgattcagatgagactccttgacagctggtggctaaattttcaaatgcaatatttttggcagaaaatatattcactcatgtaaaaaataaaatgcacagtgaaaaatgtttcttgtacctatgcccttcatttatccagtctcgccgtctttacaaaggtaaacacttttactttttctgtatcctttcatagtatatttaggcaaataatacatgtaattaatctcctttgttcaggatgatgaattgccccccccccccacgatggtcagttcacctccctggggcacaactgtaaaaccctcacagctctagctgtattcagggtcaactccaccagccatttcatccaccatatgactcctacagatgagatacgtaaggtgcagacaggttgagagatttgcccaaggtcacacagccaggaaatagcagaactgtatccaaacctaggcctggtgaacatccacaataccgcatgcctcctgcatggtctcaaactccttctccttgtccttgcctgtggacagccccactcatcttaaaattacatttacggccaggcacagtggctcatgcctataatccaagcactttgggagtccgaggcaggaggataacctgaggttgggagttggagaccagcctgaccaaaatggagaaaccttgtctctactaaaaatacaaaattatctgggcatggtgctgcatgcctataatcccagttgcttgggaggctgaggcaggagaatcggaggcggaggttgctgtgagccaagatagggccattgcactccagcctgggcaacaagagtgagactccgtctcaaaaaaaaaaaaaaaaaaaccaaaaccaaaaaaaagcaaaaaaccaaaaaaacatttactcagtaggcactctttttttttttttgatgatgagtatcgctctgtctcctaggctgaagtgcagtggcatgatctcagctcactgcaacctctgcctcctgggttcaagcaattctcctgcctcagcctcctgagtagctgggattgcaggcacacaccaccatgcccagctaattttttgtaattttagtagaagcagggtttcaccatgttggtcaggctggtctcgaactgctgacctcgtgatctgcccgcctcggcctcccaaagtgctgggattgcaggtgtaagccactgtgcctggcccagtaggcactctttaagagcaggtgtcacacagtagaaactctatgtagaccatatgtagaccatgagtcacagagtgggcacactatgaagagcaggtggcagcagtaggcactctttatgtagagcaggcagcagtgagtaggcactctttatcaggagcagatgatactcagtaaacactctttatatagagcaggtggcatctgtaggcactctttatctagagcaagtggcattcaatgggctctctctcttttttatttttttgtgagacagagtctcactctgttgcccaggctggagtgcagtggtatgaactcagctcactgcaaactctgcctcccgggttcatgagattctcctgcctcagcctcccgagtagctgggatcataggtgcccgccaccacgcccggctaatttttgtatttttagtagagatggggtttcaccatgttggccaggctggtcttgaactcccgacctcagatgatctgcctgccttggcctcccaaagtgcttggattacaggcatgagctactgtgcctggccagtaggcactctttatgtattgcaggtggtactgagtaggcactttttatgtagcgcaggcaagagtaggaactcttcatgtagagcaagcagcactcagtaggcaccctttatgtacagaaggcagcccacagtaggtacactttatggagcacaggcaacactcgagcaggcagcactcaatagaccctctttatgtagatcaggaaacactcagtaggaagtcaccatatagagcaggtggtatcagtaggcactgtttatgtagagcacttggcactcagtaggcatgtgttatgtagacagcaactggtgctcagtgggcactcttcatatacagggggtggcactcaataggcactcactatgtagagcaggtggcacacagtaggcactctatgaggaatatcaggaactgagtatacagggttaatgtagagcacctggcacacagtaggcacactttatggaaagcacttggcacagagtagacaggatttagcacctggcacacagtagctgcccttcatttagagtattggcacacagtagaagtactttccatgcagcctttgtgcagagtagagactggcacacagcagctcaagtgctagttgccaccctttcccttcactcctttttggggctccctcctcttaggagccctcattgtcccccgctaaggccctcatcgaacatcccatttcccagatgggaagactgcacccaggaggggcagtactgaccaaagtcagagcaaggatgaggcagaatgaggactccattcatggttccctggctctgcccttcccctgcctggaccccatccgttccctctcatcctaaccctccacgtccccgctctgtcctcctatactgagtccggcctccagatttgcttttccagctgagctcttaatctccagaatctgacccaggtaatcctcagtggggctggattctttgttcccgttcctagcagtcaggtctccaacagggccctggactgcctggaggcaagacttgaactccatccagcagcagggggatagaggcttgtctcttccaggttgcctgattcagcatccagaagtggtacacggtgtcctaccggcccagggttagagaggagcacaggagatgatctggaacaaggcttggcctggcctggctcgcttgacacctgaactctcaagttcatgcttttatctgccacacactcagtaggtgctctttaagagcaggtgtcacacagtggaaactctatctgacccctctcggcttactctccaccttatgtgggaggtgctgagacctgaggatccagtgcctgtgctgtgtcaccctgagctggttcctctgcatccagctggtctcccacacccaggttttggccagctgcccagacatgggagcggcacccaggctgtggggattggctggcccagcccagcccagcctagcctcccacagccttccctacatcaggggccaggggaaaaaacctcccagaagaaggggagaggaggttgtgtgggacaaggtgctcctgacagaaggtgccagggtgggggtggtgggcctggggcatcctagcctgtgatggagatgggcactgggcaagggattgggcgcacacataggggagccccagccttcccacattctccattgctgcccaaggcccaggcagctcctggttgctggcttggaggatgagtggttttctaactgaaaccaagcccctggcaacgtcctaatgattcaggctgggcctttctggactttaatcagtttctctgtctttctcaatctaagtgcttaccgggtaactggaggccacttggttgctggttttggctgggcctttctggactttacccctcagcccctgtttatccatccctgtttactcttactgttctatctccagcactgcccgtctctgcctctctccactgtccctggagctccctgggcccttccctgggcctcaggacctcactcaccaccccatctgccctgcaggatgccacagctgagcctgtcctcgctgggcctttggccaatggcagcatccccgtggctgctcctgctgctggttggggcctcctggctcctggcccgcatcctggcctggacctataccttctatgacaactgctgccgcctccggtgtttcccgcaacccccgaaacggaattggttcttgggtcacctgggcctggtgagtgtggcagcaggacgggtctggggtctcagggtggatggacttcctgaggggtaagaatgaggctcaggtgagagggggtgggctggggtctggggtggcagagaagcaggggaggcgtcttactcattcctctgcttactcatttctgtgaggtgccaacccaagcccttctcacctccctgttctcccactcttggcctgtgttgaatccttttcctgcctgtctttccacattaatgcacctctgcggggctcttgggcagggggttgggtgcacagaaaggtgaacccctggcgttcccac

SEQ ID NO: 7973 - DNA, 6000 bp, Homo sapiens
tctgtgtctgtctttgtctaattcttggtctttgtcaatgtctacatctttgtctatgtctgtgtctttgtctgtttcttttctttttctctttctttcttttttttttttttttgagaaagattcttgctctgttgccaggctggagtgcatgcaatggcatgatctcggctcactgcaacccctgcctcctgggttcaagtgattctgcttcagcctcctgagtagctgggactacgagtgcccgccaccacgcccagctaatttttgtatttttagtagagatgggatttcaccatgttggccagggtgcgctagatcttctgaccttgtgatctgcctgccttgacctcccaaagtgcagggattacaggagtgagccacggtgcccagcgtctttgtctgtttctatttatgtctacatctacatctttccctacgtttatgactttgcctatgtctatacctttgtctatgtctatatctttgtctatatttgtgtctgtgtctatgtctatatctatgtctttctctatgtttatgtctatgtctttttctgtccatgactttttctattgtgacagatgtctattgtaacaagtgcattgaacacctggatcacagcagcccatttattgctcacagtgacactagcagccggagtaggattgtagcattggctttcattcccaaatcacatttctccaagagcaatgcaatgtttttatctgtatgtggaacagtgtttgcgccctaggagaggggctccacattacgagtcttggcacattttctatttattttctcgacagagagagagagagagagagagagagagcgagagcaagagagagtgctttattctgaagcataaaccaattctctccagtgagatgtaatagtctgtagacttacaacacaaatgtcttcaggggaaataaataagattgtctgcatttaccacactggaatgtgagtatacatctttggagcaatacttaatctctaacttccaaggcgaattgttatttaattatcctgtaagctcatttgccagtaactttttctcagaaagttctcaacatgtagaaacatgaaaatattcatgtgtcgttgattcttcccaccagggacaaaagaagaaggaaggaagccagtgaggaagattgcatggtgtgggctctggtgatggtgaccaagagacatctaggagtgcaagctgggcttgggtttctggaaagaggatggatcttcagagtttatttcatgttagactgaggagtcctcagagcttgtgtggttttcaagggtgtttttccttctctccaggatgaagatgggaaggagttgtctgatgaggacataagagtgtaggctgacaccttcatgtttgagggagaggatcccagtgaggaccaagatgtctcatcccagggacgtggtgggtggaccctggatggcttcacccttcccatcccccttcccccatcctctctgaggccctcaatccatgggtgctgtccaccctgttgtgctgaagcagcccagagacccaagactgcctggctgcccctcaggctatgacaccaggaccagtggtctctcctgggtccagtacaaccttgcaatgcacccagaatgccaggagcgctgcgggcaggaaaggcaagagtttctgaaggtctgggagcctaaagagattgaatggtgagtgcaggtgctggtggctgttcctgagctccatgactcatgttggcaatgccgatggctctgctccccaggtggggatgggaggaggagttgtttttgtctattctgctactattgcttagtgggagtaggagtagaggatgacaggcaaggcttaatacccagtctggctatcaggggagaagttgcaggctgtttggacagcaaagatctgctctgctgagagaattggtgacaacatgtgaggggagatgatgccacttaacacatgtttagtagatgaacttcccctttactcccttctttttatccctgaaatgtcattttgcatgcataatctgttttcgttattgcaacaaccttgtgaggtgctgctgctgaaacgcccatttacggacgtgaaggagcacagcctggtggtgaggggggcacaatgtgaggctgggtgggtggtctgggtgcacagcccagatccaccagctctatgactgtgggtagtcactcaaatattttccagactggatttctcatttgtaaaatggaaaaacaaaatggttaatatagttaaaagacttaaaacaggctccatgactcatgttggcaatgtcgatggccgccattcctgctctaacctgcttgcccatcccaggcacacaggaggtctgcagtgagctgagcccctctagccactgggggcactttcttctgtgtccctaggaccctgcctgttcatcaacccctggctttgctccctgagcctaagaaggatggaaccaccagcaggtgaggtctgtccttgcagaggtagtggggattttgggggatgcaccctacgcgaatgaagctgtaggaccaggtgcctgaatcccctggctgattgagctggcaggggtggtggggtgggggtggtctaggggctccccagtacccagccagtgtcaggagtactgtcttccccaccctcctgctcagcagttctgctaggagccccctccttcaagcgcccccctcacctgagtccaccccacaggacaattcaggacaggatctagggagggccaggaggggagccctggatctgttgggaggagaatcctgcatgtgggagaaggagccaggtgctgatccaagggcctcaagatatttcccctttggggctatcacactgcctgagattactccattataaatgtccctatattaatatggcattgacactaaagaatgggggtggagcagcatggcagagggaacggatttggacttgagggtctcatagtcttgagttcctatgagctctgcaacttggactagaggcctgccctctctgagcctcagtttgcttttgtgttaaatggacaccttctctcctctggatgccatcactcaggtctcttcaacaatgcccagggttctggcctagggagctgttgggagggtggtgggacagctttgggcactgtgatgcaggtgagcatctgatacaagcaggtgcacgttatatagagcacctggcacatagtaggtgcaccttatgtagagcacctggcacacagtaggtgtactttatgtggcgtacctagcacatagtaggtacactttatgcggcatacctggcacacagtaggtgctctttatgtagcatatctggcacacaataaggcacactttatatagtgtacctggcacacagtatgtgtgctttatgtcaagtatgttgcaccgagtagttttactttatgtaggggacctaacacacgggagaagcattttatgtggaacatctggcacacagtaggtgtgctttatttagagcacctggcacacagcaagcatggtttatataaagggccagggactcaagatacaggatttgtgaagggctcccagcatacagtagacagtatttatgtggagctcctggcacacagtaggtgcactatatgtagaatagccagcacacagtagacaagatttatgtagattacttgatgcagagtaggtgcgctttctgtgggtcaccaggtacgtagtacacatgctcaatgtggagcacctgacacacagtaggtatgctttatatacagcacatggcacagagtaggcacgctttatatgaagtactctgcataaagtaagcttacattatgtacagcatgctgcacacagtaggtgagctttatgtggcatacctggcacatagtagacagaatttatgtacagtatctgatacacagtaagtgcactttatatagtgaaactggcacacagtaggtgcacacagtagtgctttccgtacagtctttcgcatggagtagagacaggcacacagcagctcaagtgctagttgtcatccccttcccttcagtccctctttttggagctcccttttcttaggagccttcctccgtcgccctctaaggcctcatctgacatcccatttcccagatgggaagcctgagcccaggatggccacactgcccacagtcagagaaaggacagggcagaacaaggactccactcgggatccccttgctctgccctcccctgcctggaccccgtcagctcaaggcccctctcagcctcatcccctgtgcctccgctctgtcctcctaagctgagcccagcttctaggtttgctcctccagctgggctctttatccccagaatctgacgaaggtaatcctcagcggggttggggctggattctttcttcctgcttcaagcagtcaggcctcaactcaggccctgggctgccaggaggcaggacttgaactcttgccaggctgtgaagccagagatgagaggcttctgtctctgaatctcctaagtctgcaccaagatgtagtgcctgacatcctccccgcccatgtttggagaggagcccagatgatctgggacaagggttggcctggcccagctcagctggctgccaactgtcatgataagtatatgcttttatctgaacacccttgtcttggaagggcagggtggaggtaaacttggggttcagagtcccctctaaccaccctccaacttcccctgcaaactcccaagaaggtactgagacctgagaattcagtgctcgtgctggggcaccctgagctgcacccagtgggcccaaccccaggttttggctggctgcccaggcacggaagacacacccaggctgtggggattggctgcctcagcccagcccagcccagccccgcctcctacggccttccctagatcaggggccagggccaaagacctcccagcagaagaggagaagaggttgtgtgggacaagctgctcccgacagaaggtaccaggctgggggtggcagggctggaaggtcctggcctgggatgaagaggggactgcctaaggctggggtggctccaagatgctggcatgggaaactgggggtttcctggtaactggactcctagcaaactcccaaggattcaggtggggcccttctggactctaatcggcccatctctttccctttctgtgtggttaccaggttactggaggccacttagttgttggttttggttgggactttctggacttcagatctcagccctcgtttactcacccctgagccctccctgccctgcccccagcagttcctgacttcgcccctatacactgtccccggagctcttccctgggcctcaggtcctcaccctgcatcccctctgccctgcaggatgtcgctgctgagcctgccctggctgggcctcagaccggtggcaacgtccccatggctactcctgctgctggttgtgggctcctggctactcgcccgcatcctggcttggacctatgccttctataacaactgccgccggctccagtgtttcccacagcccccaaaacggaactggttttggggtcacctgggcctggtgagtgtgacagcaaaatgtgtctggggtctcagggtggatggacttccagaggagcaggaatggggctcagtgagctaggtattgatggtggctggggtctgcgaccccagagaagcaagagagatggctcactcattcctctgctaactcactcattcctctacccactcactcctctacccactcactcactcctctacccactcactcactcctctacccactcactcattcctctacccactcactcattcctctacccactcactcctctacccactcactcactcctctacccactcactcactcctctcctcactcactcattcctctcctcactcactcattcctctacccactcactcactcctttcctcactcactcac

SEQ ID NO: 7974 - DNA, 6000 bp, Homo sapiens
atttttgtatttttagtagagacagggtttcatcaaattggtcaagctggtcttgaactcccaacctcaggcgatccgcctgcctcggcctcccaaactgctgggattacaggcatgagccaccgcacccagcctgcccatgtggcttctaacttgttccctgaccctgaccttttgctggaggcagtgaaggcaggagagagtggaggccacatccaggagcttccagggacctgaggggttggaggacaatgaaatccaggacacgccactgacttgcgcctgtctgccaatttttccccatttaaaaaagttatttaaagggccaggtgcagtggcttacacctgtaatcccagcactttgggaggctgaggcaggcggctcgcctgaggccagaagttcgaggtggtgaaactccacctctactaaaaatacaaaaattagccgggtgtggtggcatgcacctgtaatcctagctactcgggaggctgaggcaggagaatcacttgcaccctggaggtggaggttgcagtgagcagagactgtgtcactgcactccagcctgagcaacagagtgagactctgtctccaaaaaaaaaaaaaaaaaaaaaaaaagttatttgaattgtggtcaagtttatcttaatgatttttaagtgttcagctcagtggcagtaagtacattcatattgtcaccatccatctccagaactttttttttttggagacagagtctcgctctgtcaccaaggctagagggcagtggcacagtctctgctcactgcaacctctgcctcccaggcgcaagtgatcctcccacctcagcctctcgagtagcagggaccacaggtgtatactaccacactcggctaatttttgtatttttttgtagagatggttgggggggtgtctcactttgtggcccaggctggcctcgaacccctgacctcaagtgatccacctgccttggcctcccaaagtgcagggattacaggcgtgaaccacctcacccagcccagaactcttccatcttgcaaaactgaaacactgtggccttaagcactcactccccaatccccctcccccagcctctggcaccccccaacccattctacttcctgtctctatggaggtgaccactccagggacctcccatgagtggaatgactcaggatttgtctttccgtgaccggcttatttccctcagcataatgtcctcaagattcatccacaatgtagcatatgtcagaattcccttactttttaaggctgcctttttttttttttttttttttttttttggcagagtttcactctgtcacccgggtgggagtgcagtggtgcaatcacagctcactgcagcctcgacctcctgggctcaagcaatcttcccacctcattttttgattttttgtagagacaagatttcactatgttgcccaggctggtcttgaactcctgagcccaagcgatccctctacctcggcctcccaaagcactgggattacaggcatgagccaccactctgaaacagcccggcctggctgtctgccctttttaagaaaataagattttggccgggcgtggtggctcacgcctgtaatcccagcacttcgggaggctgaggcgggtggatcacctgaggtcaggagtttgagacctgcctggccaacatgatgaaacctcgtttctaccaaaaatacaaaaattagccaggcatggtggcgggtgcctataatcccagctgctcgggaggctgaagcaggagaatcgcttgaatccaggaagcagaggttgcagtgagccgaaatggcaccattgcaccttcagcctgggcaacaagagcgaacctccatctctaaataaaaaatattttggccaggtgcagtggctcatgcctataatcctagtgctttgggaggctgaggcaggtgggtcacctgaggtcaggagtttgagaccagcctggccaacacgacgaaactccgcctctactaaaaatacacaaaattagccgggcatagtggcaggcgcctgtaatccctgctgctggggaggctgaggcaggagaattgcttgaatccaggaagcagaggttgcagtgagctgagattgcgccattgcactccagcctgggcgactgatcgagactccatcttaaaaaaaaaaaaagtttttatggaaagtaacacagtgcacagaaaactccaacagtacaaaacagacacatggtttcctctcctccaaagctgtcgcgcccagcgtcctccgggaagtacctgggcagtgtcgcctgggtacagcttgtgcctgacaggggcaatgtcatcgtcacctctgcttgctggggttcccccgacagcctgtgctgccgtgttgttcccggggaggggctgttggcgggcacctccctgctttgtgctgctgtgtggatatcctcccaaggacatcttcctgtgcgtgtgtctggcagaaattcctagacatggaacccttgagtataagggcatgtgcgtcactatgttttttttttttttttgagacgcgtttcactcttgttgcccaggctggagtgaggctggagtgcaatgatgcaatctcggctcactgcaacctttgcctcccatgttcaagtgattctcctgcctcgcctcccgagcagctgggattacaggcatatgtcaccatgcctagctaattttgtatttttactagagatggggtttctccatgttagtcaggctggtctcgaactcccaacctcaggtgatccacccgcctctgcctcccaaagtgctgggattacaggtgtgagccactgtgcctggcttttttttttttttttttttttttttgagtcggagtctcgctccgttgcccaggctggagtgcagtggtgtgatctcagctcactgtaacccctgcgtcctgggttcaagagattttcctgcctcagcctcctgaggagctaggactacagacgtgcgccaccatgtctggctaatttttgtatttttagtagagacgggttttcaccatgttggccaggacggtctcgatctcttgacctcgtgatccacccacctggcctcccaaagtgctgggattacaggcgtgagccattgcgcccggtcgtgcatcactattttgatgcatcatcttcaaaccaccctgccccagcatcactggactgccggtgtgcccagcctcccctgcacagcttcccactctgctcacagagaagacggtggaggggggagcccaggcgtgggttttccgtgtgctgagggtgtcctcagccacctttttccccaagtcattgacgtgaagctgattttctcattggtggccatggaaactgcccagaaatgggagcagggcctctgagaccctgccccagctagactctctctccaggcttcagtgtctcctcctggagctgggtgttgactctgtccaagactctgctcagtcacttcctggctgatccccgagtgctcaagtgtgtgatgagattagggctcccccaggcaggaaacggccacattggacccctccctcccccatccctagttcattttattttccccaatcctcatggctcccaactaggccctcctgctcccagacccccccaagccctgtcccccatcccctgtagcccagcgctgagcacactggggccagaaccacccataccagactcccccagggcacgacgggttgaggcctctctgaggcagggagggacaacactgaggggccttgtgcagaagagggaaggggtacccccccgagcttcagtttcttcatctgcccgatgagcccccatccaatggtacccaggagtggggatgtgctggggctagaggagggaggccccctggaggctggcttggggacccttcaacctggccacctcactcagggtcagaggtcagagcaggcgagccacacaccccgaagtccccccggtcctcggcaggtgctgtccccagcatcactgtctcccctacagatgcccgtgtgtcccctgggcaagagtgaagtgaggcactcatacaggggtgccttgtgagtatggggtcagccgaggatgctgaggggctctcgaggttcagccagagtccctgacgctgggctcgtgctgctctgggggtctgaagggaccctcgctattaccctctgggaggcgcccatccttggtttttttttttttttttgccgagtctcgctctgttgcccaggctggagtgcagtggcaagatctcggctcactgcaacctccacctcctgggttcaagcaattctcccacctcagcctcctgagtagctgggaccacaggcatctgccaccaagcccagctaatttttgtatttttatgagagatggggtttctccatgttggtcaggccggtctcaaactcccaacctcaggtgatttgcctgccttggcctcccaaaatgttgggattacagccgtgagccaccgtgcctggcctagcagggctcttcttatcctgctcaccagagataggaagtcggggggtgacttcaggaaaggcccagagcccgtgatgggcgtggggattggggtgaggacagggctgtcgtgagaacagtggctgcagatgtgagcggctggcaggaagtggccacttgaaccgcagatgcttcctgggctggtcagggaccgggggtgctggctgcagctgggacccccccccctgcatcttgctggcctggcacctgggtccctgggaggcgccacactggatatagccacgtggggcagcccggtctccataacccacactccagtcctcccacgggctggctggcaagcggccctggtgggtctgcgggggcaggggcagccttcctggtttatctctaccggcgcgatctgctcgtccgcctcggctccagaagctggggctcagggtccggcgaggcaggaagcctgaggccacagcccagagcagcctgagtgcagtcatgtgggggcgactgctcctgtggcccctggtgctggggttcagcctgtctggcggcacccagacccccagcgtctacgacgagagcgggagcaccggaggtggtgatggtgagtggtcctggctttggggtgcagagatggggttacatcagagatggagctgggggcccggagctggggagggggaggccgggaagttgcgggcttcagcccagcccactctgtatcccgtctctgaccccatagggctgggctattcccttgagtgtcatgtccagctgtttcccaccagggcagaccccaggctctgagcacctccctccctgctgcttctcgtcacctgccgaggcaggggctgactgaggtcccctctctctcccagacagcacgccctcaatcctgcctgccccccgcggctacccaggccaagtctgtgccaatgacagtgacaccctggagctcccggacagctcacgggcactgcttctgggctgggtgcccaccaggctggtgcccgccctctatgggctggtcctggtggtggggctgccggccaatgggctggcgctgtgggtgctggccacgcaggcacctcggctgccctccaccatgctgctgatgaacctcgcggctgctgacctcctgctggccctggcgctgcccccgcggatcgcctaccacctgcgtggccagcgctggcccttcggggaggccgcctgccgcctggccacggccgcactctatggtcacatgtatggctcagtgctgctgctggccgccgtcagcctggatcgctacctggccctggtgcacccgctgcgggcccgcgccctgcgtggccggcgcctggcccttggactctgcatggctgcttggctcatggcggccgccctggcactgcccctgacactgcagcggcagaccttccggctggcgcgctccgatcgcgtgctctgccatgacgcgctgcccctggacgcacaggcctcccactggcaa

SEQ ID NO: 7975 - DNA, 6000 bp, Homo sapiens
gggcccgcggtgcatgtctcccggtgcagtgcatgctggggttccctggggccctgggcccctcgtaggatagacagagcctgtcctaaccttccggaagtgcatgctggggaggccccttgcctgctgaccttctgtgctcaggacgactaatcggccacatgaccaccactctgtcccatgggattcctagagaagtctcactaagagcccagcacactcacatcacaactaacctcctgggatctgctcacacctccggcagtaacctcgcccactcagagatgtcagtgggaccccttgcttctttgtttcagaacaagagccccaagacccgggacatccaggaggaggagctggaggtgctgctggaggaggaggcagccggcggcgatgaggaccgggaaaaggagattctcattgaacggatccagtccatcaaggaggagaagcaagtggctcagtcccctccctcagtccttcatgtttagggcaagctggagtgcaggttccatccctggtggtccgcttgacctcgccaggtttggtcctgtcatccctaacactgggcaaacaacactttttttttttttttttttttttttgagacggcgtctcgctctgtcgcccagctggagtgcagtggtgctatctcggctcactgcaacctccatctcccgggttcaagcgattctctgcctcagcctccgagtagctgggattacaggtgcccaccaccatgccctgctaattttgtgtttttaatagagacagggtttcaccacattggccaggctggtcttgaactcctgacctcaagtgatccacccaccttggcctcccaaagtgttgggattacaggcgtgagccaccgcactcggcctttatttctgagacagggtctttctctgtcacccaggctggattgcagtggtgcgatcacggttcactgcagccacaatcccctaggctcacggggtcctcccacctcagcctccccagtagccggaaccacaggtggtgcacaccaccacgcctggctaattttttttactttttgcagaacagggtccgcctatgttgcccaggctgggttcaaactcctgggctcaagcaatcctcctgcttggggtggggggaggttggggacacagagttacatctaggagcaggacagcctgctctgttccacactggcccagcacttccggtggggtggccttggacaccactaccctttttcctccagggaggacatcacctaccggctgccggagctggacccaaggggctcggacgaggagaacctggactcggagacgtcggccagcaccgagagcctgctggaggagcgggccgggcggggggcctcggaaggtcagtattaaggtagcgtctgcttttctccttcccgtccatcccagcaggccccagggcgagggtcctccggctgccggccctgaagctgcagtaaccctgccatctgtctctcaaaagggccccctgcgcctgctctcccttgccccggcgcgcccaccccgagccccctccccaccgtggccgcccctccacgacgaaggccgtcgtccttcgtaacggtcagagtgaagaccccccggcggacccccatcatgcccacggccaacatcaagctcccaccaggcctgccctcccacctgcctcgctgggcaccgggtgcccgggaggcggctgccccagtgcggcgccgggagccacctgcccgccgcccggaccagatacattccgtgtacatcacgcccggggcagacctgccagtgcagggcgccctggagcccctagaagaggatggccagccacctggggccaagcggaggtactcggatcccccaacgtactgcctgccccccgcctcgggccagaccaatggctgagagccacagctgacaaagtctgcatgtccgaggacggcccctgcactggagctgggcgccagagctgcagagctagtgttcggccctcagagaaggatccagaatcaaaagctcaagagtgacgtgaggtgggcaccggccccaagtgcagagtcaaggcagggagaggccggctggagccaggccccctcgcacgcagcccccaaatcatggacgcacctgtggggagcaccacatctccacctgcggcctcacatctccccactcccctttttgtacgtttaactgtttctttgtacgtggtttacgtaactttaaactgtaacagccttaatggaagaccaaatggttttttatatgtgtatgtacaaagttttctattaacgctgcccgtctcccttataacctggacgtgagctgtcagagcagaagccactaggccactgcgcgtctgaggctcagaccctgctgtggttggcttggggtggccaatgggctgggaccctccatgagagttttggacacttgggtcacctgacccgtgcctctctgacacatgtctccggggggcagccacctggccaatgtgcatttttgcacatgctggaaccttccatgggggtctgggctattggctggagccaggacatgagtcaggggcaccatggacctcacgtgccagggagacttgaatgtggctgtcactcttccggacgccaagggctgcaggaggctgcttttggcactacccaccccgtgtgacagaataggagccagcgactcaggactgctcacgggtcaggagggcaacgcctgaagtcagacctccctataggtcaacagggacaacctggggatctctggagcagggccctcctctctcaggcttggcccactcccccagacacctggacacgtggccacaaatctgggacaaggggcccccgcacagcatgaaataaaaagtgcctgagaagtgtgtgcatgggacgcctgctcatatgggatcgggcttggaagaacagggccggtgggtgggggtctgccctgtggcctcagccaagaagggtgcagaatatgggtggaacactgtcctcaaagttctgtcttgatcctccaccaaacagggagctcccagcagagcctcacttggccaggagcgcctgctgtcctggcagccctctctggcctccctgattcagtgcccagcctctggagcctaaatgtcagctgcagcagccacccatccagcagaggtggccagttcctggtgggcccagcaggacaggaacagatgggctcccaggctgccatcggatgggagtcgtgggaactggctggctggtattggttggggcaccgtgaagaacccaagttcagacagcacatgccagaggttgaggggcttctccaaggccacacagttgggaggggcatggctgggatttagactctgccctgccagcctctagaggcccctttgatgggccctgggtttggtctccattgtttgttgtgggtttttttcttgaaacacggtctcgctctgtcacccaggctggagtgcagtggcgcgatctcggcccactgcagcctccacctctcgggttcaagcgattctcctgcctcagcctcccgagtagctgggattacaggcacgcacaaccaagcccagctaatttttgtgttttttgatagagacagggtttcaccatgttggccaggctgctctccaaactcctgacctccagtgatccatccacctcaccctcccaaagtgctgggattacaggcgtgagccaccgcacctggccctccatggtattttctttttttttttttttttttgagacggagtcttgctttgttgcccaagctggagtgcagtggcacaatctcggctcactgcaacatccacctcctgggttcaagcgattctcctgcctcagtctcccaagtagctgggattacaggcacccaccatcacgcccggctaatttttgtatttttagtagagacggggtttcaccatgttggccaggctggtctcaaactcctgacctcaggtgatccatctgcctcagcctccctaagtgctgggattacaggtgtgagccaccgcacctacccgtctatgatatttttcaaggacatcaggcccactggtgtaaccaaggtgcagatgacctaaggtgtgggaaaacatgaaggctgcatgccaggccctggttcctgtgaagcccccaccctcatcctgtcactccagaagagaggcactgcaaggcataggggtactcagcttccaggtactgaggtgggctgggaaggggttctccatgggggtctgggcgttaggggggacccagccccaccttgctcactctcaggcagagctgtctcatgtgccccttgaggcaggtactgtcacactgtccatttcccgggggaagaagcggatccagaaaagttaaactctcccagggccgaggatggaatcagagctggagctgtgacctggaaacccataaccacaatacagatgagccctgctgaggtgggggaagccttggattcctgaatcccaggctacagaaatcgggaagggtgtgtggacgtgaaatagctccgactgggaagaatccaggtaggagtggggtgcggggaggtactttgagcaggcaaaacagaacaaaagggcacactgcacgcgggtctgacaccagaagaccccggtcgtcctatcattcccgaagggttaacatgctctcgaggaaaagcaagtgattcgcctaagtaagaatggggtggcgcctctcctatttttttaaaatagagatagagtagcgctatcttgcccgggctggcctcaagcaatcctttcccacctctgcctcctaaaatgctggcattacagccctgagccaccgcgcccggcccagcgccccgtctcaaaacaagatattacttccgctccaaacaaagatgggccagctaacgagcgcgggggaaacatccgcccggaaggccacttgaaggcacttccgccctctcttaacatggagccggcggaaggggtggtgtagggccgggcgataatggcggcgtcgaggctggagctaaacctggtgcggctgctatcccgctgcgaggcgatggcagcggagaaacgggacccggacgagtggcgcctggagaaggtgaggggatctcgcactgccgcgtagagcccgactcccggggggtgattcctagggttggaagccacctggcccgactccccggccccagtagcctctcgggcagcgccctttccggtcagtcccgccacgtccacctgtagcttccgcccccgtccctgggactccgcccctcccccactggccccgcctcctttacgcttgacccctcccatttgtcggccccgcccccccgactcccatgatcaggacatgggaaagacccccgggtgacaatccacttttcctccccagtacgtgggagccctagaggacatgttgcaggccctgaaggtccacgcgaggtgagtgcaggcagcctcagggctttcacatcagcacgtggctgtgctactggacatcccagtaccgctatcccagctgggacccttccctgagctggggaccatggacaggttttgtttttcttcttcctgccttccagcaaaccggcctctgaggtgatcaatgaatattcctggaaggtggattttctgaaggggatgctgcaagccgagaagctggtgagaaggggtgcccctgccccctcagcccccatcaccgctcactttggtccccaggacctgcccctccagtgacttatcttcccacatttctgcagacctcctcctcagagaaagcactggccaaccagttcctggcccctggccgtgtgccaaccacagccagagagcgagtgcccgccacaaagacggtgcatctgcagtcacgggcgcggtacaccagcgagatgcggagtgagctactaggcacggtagggctccttccctggtccctgggaatcccttggacaggaataggggttctatgcttgtaggcagccagaacca

SEQ ID NO: 7976 - DNA, 6000 bp, Homo sapiens
ctgggtgacagagtgagaccctgtatcaaaacaaaacaaaacaaaaacaacaaaaacgtcagctgtaggaaggaaggatgattataggagttggggcatcaaatgggggcagaggtggctgcagcacctgccctgtctggctacaaacagcccagggacttcccagcccttcatgtcttctcccttgcaggtcttagcacctaggctgtaaattcagagaccacacctgcccagtgggtgtggctctgggtgtcagagagtagtggcatccatggggccactgggtgtcagacatccatggggccctgggtatcagagctgagctttatagaggtgacaaaatcaaaatctgtttgccaccacctcctcataatgtagcctaatctgggcatgggttcttccctgtctgataagtggcgggtacatggcacctcctagtagcttttatttgccttcctggggacacaaatgaggctgggcaccttttaaaatgaagaaggcatctgggcatggtgactcatgcctgtaattccagcactctgggaggccaaggcaggtggatcacttgaggtcaggaattcgagaccagcctggccaacatgataaaaccccatctctactaaaaatacaaaaataagccaggcgtggtggtgggcgcctgtaatcccagctattcgggaggttgaggcaggagaatctctggagcccaggacgaggaggttgcagtgagctgagaacatgccactgcactccagcctgggagacagagactccatctcaaaaaagaaaccaaacaaacagggctgggcgcattggctcacgcctgtaatcccagcactttgggaggcccaggccggtggatcacttgaggccaggagttcgagactagcctggccaacatggtgaaacccccatctctactaagaaaacaaaaattagctgggcgtggtggcaggtgcctgtaatctcagctactcgggaggctgaggcaggagaattgcttgaacccggcaggcagaggtttcagtgagcccagatggcgccgctgcactccagccttgatgacagagcaagactccgtctcaaacaaacaacaacaacaacaacaaaaaaaacaaaaaaacacaagcaaacaaaaaagcgcagaaggcacttttcccaggtgtggcctcctaactgcccagccttccagagcaggtgtgacgtgacctatctcagaagagtgaattccaagagagagggcgcggaacccgttaaacctgccaaccccgggcaggcgtgatgccattatgcagtttacatgccctggtctcttccacccgggtggccttaaaacctcagctgtggtacagagtgatccattggcacagcaccatcaactgggccacatgtcagaggccacccccagctgataagtggcctaattggattttcttttgagctgaaattcacaaaacaaaaaatgaaccactttaaaatgaacaattcagtgagtttcagtatattcataatatgtgcaaccacaccctttatctaatttgtgcacattttcatcccctccgaaaggaaaccctgtccccttcagcagtcatgccccatttcccctcccacagctcctggcaaccactaattagcttcctgtctctgtggatttgcctgttctgggcatttcacataaatggaatcatacgacatgtggccttttgtgtctggcttctttcactcagcatcgtgttttttatttcatccctgttgtagcagggatcaggacttcaatctcttatcaggacttcaatctctctcttttttttttttttttgagacagagtctcgctctgtcatccaggctggagtgcagtggcatgatctgggctcactgcaacctctgcttcctggatttgagcagttctcctgcctcagctccccgagtagctgggattacaagcatgcgccaccatgcccaactaatttttgtatttttagtagagagggattttgccatgttggccaggctggtctcgaactcttgacctcaagtgatctgcctgcctcagcctcccaaagtgctgggattacaggcgtgagctactggccaggacttcagtctttctgatggctgaaaaagactccaggcagggcacagtggctcacacctgtaaccccagcactttgggaggctgaggcgggtggattgcttgaggtcaggggttcaagaccagcctgggcaacatggtgaaacccccgtctctactgaaaatacaaaaagtagccgggcgtggtggcaggtgcctataatcccagctactcgggaggctgagacaagagagctgcttgaacctgggaggtggaggttgcagtgagccaagatcctgccactgcactccagcctgggtgacagagcgagactctgtctcaaaaaaaaaaaaaaaaacaaaaaaaaaaaaaactcaagactccactgatggaccacatgttgtttatccattcatccactggacacttgggtgggtgatcaccacccaagcagctgaaaagaacactgtgaatcatgctgctatgaacttccctatgcaagcatttgtttcaacacctgttttcaactcctttgggtagatacctacaagggcaatggcgggatcatagggtcattctagtccggatttgaacccgggccctccagcaccagaattcactctattgcgtccagtgaaccccggaagcacccggtttaaaaggtctgggggctcagggtatctgtatgtcttacacatgggaaaagggtgggagggttcagtttccctgggtgagtggggcggggctagagctcacatcctcccagcagcctgaattctggagggccagtacctggtggaggaggggatgggcggggaccctgtcacaggatggtacttttttttttttttttttttgagatggagtctcactctgtcgcccaggctggagtgcagtggtgcgatcttggctcactgcaacctctgcctcccaggttcaagtgattctcctgcctcagcctcctgagtagctgggattacaggcgcccgccaccacacctggctaatatttttgttttttgtttttttttttttgagatggagtctcactctatctcccagactggagtgccgtggcatgatctctgctcactgcaacctccacctcctgggttcgagtgattctcctgcctcagcctcccgagtaggtgggattacaggcacccgccagtatgcctggctaatttttgtatgttttagtggagacggggtttcttcatgttggccaggctgatcgcaaagtcctgacctcaggtgatcccctcactttggcctttggaaggtgctgggattaccggcatgatctgcccacttcggccttccaaaatgctgagattatagggttgagccaccccgcccgcccaggatgggacttttggttccggctccttcccggccgacaaatcccttcctggggccatgacttggtgaacccagggacccaacagggtgagcatagactctgaatcaaagtccaaggatgtaccacagtaagaaagtgtgtgcatccagaaccgaggccagtagtgccacatttgacactatgacatttccggtaattgccctccatacagttttaatcatgcatttgctctgagggttcactccccagacctctcccatccagagtacccaggggctatttcttacattttacaggtgaggaaactgaggcacagacaggccacatatacacctcggcttcctcctcgggaagaaacagggatgaaggaggaaggaggggtttcctgaaaccatagcccagctcacacacctggacttccccaaccccagagctcccaacgctgggtccaggctagaatctcctagagattcagaggcagcacagggcagggttcgaatcctagccaacccaaccctaaaaatctacaaatctgaggccaggtgcagtggctcacatctataatccagcaccttggggatctgaggcaggaaggtcacttgaggcccacagttaagaccagcctgggcaacatatcaaaaccccatatctagaaaaatgacaaaaattagccaggcatgctggcgggtgcctgtagtcccagctactcgggaggctgaggtgggaggattgcttgaactggggaggtcgacattgtagcgagcggagatcacaccactgtactctagcctgggtgacaaagcgagatcctgtctctcaaaacaagaaaaaaagaaaaagaaaagactacaaatctgtctgattgttgacttccagaacccttccaaatgccagcaggtggcatctggatgtctgggggcacatcgtaggttttcgggtcctggaattattttcaatatagagatggaatctcactatgttgcccaggctggtctcaaactcctgggttccagcgatccgcccccctcggcctctggaagtacaggagtgagccactgcgccgaccccagcttcaggaatctttgaactccccgcagagagcagaggtgccgcaaggtttaacctgcctccctccctccttatcgccatgggcttatccaatcatttcttcacggaacacacgtgggccaacgctgaccgggctctgtgccaggaacccgcaaggcgctgcttgttcatctccagccacggggagctcattccctagcagcgggccagacccaaggtggggtcgtgagccccgagaggggcgagggtggcaagagcgggatggcagaggtggcagccgggaccggagaggggaagaggcatggccggggagggaggagccggcagagaacttcgcctgggccaccaggaaactcagccgagctgggaagagggggactggcaagcggccaaggcggagggaggcaggaaggcgtgaggcccggtgggagggaggaagcgggagaggggcgggagctctggctcaggtaaaaactctttcttcggctcgcgagctgagaggagcaggtagaggggcagaggcgggactgtcgtctgggggtgagtgtcggcagcccccggaggatctggcggaccccagtggtgggggtttgggggtggggaagttgtggctctggagaagcccctgccggtctccaccgcgcataccctgcagatgtgggaacattcgggagccccgagtctcgagaacccggttgccctcacccatccgtaattgtctccggcgttcccaaggccagctcggacctgggtcggggaggaagcctcccccacagctggcgacccgggaccccggcgcccctcccagattgggcgggatcagacccccgaggcggatgccgcttagtcagacttggctgttactgttacctgtgttgttgagattattggccccttggttgggagtatctgggcaagccagcgctggggtccccggttgggtttgggaactgcaggtgacccccagtctctccctgcggttccggtgctgcaggccctgccaggtggctgggcggcattccaggggccctggctgcgtggcatggacacattgctgaaccggcctcagtttcccctccgtgaggtggaacaatgaaccagctgggatgaggatgcccgaagcgtttagtcaaaggaaatttttgtgatgaggtgtactgctggccactgggggcccttgcgtgactggcgttaggtctctgagcctcagtttccctgtgtgttaagggggggtctcatggcatgggaccttggcgaggatgagttgagtggataggagctgtggccactcagtgggtgcccagggacagtcagctgtcatcataattatattaattatgtctgtagccactgttcagattcactcctgttccaagaatcccgaccatcttttcctctgggtcagatttaaactttttgtttgtttgttttatttgtagaggtgggggactcactttgtcacccaggctggagtacagtggctccatgcactgtatt

SEQ ID NO: 7977 - DNA, 6000 bp, Homo sapiens
acagagcgagcccctgtctcagaaaaacaaatagaaaaaataagcaaacaaaaagaactgcccctggctgttgagagaaggtacaagaccaaccagagcaaaagccctgggtctgggcagaaatggatcctttcacgtggctgtgagtggggccaataaggcagaggctggccagcgagaacctggatgtccgctggggtctggagcaggacaggtcctacccgggctcacccagttaacccaaggataagcaagggcaggaatccaggaactcctcccacctcctcaggtgctgaggcgctcctgggtctcgttcctgggcttgtcaaggtgccaggtgtcacctcagtagggccgtgatccctgggggagcgacattcaaagcctcccctccctgacccgccctgcacttctgctcctgagtcagaaccagtggggacaaaggcagtgccaaagcaggacagacgagtagggaccccaagagaccccagccccagttcctgcaaccaagagagactatatgagaatcacagaatctgagactcacagttgagtctcaggacttagaattatggaatctttttttttttttttttttttttgagatggagtttcactcttgctgcccaggttggagtgcaatggcatgatcttagcttactgcaacctctgcctcttgggttcaagcgattctcctgcttcagcctcccgagtagctgggattacacatgcctgccaccatgcctggctagttttttgtgtttttagtagacacggggtttcttcatgttggccagggtgggcttgaactcctgacttcagatgatccacctgcctgggcctccaaaagtgttgggattacaagcgtgagcaccgtgcccagtcgaattgtggaatcttacagacagcagcagcaacaaggaagaatagtttgcatttatttatttttttagagacagggtcttcttctgtcgcccaggctaaagtgcagtggcgcaatcaccgctcactgcagcctcaacctccccagctcaaccaatccttctgcttcagcctcctaagtagctgggaccacaggtgcacaccaccaaactcggctaacttttaaaaatttttggctgggcatggtggctcacacctgtagtcctagcactttgggaggcagaggtgggtggatcatgtgaggtcaggagttcgagaccagcctggccaacatggtgaaaccccttctctactaaaaatacaacaaacaaacaaacaaacaaaattgtagagttggggtctcactatattgttcaggctggtctccaactcctagcctccagccatcttcctggcttggcctcccaaagtgctgagattacaggcatgagccaccgaaactggcctttttgcacttgttgagtgcagagttgaagttcaaggacagattctggctccccatggcgtgggttcaaatcccactgtcactcctagctcacagaaggggaattgatgtccagggccacccagcaggtcgtgctgcagtcacagcagctcacaacttctcaccccaacccctgctgcatctcccagggaaccaaggggcaggggacagcgccccgacactgccaccactctcccattcctgcacattctgctcacattgtctgccgcggccttgggcccttcctaactcacatcctggggtcctgctgcccgcttctgtcattggaatcacagtcaaggaaggtgtgacctgattctccccactctgctgcttttcctctccaggctcacaattccctccgctagggcaggagatggtcctgcacactctgcaggggccttcactccaggcctccttaggaattccaaagtgctttccaaatccacccccctccccccactcggcagccaccccactcccgccacttggatatgacccatttttcagaatctagaaatctcatcagactcctcacctgctccaaactctcctacagttccccagcaccctcagaacaaaatccacaccccttccggaggcccagaagataccccgtgattgtctgtctctgctcaacctgtatccaggctggaattcactggtgtgatcactgctcactgcagccttgacctcccgggctctggcgatcctcccacctcagcctcccaaagtgctgggattataagtgtgagccacagtgcccagctgaaatcagtatttatctgctggtgaggtcagggccatcaccaccctggggtgggtccacctggatcatgctgtgtccccagcacctgccggagggccctgcacacagtatgcactcaatgaaccggcctcagcccaggcctctggccgcagcctggaccccacggtgggaagaagagaagctatgccttcccagaacttccctggagagaaggggtccatttacatgtatttgcacaatttgcatatgtttacattggtcggcagggctttgcaagtaggggatcccgctcggatctcccattgattgattgattgattgattgagacagtctcgctctgtcgccaggctggagtgcagtggcacgatctcggctcactgcaacctccgcctcccgggttcaagcgattctcctgcctcagtctcccgagtagctgggactacaggcgcgtgccatcacgcccggctaatttttgtatttttagtagagacggggtttcaccacgttggcctggatggtctcgatttcctgacctcgtgatccgcccgcgtcggccccccaaagtgctaggattacaggcgtgagccaccgcgcccagccttgatttttatttatttatttgtttatttatttattttttgagacggaatctctctctgtcgcccaggctggagtgaagtggcgcgatctcggctcactgcaacctccacctcccgggctcaagcgattctcccgcctcagcctcccaagtagctgggattacaggcggccgccaccacgcccggctaattcttgtatttttagtagagacggggtttcaccatgttggccagactggtcttgaacggatctcaagagacccgtccgcctcggccccccaaagtgctgggattacaggagtgagacaccgcacccggccggatctccccttttccaacggggtttccaggaggatgcctgaccagggtggaaggagaaagaactaggtgcctaacccactctcctggcgagggcaggaggtacgctccagccggcaacaggtgcccgcgtagccgccgcagtgtcacagccccgggggagggacaggtccaccctgcacagcagagagggagcaagaggactgtccgggggttacgtggggacgcgttgagaaacgctggacccagctggagcggccagggcagagggtaggccagaggaggccaccagggagcagcagaggctggcgagaagcgctcaaaagccctttttttttttttttttttttttttggagacggggtcttgctgtgctgcccaggctggagtgctgtgcagttctcgaccacagctcattgcagcctcgaacttccacgctcaagcgatcctcccacttcagcctcctgagtagctgggattacaggcatgtgccaccacgcctcgctaatatttgtatttttcatacagacaagatctcactatgttgctcagggtagtctcgaattctgggactcaaatgatcctcccacttcagcctcccaaagtgctgggattacaggcataagccatcatgcccggcctctgacgctgtttctttcaacccccaggatttcagattccaccagcttatggagaagggaaccaagtttgagatgcgtgattgcccagaaagttggaggctgagctgagacttgaacccagagaccagaacctccagaggtcaaagtcctcctgggtcccccagagaagggccctgagatgacagctcgttggtcctcatggaagcgtgacccccccagtagactttctcccacacccaaccttggtttcctcatctatatgatagggacaagccagactctacctccctggtggtcatggtctccgcttattcgggttcataaccttaaaggcccctcgcaccacctcagtgagccatttatgcctggcacagggccaactctcagtgcatatctgcaaaggaaccaatgaatgaatgaatgaagtgacaaatgaataaaggaataaatgaatgaggcacttatcatgtaccaggctttcgttaccacgtcccatttattcctctgaggcagggtctattttatccttgttacagatggggaaactaaggcccagggaggagcaaagtcttccccaagtatgtacccactcagaacttgagctctgaatgtctcccacccagcttagcccaagagcggggttcagtgatgcccaccccctaaggctctagagaaagggggtaggcccacatgccagtttgggggtggtaaagccaggtaagttttctttatgggtcccctgaaaccctgaaagtgaaccccagtcctgcatgaaagtgagctccccatagctcaaggtattcaagcacaatacggctttgagtgctgaagcaggctgtgcaggcttggatagtgacatgccctctctgagcctcaatttccccacctgtcaacagcagacagtgacagctgtgatcaggggatcacagtgcatggggatgggtgggtgcatggggatggaggggcatttgggagccctccccgataccaccccctgcagccacccagatagcctgtcctggcctgtctgtcccagtccagggctgaaagggtgcgggtcctgcccgcccctaggtctggaggcggagtcgcggtgacccgggagcccaataaatctgcaacccacaatcacgagctgctcccgtaagccccaaggcgacctccagctgtcagcgctgagcacagcgcccagggagagggacagacagccggctgcatgggacagcggaacccagagtgagaggggaggtggcaggacagacagacagcaggggcggacgcagagacagacagcggggacagggaggccgacacggacatcgacagcccatagattcctaacccagggagccccggcccctctcgccgcttcccaccccagacggagcggggacaggctgccgagcatcctcccacccgccctccccgtcctgcctcctcggcccctgccagcttcccccgcttgagcacgcagggcgtccgaggacgcgctgggcctccgcacccgccctcatggaggccgtggagaccggggaacggcccaccttcggagcctgggactacggggtctttgccctcatgctcctggtgtccactggcatcgggctgtgggtcgggctggctcggggcgggcagcgcagcgctgaggacttcttcaccgggggccggcgcctggcggccctgcccgtgggcctgtcgctgtctgccagcttcatgtcggccgtgcaggtgctgggcgtgccgtcggaggcctatcgctatggcctcaagttcctctggatgtgcctgggccagcttctgaactcggtcctcaccgccctgctcttcatgcccgtcttctaccgcctgggcctcaccagcacctacgaggtaccggacagaggcccgggggtaggacctgccccactggcagtgctgggaccccgtgtgggggaggcgctggggctttgggccgctgtacaggaggacgcggatggcacctcggtgctttaacggaaggggcccctaggcagacacgtggggagggttctaggaagaggccccaggcgcccggcgaggggcaggaaggaggaagagagagcctggcgtcctgctccttcggtggaagcgcgcgcggggcggggcccggctcgaccaggtgtgtcctcacgggtggacacacacctgccccccacctgcccgggcgtgcagacccacgtgtgcgcgctagaggggactgctgacggctccggggttcgaaacctggc

SEQ ID NO: 7978 - DNA, 6000 bp, Homo sapiens
aggtcaggagatcgagaccatcctggctaacatggtgaaaccccctctctactaaaaatacaaaaaattagccaggcgtggtggctggtgcctgtggtcccagctactggggaggctgaggcaggagaatggcgtgagcccgggaggcggagcttgcagcgagccgagatcgcgccactgcactccagcctgggcgacagagcgagactctgtctcaaaaaaaaaagattttagtctacctgaattagcccgataaggaagtcccctctgctttaacacttaccaaaaaaagtaacctgaagttaatcaggtttttctttttctttctttctttctttctttttttttttttttttttttgagatagagtctagctctgtcgccaggctggagtgcaagtggcacgatcttggctcactgcaacctccacctccccgggttcacgccattctcctgcctcagcctctctgagtaactgggactacgggcgcccgccaccacacccgtctaattttttgtatttttagtagagacggggtttcactgtggtctcgatctcctgacctcatgatccgcccacctcggcctcccaaagtgctgggattacaggcgtgagccaccgcaccggccttattattattattattttttaagatattctgtagttatggattggaaaaatccatattgtcaaaatgtccatactacacaaagcaacctacagattcaatgcaatttccatcaaaatacaataccaatgacattcttcacacaaaacagaaagaacagttctaaaaaacagtcctaaatttatatgaaatcacaaaagaccttgaatagccaaaactatcctgagcaaacagaacaaaactggaggaatcccattacccaacattcaattatactatagatctacagtaacaaaaacagcatagtaccagcacaaaaatagacacatacataaatggaacagaatggagaacccagaaccaaatccatacatctacattgaattcttttttactattattatactttaagttctgggatccatgtgcagaacgtgcagaaggtgcaggtttgttacataggtatgtatacacgtgccatggtggtttgctgcacccatcaaccggtcatctacattaggtatttctcctaatgctggccgggtgcggtggctcacgcttgtaatcccagcactttgggaggccgaggcgggctgatcacgaggtcaggagatcgagaccaaggtgaaaccccgtctctactaaaaatacaaaaaattagacgggcgtggtggcgggcgcctgtagtcccagttactcggagaggctgaggcaggagaatggcgtgaacccgggaggcggagcttgcagccagccgagatcgcgccactgcactccagcctggatgacagagcgagactccgtctcaaaaaaaaaaaaaaaaaaaagaagttatttctcctaatgctatccctcccctatcccaccctctgacaggtcccggaatgtgatgttcccctccctgtgtccatgtgttctcattgttcaactcccactttctttttctttttttttttttttgagacagtctggctctgtcacccaggctggagtgcggtggcgcaatctcggctcactgcagcctctgcctccagggttcaagcgactcccctgcctcaccctccggagtagctggaatcacaggtgggggccaccacacccagtggtttgtttgtttgtttgtttgtttgtttgtttgttttttgagacggagtctcgccctgttgccaggccggagtgcagtggtgagatctcggctcactgcaacctccacctcccgggttcaagcgattctcctgcctcagcctcttgagtagctgggactacaggcgtgtgccaccgtgcccagctcatttttgtatttttagtagaaacggtgtttcaccgtgttgaccagattggtctcaatcacttggcctcatgattcggacgccttggcctccctaagtactgggattacaggcctgagccacctcgcccggcattgatcaggttttttttgtattgttctgtttatttgtcccactttacgaaactcactgttctcctattgcccagggggacatgtcattttatctattctcagtaactcatgcctgtaattccagcacttttggatgcaaaagtgggcggattgcttcagtacagttcaaggctagcctgggcaacatagtgagaccctgtctctactaaagaggaaaaaaaaacaaaacctttctttaaataaaagttttaaattgggggaaggaaggaagaaggctctatctcaaaaaaaaaatcagaaaaccatgaagggtgtcctctgactgggcaaatttttgttgtaaaaacccatattgtaggctgggcatggtggctcactcttgtaatcccagcactttgggaggccgaggcaggtggatttgagatcaggggttcaagaccagcctgagtaacatggtgaaaccccgtctctacaaaactacaaaaaatagctaggcatggcggcgggtgcctgtaatcccagctactcatgaggctgaggcaggagaatcgcttgaacctggaaggcaaatgttgctgtgagctgatattgtgccactgcactccagcctgggcaacagagtaagactccgtctcaaaaaaaaaaaaaagccatatttcagttttactttttacaggccaacaaatggcatgattgtgtttcaatgacgtttggcttattctatgacctgaaaattatatgaaatgcaaatttgtgtccataagtaaaactttattgaaacacaatcatgccatttgttgacaaaaagagtgaaactctgtaaaatatgggccgggcgcggtggctcacgcctgtaatcccagcactttgggaggccgaggcgggcggatcatgaggtcaggagatcgagaccatcctggctaacacggtgaaaccctgtctctactaaaaatataaaaaattagccgggtttggtggcgggaacctgtagtcccagctactcgccaggctgaggcgggaaaatggcgtgaacccgggaggtggagcttgcagtgagccaagatcgcgccactgcactctagcctgggccacagagcgagactctctcaaaaaaaaaaaagaaactccgtaaaatatttaaagaggttaattctgagccaaacgtgagtgaccacggccctaggcacagccttttttttttttttttttttttttttttgagacagtctcgctctgtggcccagactggagctatctcggttcactgcaacctccacctctcgggttcaagagattaccctgcctcagcctcccgagtggctgggattacaggcgcccaccaccacgcccctggctaatttctgtatttttaatagagatggggttttaccatgttggccaggctggttttgaattcctgacctcaggtgatccagctgcctccgcctcccaaactgtttgggattacaggcgtgagccactgcgcctggccaatccccaccttcttgactgaccatttaaaaaatgtaagaaacacctttagctcatcatgagcagcacaaaacaggcagggacaggatttggccctgaggcaggagaataggtctggaggcagggaacataaggccaaatcaaatggaaacaattcagctatgacaggaaatatcttctccatttaaagagggcatacatccagtaaatgactttgtaactttacttcatcctcttcatttacataggacgtacattaagtaaccagtgaaaacctctagagggcatttaaaccccagaaaattcttaaacaggtctcttgagtccgtatgctccactggctcccaccctgcggagtgtactttcgttttcaataaatctctgcttttgttaagcttcattctttccttgctttgtttgtgcactttgtccaattctttgttcaagatgccaagaacctgcacaccttcaacagttaacagcccacaggcagtagtttgcgactctagtagagaatgcatagggatttccattgaaaatcattttttaagccagttacggtggttcacgcctatcatcatcccagcaccttgggaggccaaggcgggtggatctcttgaggtcaggagttcgagaccagcctggctaacatggcaaaacccctgtctagaccaaaaatacaaaattagttgggcgtggtggcccgtgcctgtaatcccagctgtttgggaggctgcgacacgagaatcgcttgaacccgggagggagaggttgcggtgagccgagatcgcgccaccgcactccagcctgggtgacagagcgagactccatttcaaaaaaagaaaaaaaataattgttccctacgggaacggtataattaggatataattgtttctggccacagatcacatcccttctggttaagtccaggagaatctggaaatacgtagggcaaccaggccagaaggcgttgtaactgcctaagattgaccaaccctaacgcgggaggcgggacgacggtcactgatttgccagcgtgacgccggtctgcgactggccagtgccgtcctgggcgtgtcggtaggacggggctgcgacggtttcccataggctggcacagaaaggggcggggaaacaagagtgcaacgttaccaatcggcatgcgggacgtaacgcaattcttttttccgattggtccgtgaagctcgggaggtcgttgggggctcgaccttgggatagaacgcctgccttttattggtcaatactcttcgggccgggcaatgtggctccccgaggctgcctgcgattggtgaacgcgtcgcggctcggggcggacctgcggactgaagatccttatgcgattggccggggagccggaggggcgggcaatttgggatcgacagtgactcgcgactggtcggcgcggcgaaagcagagcggcgcgccggttccttggttcctgagggcgatggcgcggggtggctggcgccggctacgccgcctgttatccgcggggcagcttctattccagggccgcgcgctgctcgtcactaacacgctgggctgcggcgcgctcatggcggccggtgatggcgtgcgccagtcctgggagatccgcgcccggcccggccaggttttcgacccacggcgctccggtgaggacgccacgctgcttagtccttcaccccgggcgacctttgatcccgacacccgactgcgggccgtgacccctgacccgtggcctcagtcccccgcaggacccttgccctgaccgcgcctctccccgggtgtctgtctccccgcagctctgggtctccatcacctcccaacccccggaggtctctgcccactacccaggagcctctggagccgcgcctcctggtggggcttgtagtggaagaatgcacgggtgggctcttccggttttcccggtgaggctgaggctccgggatggcattgggcttacccaggccttagccagggagggagagagggaatggactgaggaacttgccggcccgacccagccccctgacttacactcttatagcgagcatgtttgcggtgggctgcagcatgggtcccttcctgcactactggtacttgtcgctggaccgcctattccctgcgtctggcctccgaggcttcccaaatgtcctcaagaaggtcctcgtggatcagctggtagcctctccattgctgggcgtctggtacttcttgggtaaggagcctcctaagcctaggctttgcctctcataggtcgggaggggtggagccagctttgtgttaagaaggatgcagaggtgcatttccaatttgccccctgtttgggtcgccctggactaggagccaggtcacagcggggacaggacggactcggccgatgtgaacgctggcgagtgtaggagggacgaggactgtatctgttggggctgccctgggcgggaggttgagagc

SEQ ID NO: 7979 - DNA, 6000 bp, Homo sapiens
ctggcctccaaggctgctgcggatgggggtgcctgaaatgagagttggggggtgcaattacccacttttggtcgcagccccgcccccagctgcagcgcccagggaagggaacggctccaagtccccttttccaggagtcccttagaggcctggattctctctcctggtccccaaccagccaagggggtaaaagtgtctgaggggggctcaggagcccccatttgtctgcccaagactgaagccccaccctctcctacttaaatctccagttcagactccagactgtcaaaaaacaagattgggggatgggagcctataggggcccagggcgcccctgctccatctgaattctggatggagaagacagacaaggagagacgctgccatttacttcgggaaaccaggccttttgtgcctcagtttcttcctctgcacagtgggcaccacccagtctaggagcttctgtgggaagacgcagggcagcagaagtctctacaatccaagcccttagcacagcactggaggatatcctggagcagaggtgacccccagccctgcttgtcccctctgaaacatggagccatagtcccacctgccaggggacccagagggttaagtggaggtggcagtccttggctggaattgagtttttaggatactcaccactactcccccatggctcctgtctgcagatgctctctgtgtggatagagacgcctcactccctcctgggaggacttcaggcttctggagcaaaaccttgattttttcctccctccatttctgcttctcttccagtcattttggttttgggaaagggctctcccatccatccaggtgctcaggccagagacctggaagcgcacgtgacaactctctcctttgctcatccctcatgtccaattcatcagcaaatcctgttggctctgattctaaaacacatctccattctgagatgctgacccctttttcccaccccattcagatccaggccccacggtctccctcagggatgcttcccggcctcctccagggcctccctgataacccttctgcctttctcggcacaccaggcagagggagcttttaaaagaagaaaaagcagatctttgtcctgccaccctctcgccatcctctcccctcctcttcttccctctcctcttccccctcctctccctcattccgccccagccactggagccctgtttcccaaaacataccaggcttgttactatagaagggcctctgcgtgttggctgttccctctgctggaatgctgttccccacatcttccccagttggccctttctcttccatcacttcacaggattagtgccacctcctcagagaggccctccacccttcccccagcactctccctctccttcactttgttttattgtttttgaaacacaactcttccaaccatttcatttcttgtgcaactgattttctttagactgtgggcagcctcagcccctttggaccccagtggtgggcccagtgagggctgaaagcgaagcactcactaaatatttgtaaaagtaaaggatggagaactcttactccctccaagtagcaagaaaactcagtcctagcaagtcatgctgcctggggtcctagcctggcccacactctgtgtcttgctgtgtgaccctagccagtagacatccctctcttgttcttaccaacagaagggaaggaccattttccaatcctgcccagccccaccctggagtgtgacttctgcccttgggtgatctttaccccacacctttgacttcagggaaagggaattgaccccagagtgcatccttcccggcccttagggcccccagaagtttaaccctttactccccagttccattatctccttgaggacaaaagggagctagcgtcaatggaacttctggcaaatattgacccaagtccttgaagttggctgggaatgtgtaaggggcagaaggagggagggcctccccttgggcagagggagggcctccccttgggctgggggagggacccctccttagtcctgcaccctccactccaaggtcacctctggatgagaggtattaggttggggggggggcctccatccccagctccctcgtgattccagggcactgagggtgcaccagggagggggcagtggaaatggcaccttcagggtcctgtggggacccacaaccactgggagtgaggaaggctgagagctgtctctcccattctgaaagccccgtgctcagggctccccagtatgggattagctacctggtgttccaggcaggtgctttcaggaattaaggggcagtgagggtctggacacctggttcagggtctgtggcacaggaaagtggggcccgtgtgtacctaggctttataatttctgccctggaggctgagcctggggagaagcaatgcctgggtgctcagtgtaatgcacactggacttcaggcactggaggcgggacctggggagttgcagacctgcctaggggacctgcctgggaagttgcaggcctgccccagggaggccagtttccctgcccgtctgtaccctgagaagcctctgaagtctgggtcccaggaggcaccagctgctttagggggacagccacatccctccgtcctcccccaacaaccctcagcaaccaccaccggcgccatggtgctctgcctcctccctggcctgtaccctgcttggaggtgggggtcagcagggtcgtggtgagggcggcaagggacaaagggtgcttgtccgctgcccgccttgacctcggctgctgtggcttcccggacgcctggcctgccgctgattcacgcccaggccggcctcagcgccccccgcctgccgcccccagccaggccgccccggggggtaggaagtgggggggggggcgagggcggcgccgagtcaactttccctcttaagccccgaaggaatgtcggcggatttcctgaaacccgaccctggccgcccgccggccctcccgcccctcacctggaccggctcccccgggaacagcaggaggggcgcgggggctcaccttgggggccggggtcaagtcctctttccgctcacccccccagcggcctagtgcagcggaaagggggctgggtgtgcggcaatcagcctctttcccttctcccctcaggcgacctgggtgatcgacccactcctccagcctcagtttctccttctgcaaaagggcgcggggtgtccctcctccctgatgcgttttaagcaatgcccaaaggtcacctcccatcattggcagggctctgccggcttttctttgcttctctccctgtcacctggacagaaccactttgcagtctgagcatcagtttcctcacccatataaaagggcaacgctaccggtacctgtcttatacggttgttgcaagaaaaagtgtttcgttggaatgaatgaaagacagtaattgtggaggggttaggcgcgcgcgggcctctggaattagcatgtgtgggcttgaatcctgactttgccaacgcgtcccggagcctaagtttcccacctgtgaaatgggggacagtattggtcataacgcacagggctgtttcccaaggtgcgggcctggcgcgcgggtgggttagaagcggaattctcctgctggattctggcgcaaactgcgggctggaggccctcgccgccgggtcgcagcggcctagcatgggaggggaggggaggggcggggcggggcgggggaggggccgcaccgggatccagatgttcggggtccgccaggcacagccgcgcctgattaagccacgtgggggccggccgggggccgctgagatgaaagcgcggccgcaggccagagtagggggtgcgccgggcccccacccgggacaccctcttcccaggccgaaacctgagccgccctctaacccgcagaccctgcgaggctgccgccccgtctgcgggggcggagcgtaggtgggggacctgcgggctgctgcgcggcgctgcaggcacctgcgccaggcatgccagcgaaagcgggggcatctttgcagaggatccgggtttagaggggcgtccccactcccttatctggcggagaggaagctgggggtaccctctaaccgagattcggctcctggggctacagtccatcgccctggggtgtgatggttatggaagtcagaagtgtcgctatttgccccgttttcccatgagaattagacatgtcagcatcaccccctccccttgctcctgagcatacctctgtgtcccctcccactaagccccagcccaggggtctccagccttggggagacagggccagattccctaggtcagtggatcagggctgggccagagggaggcgaggctgaaggagcaagggaggggctcagagggcttcccggaggaggcaaactgcgcgcaagttgtctcctttctaacctgggtgtcaaaagagaagatgccaggactcagctgccgggtcctgcggctctcaccttcctccctctccgttccctggttggactccagccccatcgccctccctcctcctgcaacaagctctttctctcaggatcctcgctgatccttgtagcctggacacccctttctcctctctcccgcgtggtcggctcacacgtcgcctcctccgccaagctctccgctctcctcgacacccctggggaatagtcccctccatcccatccccctatatatttccttttggccccaagcgccagcagagatcccccgcccgtgggcaccagggaggtgtcctgggacccccgcgatgggatagacggtgggggccgcgatgcacctgccccgcccgacccgcacgcctcgggtgccgcagcgcagctaccccgcccgctctccgcatctcccaccccccgcttcccaggctgcctcgctcgggtgacgtcagcgccccggtccccgccgcagccgctgcatcctccgtgcccggcctgagctggagtcccccgcgccccccgcgttccgcccggccatggctgcggtggcgctgatgccaccgccgctgctgctgctgctgctgttggcgtcgccgcccgccgcctccgcgccgtccgcccgcgatcccttcgccccccagctcggggacacgcagaactgccagctgcggtgccgcgaccgcgacctcggcccgcagccctcgcaggtgaggcgcgtgcggtgccaggtgccagcgggggacgcgggatctctccgaaggaggaggcgttgggatgggcttctcttggatgacagcaggagactttggtgggggtgtccgtggggaggtgggggtcgggaatggggagatctctccagtagttgacgggctggggttccctctgatgggggagtgcttggggatgcaggtccttgcgataaggggccgataccacctcccgggctccttccgcactctgctgggtaaggaccctctagcacccaacccccagctccctcaggcctgatggtccccccacctcattcctcctcctccacatcgtgttccctccccactcagagctaccagcccctactcataccaccactccccaggattcaagcctgatctgcgtgtgaccaaaaccccctcctctgagcctccccctcctcctccaggtctgagaatccttctccatgtctcccctcctccctggaacctagtggggggaaggctcatttctctccaccttcactgtccatttctcttctcaagctccctccccatctccctcctcagagctaagagcccccactaatatttgtagcctctcccaacttcatctccatctggctagatgtcgtggggagcggggaagcctttccctgcctctgctgaatgctccggtccccccaccctcctcctgcccctccccatggcctgagccccctgtcctcccctcccccaggcggggctggagggcgcctccgagtctccctatgacagagccgttctgatcagcgcttgcgagcgtggctgccgcctctt

SEQ ID NO: 7980 - DNA, 6000 bp, Homo sapiens; identical to SEQ ID NO: 814

SEQ ID NO: 7981 - DNA, 6000 bp, Homo sapiens
ttttaattcaaataaaccttagcacctgtattagtccgttttcacactgctgttaaagacatacccgagactgggtaatttataaaggaaagaggtttaatggactcacagttgcatacggctggggagtcctcacagtcatggtggaagatgaaggaaaagcaaagagacttcctacatgtcagcaggcaagagaggacttgtgcaggggaactcctctttataagaccatcacatctcatcagattcattcactatcacaagaacagcatgggaaagacccacccgcatcatccaattacctcccaccaggtccctcccacaacacttgggaattgtgggagttacagttcaagatgagatttggatgggaacacagccaaaccatatcaacaccctttctcaaaagctccattttttctcttcttttctttcttgtcctttcaccatcttactccaaagttggacattaacttctgttcagaaatcccacagtcacaggccctcatgttaatttctacccaaatggctgagcttttcaaatgtcattggagaaacatggattttaatgtatacgatggccgggtgcggtggctcactcctgtaatcccagcacattgggaggccaaggcgggtggatcatttgaggtcaggagttcaagaccagcctggtcaacatggtgaaacctcgtctctactaaaaatacaaaaattagctgggcatggtggtgcatgcctgtaatcccagctactcagcaggctgaggcaggagaatcatttgaacccaggaggcagaagttgcagtgagccaagatcacgccattgcactccagcctgggtgacagaatgagactctgtctcaaacaaacaaacaataataaaaaaatgtatacgagagcaaaatagccatttagaagacatcatcctgtgaggcacctctgctagggttccgggagggatcaaggctacaacaaaccatgatcacaccactgcgcaaagcatttcaggacagtttctgcccaaggagagactgggcagacagaccttcctctttcactgctggccccaggtgcttgcagttctctccaagggggccctggagacctgggggtccatcagtatgtccatgtgctggagcggctgctggcaggatcaagaacttccctccaaacgctctctggcttgactattcgcctgatggaacaggcagaaggatagaaattagctctggggggagcggaaacattctgaggccagagcaagctggtgatgagtggggcttggagaaggtggcaggcagggctgttcacaggatcatgcagcttgagctaaaaactttgaagtctgttctggagcattttcagcagtggggatgaaccaatttgcatgttaaaaacgtgagcaatgaattgagaggcaagggaccacatggagggaggcctctgtggaggtccaggagacaggagatggtggctgggaccagggaggtggtcacggtgatggagaaaggtgggtagatttgagatacatcatggggaccagcaggttgtagtgatggattggatgtagggagattggagtaaaaatgatcaactcagtaatggacgtggccatgaactgagtagggcacagtagagaaggggcagatgtgggggtgaggggtgtctggtctatggctcagctagaataatgagaggtttgccctcttggaagtcacctgtgataaacttgggcataaaggtgatcataaaacaatttttttcagttttatttgccaaagccacttttggcctttgaccttcaaatagattgtaggatttttgttgttgttgtttttgagacagaatctcactctgttgcccaggctggagtgcagtgtgcgatcatggctcatcgcagcctcaaactcctgggctcaagcaatcctcccacctcagcttcctgagtagctcagactacagatgcataccaccacacccagcacattaaaatttttttttttgtagagccagggtcttgctgtgttgcccaggctggtctcgaatcctggcctcaagtgatctgcccacctcggcctcccaaagtgctgggattacaagtgtaagccactgtgcctggctggttctagttatttgaaatcaggaaagacactgaccattcaacacagagtcctcttcattagtgtctggtaagcaactggataagagagcgcttgagtttgcatctgcctgtgggtgaatgttgggggaggatgtgggactctcctgtgtcattggtttcttctgtgtcccacgagggctcggggtatgtggctgatgagtgggcaatggtggtggccctctcgtatgggatggagtggggacttacatgggatgcctctgtgtcccttccgtctcctctctgcatgtcctgtggctcctcactcctgcagcagattcctgaaggcgtcactggcccacagtgactgtgacagcagctttgcttcctcctaactgggaaggccagcttcttgccaggaagcccctgctctcatgtctgagccctctgccccaccactgctccctcacctgccccagccagtcagttcccatattctgggtccatgcccaccatctccttcccagtactgaattctccaatggttagaagcttttgggttgtgatgaatagacacgttctggatatagcttgagtcaatgagggaggtttacgaaaaggtttcagaggtggagagacccaggcgattgcagctagcgtggaagagtgttgaagcagagacaggaataccaggaacctttccagatgtggtgagagggcggtgggggagaggactgggccagagctgcattggggacccccagcaagggtcttgcctggcacagcaacctctagggggcactagaccatcatgagacaaacgggaaatggggtgtcagttatgggccggggtctcaatatgggccgggagtaggatagggcagtgaggcactcaccttgggcacagaattgaaggaagtgccaaaaaactcaataatgaagataaatcaactttaatgcaaattttttgtgtgtgtgcaatggggacagttgtttccaatcagcccaaggttcctgggtaccttggccgtttcttgccttatgggtttatgagggttcacaatgggatgtgcatagattggggagcatggagatttagatatagtcatgtgattgtagagcttttcttagcctttccacttggttcaaaatatgggaggatattttgataagtgtgtctaggggctcacatttttcttttgcttcaggctccaacatgattcccatattggtcattggtctggaccctagattccttacataacgtgcaaaacatgcattgaagcaggcagcatcttcaacaaaaccgcatattttggccaggtgtggtgggtcctgtctgtaactccagcactttgggaggctgaggcaagaggatcccttgagtccaggagtttgaggttgcagtgagccgtgatcacaccactgcactccagcctgggcaacagagcaagaccttgtctctacaaaaaaatgaaaaaattagcctgacatggtggtgcacacctgtcatcccacctacttgggaggctgaggtgggaggattgcttgagcccaggagtttgagggtacagtgagctatggttgcagctctgcactctagcctgggtgaaaaagtgagactgtctctaaaaaaactaagaagcagcagcagcagcagcaacaacaacaacaacaacaacaaacgaacaaaccgcagatccaccctaccattgcccctgcctctgttgagcatttttgccatgcgtaaataaatgcctgctcatccgcagtcagcagtctgaggaaattctgaaaccaaattacacataggctagtgctctatgccatcaatctgtaatgtatcttgttatttgatttttacgtcctttaatacatttcctaagaagtctgctttggaaaaatcaccaaaggaattagaagagagagaataagaaaacccagaaaaactaaaaggatttttcttccccccattttttattaaaatccaatcaacctgcacagtgcgagtgagtgagtgactgtctacgctttcactaacggaccatcagtttctctcaaccttctctccataaacggagaatatcaaatgagggtctgggggtgttagaaaagggttgggagcctcagctcaggttggtgggcccgctgtgccatggagcctttggggacctctgatttcacatccgtcttggccctaaatggccttctcaaaccttccccctgtctctcctggttcttgcctcattggactcaacctcttggtgggcagctctccagagggcacccccagcctaagaagcaggcctcctcccaagtccccagcctcacgaggatagtgggtaacagggtgggctcagggggccctgggagatctccagaggcctctggtgtgttcaccaatgtcccctgacaggtcttgcttggcacagggggttcctcttagagacgtgacagggcacttggactgtggcaaatgaaagaagcggaggggcaggaacagggacaccttgcgaagaagacaggccttagccttgtgccacccctatgaggtccctaagccgtcctctctctcccaccttttcccagtcctcgctccccggtcctcctcagcacagccggctccaggagggatcaattcgtgggcccgggaggaggccaggcgagcaccggctgcctggagcactgggctggagcgcggggagcgcggcggggggcgcgggcggggcggggctggtgcgcagagctgtccagcaccccgaggcggggcgtgcgcccccggcccgccccagccgcctccgcccgcccagccagcgccactgcggctcggcgggcgcgtcacgtggctggcgcagcgcggcctccaggctccgggcgcgggcgaggggccgggcgggaggactgacagacccacggacgctctaccggcggcacccggccgggcgggctgggcgcagcgcggggcggcccggggacgccggggccgggcgggctgcgcgccgcggggcatgggcgcgccgggggtccccgggcccaggccggccgcggcggggctcccggggcgcgggggcagcggcgggcgggggtcttccctggcggccgccgctgagcccccgcagggcccgtgacgccgcggccgatgtggccgcgcgcgccctacgggcctgcaccgccaccgcacaaagacgcctcgggagccgccgcctgcacccgggccgcagcagccacgccagccggagcccgagccctagcccgagcccgagcccgagccgcagccagagccagagccggagccgcagccggaaccggagccggagccgcggggcaggaggcggcgcccgcgggcggccgggcccggcatggagaagcgcgcggccgcggggctggagggcgcgccgggcgcccgggcgcagctggccgtcgtctgtctgggtgagtgggccgcgcgggccgggcaggtccgggtcccccgcatggcagtccgcgccgcgccctgaccgacctcctctccggccgcggcatcccgagccccccaccgcggtggctcccgcgcggagacccagagaggggccagcaccgcttgcccgcctggccccgggcctgggagggcgactctggtggcgcagccccggctcccgccccgctcggagtagcgcccggagcccgggctgagcgctggcaggaggcccttcgtgcaggcggcagccttcaacccggcccgcccgcgctgagcctggagacgagggggccccgggagctggggacaaaggccaggccggctgtcccctgaagaagaaactgtttccggcccggagttggggtgggggctggtgtaagccgcagatggggactcggggtgcggggcagggctggaggagggtgccagtgtggaggcggcttcca

SEQ ID NO: 7982 - DNA, 6000 bp, Homo sapiens
tgttcaccaactctcttctgtgttaaggactggtgtcactttagcctgccccagaaaaacttctctttaaagagaaactattcctttttttttttttttttttttcagacggagtcttgctctgttacccaggctggagtgcagtggcgccatctcagctcgctgcaacctccacctcctgggttcaagcaattctcctgcctcagcctccccagtagctgggattataggcgtgcaccatcacgcctggctaatttttgtgtttttagtagagatggggtttcaccatgttggccaggctggtgttgaactcctgaccttgtgatctgcccttctctgcctcccaaagtgctgggattacaggcgtgagccaccatacccagccaagagaaaccattcttataccctgaggaatgatggtgaaatttcgaaattgtgacaggtatatggggttcagggatgcccagaacccccagcaatgttgcttatgcaggggatacccacccaggcatattgacatcaggaaatttcagacaactcaactcagaaggaaacaaagtgaccctccagctccttgaaaacccaagaggtgacagaaaaggggaaaggagagaggaggaaaaggcctgggaaggaacattcatcccataaggtggccaagggataccttggctggaaatgagtctgggccacgttccctggtgaggaacttttaggaatcatggaattgcacagcaggccttcagatcctgggcccccatccctcatctttcgaatggggaggtcgaggcctggggagggaaggcatggcccggagcccacacaggccccagagagcagctgaggaaggcaggtccgttcccaggaggagtctcccgcctggatggcactctgatcagcacgtcactggcctgtctgtgtgttgaactgacttcaggaagccttggggtcacaatattgcagaggccattacagggccagatgttggacgtggaagcaaggccaggccacgtcataccctgaggtgactagtctgtgggtggctaagggcagtctggtcacaggactccaattcccaaaatgccatgacacccttcacctttcctctgcagggacagtctattgtctctgcatacagggaacaggctctgaggggttaggagacaagttcaagaccccctagctggcacctgggagagctgaagcagacctcctggcccatcccatcattcccttcttcctcccatgggatgcagggagacagatgaggtgttcccgacctgccagtatagatggctcccaaactcctctgtggaacaagtcttcttcttcttcttcttcttcctcgtcttcttcttcttcttcttcttcttcttcttcttcttcttcttcttcttcttcttcttcttcttcttcttcttcctcttcttctcctcctccttctttttcctcttcttcctcttcttttcttcttcttcttcttcttcctcttcttcctcttcttcctcctcttcctcctcttcctcctcttcttcctcttcttcctcttctcttcttcttcttcttcttcttcttcttcttcttcttcttctccttctccttctccttcttcttttttttttaatagagtctcacgctgtcacccaggctggagtgcagtggcacaatctcagctcactgcaacttctgcctcccagattcaagtgattctcctgcctcagcttcctgagtagctggggctacaggtgagcaccaccatgccctgctaacttttgtatttttagtagagatggggttttgctatgttggccaggctggtctcaaactcctagcctcaagtgatctgcccacctcagcctcccaaagtgctggaattacaggcatgagccaccatgcccagcctgttctggttcctctcatggcaacagatggaaggttcaggactcaagactcagtcttgccaaacacaatgtgagacagtctcagcttcccactgtgccaccttcagcctccagcccaaagacgggcaggaaccttcacttgcaggaacggcctgaggaaagggagcccagagccagtggaggcgggggtctgcctgcgtcccagagccaagccccctcctctttcctgtatccttgttgcagcaaacagattggcacctgaacctctctattagcccttctggggcttaggctgtgggcgcatggggccatgcactaaaaatgtctttcaccttagttgggatgcaaagagacaagtttgccactaatctttcggtggagacacacatatcaaaaatcgcaagtgagcacacaaggcttcctgcagggaattgcagccttcctgctcctccctcgctgcagaggctgagcctgactttcaaaaaagggcacgcagcccttggcaaatctcggaggaaaactcactgcgagttggtgccaggggcctcaggccccctttggggatttcccccatggcctctcaaaacaagaaggaagtctgagttaaaaatggaaaatggagagaatgtcaaaggaatgcagcgttattgattcctagtggtgtctgcctgaatattagatgcaaataagtgctaataagtacagttgggaaagctaatggaaaaaccatccttcccaggaggatcgcggcacacagatgcacagtgttgctgagatggcttggctcgctccactcactggtcacggcaaagcctgtatagatgcatcccagggaaataaagcctgtgtagacttgtcgcatggaagtactcatggtccagagccccctttccagctttgaggctgggctctggaaatgggagctcctattatctccccattgcagttaagtctctctttctctctccgtgtgtgtgcatgtgtgtgtgtgtgtgcatgcatttgccctctggagtgttcatggtactgaagagattctcttgaccatcaggcctctgtggcaaaagttgtgtgctctgttccaggcctaactgcagacagggagctcatgggcagctgcccagccaagctatggtcaggaccttgggtggcaagaggggctgcaagtgtggggtaaggggaccacagggacagggatggggtcattgcactgtgagctagtccggcaagtgactttttgctcactccactctcccctctctttgttcctaccttctctcctgctctgctccaacagctttgggatgtaggatgaataagggttccactgccctgtttttcctgacacttgagtccctggcccttgcactcagctcctccaatctgcacctgactgaggcggaggagggtgatttcagacacacacacacacacacacacacacacacattcccctcatgcgtgcagccagtggagtgtgcctgggtcccagcgcagccccaggcctgggtcactccgagcctaaagtcctggaaagggaaccccagaacaaagcctatcccagtttggaatcatcacacctgggccattctccagatgcgtggagtccagcaaaatggtggcatttttgcatctcaattcgctcatctgtaatacgggagtgataatgtctactctgttgctgcaagaattaaaggaagaccatgatctctttgtcatgcttctatttatcttcttatctgtcctggtctatttttggatgctctgagcttacctggggcattaaggaggcctcatggccctggggctgaggggctccctggccgtccccaggagtggctctgctctccgcctggtgtcccccactctggtcagtcaagacccatgggcccagctcactccccaattccatcactcactctaggtcagctggtaggagtcaggccaaccagccagcaggtaccattagagaggagagagtaagggtctttcactttattaaaggcttctctgctgttgtttgaaaatactgagtgtcccttcaagactaacaggtgactgtgtgcacagtttcctccagctcctgtgagaaagcagttgccccccttcccaaggcctgcttgtcccctgcaggctggggctgcctcttcttaggaagaacaaggacccgaatccagggccccgtgttcctgtccctactctgtcccggtgctgtgtggccgtgggccggttccaccctccacgctgttttcccgagtgtgtatgaagagggtcggttggccccgctctcaggctggtgacccgacacaaacttccaggatgaagtcctgaagggagcacctgttcgcagggcactttcagcagaatctagagccccagggatttgaggatggatgcggacacccgggcctgaggcagctcgcggccttgaccgaattccacgcgagctgaagcccagggatatcccagaatcttcctcaggatcaatcttccgcctttcaccggccctgcgcccccgcagcatcgggtcctgggcgcgcgcccctgccccgctgtggtcaaggcccgccccggtgacgcctggtccttttcccgggttggcgccgcgtgcgacccaccgaggcagtggcagcactggccgcggtctggagcctagcgtcaggccggagtccggctctcctgaaccgggagaccggcgcagccccagccacgaccgctcccacccccgcggccgccggaccgcgcccagcagcgactctttctgagagcgctgccagaggggccgcgggagccgcagagcgcgcgtgggcgcggcgcccgcgagcccccgggagggccgagtgcatcgctggagcgatccccgcccggcccggccaccgccgtagccgccaccacggcggggcggggcacgggccgggggcggggcgccgggcgggcgcggcgctatttccagcctcgccggaggcttcgctctcacttcgctgggagccttcccggcgcgcaagccggatccggcagtgctgcggggaggagagaggacgaggcggcggcggcagcaggaggtgggggaccgatcgcgccgggggccgaagaggaacgccgccccgcgccctctcgctccccgcacgctccggctgccggccccacgctgctcgcccacagatcgcactgggttccgcttggagcgggcggaggcaccgggcccgagctgggtcggaggtcctctccgccgcctgcgcgccccaagcagaggatccgccgcggagaaccgctcccggactggaggcgcccgcggcctcgggtgcgtccgctgcgccaggtaagtggctgcgcccctgccccacccctgttcccgccctgcgcaggctcctggcctgcagagacgccaggaaggggtcccgagcgggccccggactgcaccgctcgccatccccgccaccgcacgcgaatgggagtccgaagctgcgggcggaggtgggcgcgcggggctcgggtctggttgcactttggggaccggccccggtagcgggaactttaattagactttctctccttggatctcactcgctgccgcgcttctgggaactgccgtccctcgggccctcttggtccctgcggactcccgctccgcctcctggccctcggtgctgcccgcggggaggcggcgtcgggcgctgagcagcgagcgccgagggccaggcaggagcgctcggggcgctggggcttcctggcgcgctcggagccggggctccggacgggttgcggcgggcagagactatgggggaagtttaagtggccttggcttcctacccagcggctccgtcgcgcgcgtccccgacccgcaactctccagggcaccggcctgtgagtgctggaggcgagtgtgcgtgcgtcagcgatggtgtgaaggtgtgtgcgtgcgtgtgtcgggagtgcgggagtcggagcctggggcggctccagggggcggggaaatgatccgtttggccgcgggaccgagccgagctctgacggcggctgcaactccggctaccgactctgcagacccgctctggcctcgctggaggccagccgggccaggagggcgatcacgggtttt

SEQ ID NO: 7983 - DNA, 6000 bp, Homo sapiens
gctggagtgcagtggcacgatcttggctcactgcagcctccatccacctcccgggttcaagcgattctcctgcctcagcctccgaagtagctgggattacaggcacgcgccaccacgcccggctaattcttttgtatttttagtagagacagggtttcgctatgtagaccaggctggtctcgcactcctggcctccagtgattcacccaccttggcctcccagagtgctggaatgacacgtatgagccaccacactgacctttttattatttttatccaccatctcgctgcaatttcagtattgcccatcgacctatattgcctcctggtaatgacccctgaggaatgagccatgccatttccataggtggaggcgacgggtcatggtggtgagaacttcactgacctggaagaggtggagaagatgctgggaagctgctgagggctgcccacctgtgttaggagaaggcagatggggacccatggggacagtaatactattttggatccacacaacgggagtggaaaatgccttgaggcacagcagcgtctgaggcgggtgagaaatccggcctgcagagtcgcggctggccttcagatctgcgggctgcctgtgagatgccgtgttacctaaatccatttgggcactgagttccaggagtgggggcaagaattccgatgacggggctttatccggtgcgcatccagctcagagtggttcctgagaccagccaccatgggcagccaggatgtgctcatccttgaggctttccgaggcatcaaggagatggttggataaagaatttagcacagagcttgactgatggcaggcgcccacaacatgagacacattaataatgtgtgtggaggccaggtgtagtggttcatgcctgtcaccccagcactttgggaggcagaggtgggaagatttcttgaggccaggaattcaagaccagcctgggcaacacagcgagacctcatctctaccaaaaaaaaaaaaaaaaaaggaaaaaattcacctggcctagtggtgcacacttgtagtctccgctactcaggaggctgaggcaggaggattgcttgagctcaggagttccaggctgcagtgggctatgattgcatcactgcactccagtctgggcaatagagcaagaccctgtctcttaaaaaaataaagtctgttgaaaagaatgaatgaaggaaggaaggaatgagagggaaaccctgtctcagctcctcccgcagggaagctggggcagggcaggcagggggggcatccggccccgctccctcccttactctggcccagaaagcactggtgccatctgcacagggtggagccaaagaaagtgccccactcacagcagagggaggccatttgaggacagcagggaaaatgggatctcagccatctaggagggggccagagatgtgggatggacacctaggaaatccagccgaggacaccagagtggcttttgactctggtcccctggctgaacgcgttccctttacagtttaaatttaggctcaaggagaagaagctggcaatcggcagggccagtgctgtagagaggatgtagggtttccggaaaatagccaacacttcagcagtgctggctgcgagctcatccaagcatgttacgggtgttaactcatttcctctccagcaaccctgtgagagggtctgagtgttcccatctccattttacagaggctcagagaggtgcagtcctttgcctgaggtcacacagctagtaagaggcagagccgggatttgaaccctggcagtctggccctagagccccagctgttaaccattaggctttatagccccagttataacaacaataataatactaatacaagtgaaccttcactgagtgccatttatagatcaagcactattctaaggattttaaagcatatttaattctcacagcactctgatgaaggaggtattcattttacaattgaagaaacagaggcctagagacattgagtcacttgcgcaaggtcacacagctggccagtggcagagccagcctttgaacctgagccttctggttgcagagctacggcttttaggcaccgtgctgagggcctccagaatgacacagatgtggcctcgagttacacagggaggcaggttgagggtgacccccaccaggcctacccaaggctgggtattaataatcacagtgcatacaccaggcccagggaggttgagccactcatccaagctcacacagcaagctcacagcacactcaggctgtcatgcagcctgggctacccccttaaccctgcctggcccctgcagccaacagagacatggcatccatcgtgtctgagatcatgatgtatgtgctcattgtggtgttgaccatatggctcgtggcagagatgatttactgctacaagaagatcgctgccgccacggagactgctgcacaggagaatgcgtgagtagggtggctgggaggtgggagggcacccagggcaccgtcacacttgccagagaggaactccggagcccgggcagggaggaggcagcggagcggcccagggcgccatctctcagtactacccagaggggagtgctccctgtcagacacaggataggggtcgtcagacccagccccttcctccctccaactcaggagcccaggctcccagccagattcctcaaagaccctgaggagtccacccatagactccttctctctctaactaaggagccctgtgtacctggggtggagaccgctaccttcccccatcccccgggggttgggtcggtctgatgatggggtcactgtatacctggcctttcccccacagctcggaatacctggccatcacctctgaaagcaaagagaactgcacgggcgtccaggtggccgaatagccctggtaaggcggatgggctggcagaggggaaggggattgggaggggccgaagtcccccaggtccctaattccccctctcttgctccccttcaggccctgggccccgcctcaaggaagagccagccgtaatggggactctccaggcaccgcctgcccccagcgtgggggtggccactcctgggccccagaaagcctcagagtcctgccgacggagccactggggtgggagggggcagggggcttggctcgcacccccactttcgcctcctccagctcctgccccgccggccgcgcaccgccatgcatgatgggtaaagcaatactgccgctgcccccaccctgcttctgctgcctgtttggggaggggggcggtgaggtgggggcagcggccccgcacccctcctccttgctgatttgcacacattggccgcttcagacacgcacttctggggccagcccctccccgcctcctccctgcctggcggcaggggtcgcgatgatgggctggagcagtttggggcagggggttctgggacccactccgactccccctccccggcatcatttcccctcccgcttcctccggctggacctggggtcccccctccctgtaatgcactcctgccccggcccaacctcgccctctctcaccagccttgaactgtggccacctagaaaggggcccattcagcctcgtctctttacagaagtagttttgttcatgaaataaagactcttggacttgatgcatagtttcgattgtgagccccgtcaccttccccccattcccgtccccgaatcttcgagcccgctttccagggaccctacctgagggcccacaggtgaagccacttagtgcctgatctgtgtcggggttgggggagccatgggctcaggggtgagggagagtggaacggagccaggaagggagggggtgccgtggagggaagagaatcgaggctgatgctggggtgcaggggtggcatggggtgtgtggtgtgcccagcagtgtgagtctctggagaggtgggcgctggggagaaggagagggaaggagagacgggtatggatggaaaggcagaggaagccaggctaaaccagcgtgtcccaatgaggggccctgggctgagtggaggaaatgggtgcggtggaggtgggtttggctgggcacagcgggcacgtgtgggtaagcgggtggggccggttgtgcgggtggcctatctggggcaagcagccgaggccgactgtgtccggcgtgtggttgagcacgggcaggtgtctggcggtgaccctgcacgtctggtgtttacctggccctgggtctgacgtgggccgcgcctggctgctggcgggacagtgtgttatctgcctgcggacgcttccggccacttggcctgggcctctgcccttagcgctgtgttttcccggccaagccccccatcccccctatctagtgctaggactttctggctccagaggtcaccgcggccgggcggaggctgccaaagcaaaccagccccgtgacttgtaggaagccagcgggggaggggccggggcaggatgagcagggcaggcgggagaggctggggctggggttggggcccaggaattgggcagggaattaggcagaggtgcagcaagtggcgggcacagccaggacctggggctggaggacgcagaaagggcggggggaagggttcgctgggtgagggtggagtgggcttagggcagctggggccctccatctgatctcttctggtcagacccccacccttcagcctgcactttctccctaaacccccagcctccggccaggcctgtccctgttcccacatccccgcagacaggcacacctgggtccccctggaggtccaaggcaagccccgtagctgggcccgcctggtccagcccccacaagcccggccccatcagccaggtggcctccagtgctgccaatcgaatggtccggcccctccccgccccttcacccgcccctcgcccagccccctcctcctcaggtgaggcagcctggcctagcaggccccacgccaccgcctctgcctccaggccgcccgctgctgcggggccaccatgctcctgcccaggcctggagactgacccgaccccggcactacctcgaggctccgcccccacctgctggaccccagggtaaggacaagggcccccagactcacagttccagccctgaggacaggggttccctcatccccccacccagcctaatgcccacctcctaatagaggggttcctggggacctgaagagggggcactatgacgtccccccaagcacctaggtgttctgtcctgctcttccttcagactcagccgttggaccccagtcctttcctccccagacccaggagttccagccctcaggcccctcctccctcatactagggagtcctggcccccaaattcctcctttcccaagacttatgatttcaggtcctcagctgtctcctccctcaaaccgggatcctcagtcccctgctccaccaggctcaggcatgggggtccccatccctgcaaatccaggcgtccccccgctgctggtcagacactgaccccatccttgaacccagcccaatctgcgtccgtgatcacggcgtgctctggccaaggcccagtccctacagcctgcctggatggacgcctgggactgggggcgccaggactgggctgggctgggctcccccaggccctgcctccccgtccatctcctcacaggtcccaccctggcccaggaggtcagccagggaatcattaacaagaggcagtgacatggcgcagaaggagggtgagtccccttccctgagccccagctttggctctgcctggcgccccgccctctgtgctcttttctctaccctctactcttcggagccccctctctctgggcacccctcccagatgcatccccacccctgttagtcctcctccacctgattaactattaaccacattttctgtgcagctgtgccaccaccagcctcccttctaccctatgtgaccttcctggcgtgctgcctcagtttcccctcatcccccagtgatttctcagctaactctg

SEQ ID NO: 7984 - DNA, 6000 bp, Homo sapiens
caattgaatggttttgggtctattcactgaattatgcaaccatcaccacaaccagttttagaacatttcatcaccccaaaataatctcacatccattagcagtcactcttcatttcctcttacctttcccaccccaccccagccctacgcaaccgctacatctacttctgtctctacagatttgccttttctgaatatttcacgtgaatggaatcatacaatatgtgacattttgtgattggcttctttcacttaatgttttcaaagttcatccatatccaggcgccgtggctcacgcctgtaatcccagcactttgggaggccaaggcgggtggatcacctgaggtcaggagttcaggaccagtctggccaacatggtaaaaccccgtctctactaacaatatgaataattagctgggcgtggtggcggatgcctgtaatcccagtcactcagaaggttgaggcaggagaatcgcttgaacctgggaggcagaggttgcagtgagccgagatggcaccactgcactccagcctgggcaacaagtgaaactcggtctcgaaaaaaagttcatccatgttgtagtatctatcagtacttcattcctttttattatcaaataatattttattgtttaggtctcccatattttctttattcattcatctcttcatggacatgtgggttgtttctgctttttggctttcatgaataatgctgctgtaaacatttgtgttcaagtttctgggtgaacatgttcttatttctcttggttatatatgtaagagtggagatgcaggagtgtatggtaattctatgcttaatctttggaggaactgttttgagacttttttccagagtggctggacaattttatattcacactagcaatatataaatgatttagtttccatacatctttccagtatttgatactatcttttattttagctgttcttatagatgttagtagtgatatctcatcatggtcttaacctgtctaaaggctagtgatgttgaatatctttttagataattattttctatccatatatccccttgggtgaaatttctctttatatcttttgccagtcttctaattggatgatttgatttttttatgtagtgtttctatgttgaatttgagagttctttatatatttgttctagataggagtcctttgtcagatatgtggtttgcaaatattttctcttagtctgtaatttgtcttttcattctcttaactaggtcttttacagagcaaaaaaaaattaattttgatgaagttggattgatttttttagggatcatgcctttggtgtcatgtctaagaacacttcatcaagctctaagtctcacagattttctcctatgttatcttccagaggttttttgtttttattttattttactttttaattaagacagagtttcgctctgttgcccaggctggagtgcagtggcaggatctcagctcactgcaacctccgcctcccaggttcaagtgatcctcctgccttggcctcctgagtagctgggactacaggcacgcaccacccaactggctaattttttgcatttttatgtggttgctttcgagaattttctctgcctcttgtttttagaagtttgactatgatgtgtcttggcatgaatttctttgggtttatcctgtttgtgatgcgctcagcttcttgaatctgtagacatatgttgtgcgtgtgtgttgtcaaatgaagataatttgcagccattacttcttggaatatttttttaaggcccaccctccttttcctccccttctgggacttcaatgacaaaatgttagatcttcttttattatagttactcatgtccttgaggctttgttccattttctttcatctattttctttccattgttcagaatgggtaatttctattgttatacgttttgtttcactgcttctttcttctatactctccattctgctattgagcccatccattatggtttttatttcagctcttgtattttttagttgtattttttagttctaaagtttccatttggttcttctttatattttctatttctttgctgatactttttattattttatttgtttcaagcacatttataatttctcagtgaaacacttttatgatggctgctccaaaatctttgtcagataattctaacatctgtgtcgtcttgatgtttgtgtctgttaattatcttttgttattcagtttgagaatgcctgattcctagtatgacaagtgatttgccattgaagtcaggatattctgggcactgtgttataagattctggatcttctttaaatattttgttttagtgggcttccctttatactgctccagcgaaataaagtagggcactgcctgattgcttccagacagggataaaagtccaggttctccatccagcctttcctgaacctggggggttgggagagatgaggcctccatgttattgtttggtaagggtagaagttcaggttccccactaggaatccatgacaactccctggctgggagtgggagggatgcttcattactgctccctatgtggctttcactgacactgtgtgtggcagagagaggggggtgcttgttaccactgagtggtggcgaaagtcccaactctccaccaggccccctttgacactactccaatggggccgggtggaatgcctcatttctgcattggggtggcagtggatgtccaggctgcccacatggtttccaccaacaccacatcgggggagggtgatcccagtggggaggaatgtcccagctccaactctagcatcactctggctgagtatgggagtggcctagggttctttgttacagcctggtgaaggtgaatgtctaggttttccatccggcctttgctgacaagggtgatgatggaacttggatggagcggagcaggtatggactaaaagagctctgtctttctaggatgcccctttcctcgttctttggctagaaaagcatagttttgctagaacttgttctgttgggactttttcttgtttgtgccccttggcattttcagttgttggcttctccagtattcagcctgagatatatgaggcaaagagaaatcccagggaattcaccaccattccttaagtcccgaggttcctaaccagtctgcttctctccatctttcagtcttcttatgcttgtcttgtcacgttcaaggttttcagttatacttggcagaataaataaatacatctactccatctttccagaacatcactgctttttgttcattttatttatttattatttactgagacaaggtcttactttgttgcctgggctggagtgcagtggtgctatcatggctgactgaagccttgaactcccaggctcaagcgatcctcctgcctcagcctcccaagtagtttggaccacaggcatgggccaccatgcccagctacttttcattttttgcttttgttgactagccccacagagttttgctgtgttgttcaggttggtctcaaacttctggccttaagcaatcctcttgccttgctctcccaaagcgtattacaggcataagtcaccacacccagccctatcggtgcttttggaagaaggtgttcttccctctctctgtttccctccctatggccagctgcccatagagggcagtggtgctggagtgaagacctctcagcgcatccctcttcatctgtaggatgtgcatggcttccaatgctgtctgttctgctcctgagacactcgctggctacaggattataaaggtgatgaggtttcagcctaaagactctccattcaataacacttcctacaagatatcttttttgtttttttgagacaggatctggctctgtcacccaggctggagtgccacagcgcgatctgctcactgcaacctcagcctctcgggcttaagtgattctcctgccttagcctcctgagtagctgggaccacaggcgcccgccaccacacccagctaatttttggattttttttttttttttttttagtagagatggggttttaccatgttgcccaagctggtcttgaactcctgagctcaggcaatccacccgccttggccacccaaagcgctaggattacaggcatgagccaccatgcccagtcctacaagatatcttttctttttctttctttctttctttctttctttttttttttttgagacagagtctcactctgtcacccaggctggactgcagtggtgtgatctcttctcactgcagcctccgcctcctgggctcaagtgattctcctgcctcagccccctgagtagctgggactacaggcgcctgccaaaacacttagctaattttttgtatttttagtagagacggaatttcaccatgttcgccaggctggtctcgaattcctgacctcaagtgatccacccgcctcagcctcccaaagtgttgggattccaggcatgagccaccgcacccggccgagatatctttttcctcctcaatatctatgtgctcctccctcaacccttgggggcttcagtgtaggtggtcagattccccaccatttatgcctatgatgaaaagagtggaaatggtaataactggatggtgtcactaaactacaaatactttcaggtaggcctgtgcctttttcagcgggctgcagttctcctgcttggcttgagtcattcgcatttcctgagagctgggtagagggggagttgtggaggagcccattctgaaactgatctgatattgcaaacccatacacggaaaggaagaactgcccatacgtattcgagtcttccaatctgactccgagcccgcatccccctcaatcgtctcttttccccactccccagatcacggtgctgcttggtccccctcagagccatagagaagcagggggtgtggccatggaggggaaacctctgtcaccagagactttactgtacttctccttttgctctcagatgctgccagggtccctgaagagggaagacacgcggaaacaggtaaaaatcattttgcttttattttgcattcaacaagcaagttattacggaacagcagttatgggccaggcatacctcccagagctgggaacacagtggggacctccctggctctctcttaccggtgttacaacaggttgtagacagacccctgtcttgagcatcctccttgccaggcctgctgagtcttctgagagtagggtaggttattggatgcccaggagggaagaaggagccagggaggtcagccccaaggttctgcaaggccctcaacaggcctggactgaggaggtctggacagcatggccctgtcctgagcctctgtgcataataactgctgtccctaacctccaccccaccctcagccttccaattcccgggcctggggccctactcctgtgctccagagactcctggagctccttgaggcagcacacagtcctgctctggaggcgcccatctcccactcatgctgggatgctccagcccgtcccagagcaggttgtggctggagggtgctggcagaggagggacaatggcccggctcctggaggcaagtgttggctgcagggaacggagtctagtccttgccacagcccttgttaccccttaggtaaccttaaggggatttcaaagaactctggctctgcaaccctgctaagttttttatggaacatgtaaaatagatcccatggccaaagaagtatggacaatgtattatactatactctaatccccatgtctagagattaatggtgtagatagagtttactgaaaggtttttaaagtcctgcagtaaagaatcttacttaagccaggtgcggtggctcacgcctgtcatctcagcactttgggaggccaagttggggggatcacctgaggtcaggagtttgaaaccagcctggccaacatggtgaaaccccatctctactaaaacaaacaaacaaacaaacaaatcagacgggtgtgg

SEQ ID NO: 7985 - DNA, 6000 bp, Homo sapiens
tctcactcccctcccctctgccctgacagcagtaaaaaaatgcaaaaaatgacagcggtagcacttcctcatcgggttgtgaaggttacatgagtttaatgcaggtaaggcacttagaatatgggcacaggacaggtgttcagtaaacacgtataaaatggctaactaaaaaaaaaacacgaggccaggtgcagaggctcatgcctgtcatcccagcactttgggaggctgaagtggggatcacctgaggtcaggagtttgagaccagcctggccaacagagcaaaccccgtcaccactaaaaatacaaaaaacaacaacaataaaaaactagccaggtgtggtagcgcatgcctgtaaccccaactactcgggaggcggaggcaggagaatcgcttgaacccggaaggtggaggttgcagtgagccaaaatcgtgccactgcactccagcctgagtgacagagtgagactctgtctcaaaaacaaaacaaaacaaaacaaagaaaacccatgaggccaggcacggtggctcacacctgtaatcccagcactgtgggaggtcaaggatcacttgagcccaggggttctaaagcaccctgggcaacaaaagtgagaccccatctctacaaaaaaatttaaaaattagcttggcatggtggtgtgcgcctgtagtcccagctactcgggaggccaaggcaggaggatggccggagccaggaagatcaaggctgcagtgagctctgattgcaccactgcactccagcctgggcgacagaggaagaccctgtctcaaaacaaacaaaccccacaaacattgattgaaccccccattgaggggagcaggctcaatggcaaaggaaacagaccgacactggccaagaatcacagaagcaaagcacccggttactcatgataaacctgggaaggaagaaagtggaacagtttattcacttaatgcttgtttgctaaagccaagtagaaaacggcaatactagatgtttagtgtgcttcaaatacaaatgtttgtcaaaataccaagtaaaaacataaatttataaaacaggaaaccagaaacctcccttacctttccaatgtaaaccatgagccactgctgccccaaggctgcctcaggcttcaggagtcctccaggagctttttctttaatgcagtgtctgttttcagggaccctcctggcctttggcagccagcttcctattgcaggagctgagggtctaggagggttcatggcgaggttgtcagagctgggaagcagaaagcagccgggcaggcctcacagtcacagagtccacgtcccgggcagcatatggagaaagggtctgggctggctgacagcagtcagcattggcgcctctgaggaggttgagggctgagttggggaggtcaccacctgtacccaggcataacaggggtggtgcaatcagcaaagggaaagtggtctgaagtggggcagtggtgaaaagctaggccagcggggtggagcccatctggaacaagtaggtgtgtggggtaggggacgcaggtggttgcaggtgggccggtacctgctcagcctgtcaaatggtgaaagccatggactatgaaggtggggctcaagcaggggagactgactcagccctgccacttccccacagcaaagagcccaaacagatcccctggagggctgtcgggagcccctacgtggtggagtccacaggcgtgtacctctccatacaggcagcttcggtaagctggggagaggtgcccagggctagctggggggatgatggtgccagaagcccctgacacctgcgcttcctccccaggaccacatctctgcaggtgctcaacgtgtggtcatctccgcgccctcaccggatgcaccaatgttcgtcatgggtgtcaatgaaaatgactataaccctggctccatgaacattgtgaggtaatgtgggcagtgacatcctgcaatgtgtggaagggagggtagactcgtcctccccaccctcagccccactggattcctggtcgcttggcttctgcttctccttcccgaaactatctgctaaaaacgcatgacttccagaggacaagcttggggagcctccccagctgcacctcagtgcctccttcagtctgacagtgtccccacagatccctctcaccctcatcctgacgtttcataaaaccaagtctgcgtgcataccccaagaggggtaagggtggaggggtggctctgcgactcacctcacagtgtccgtgcacaccttggctgtttcagcaacgcgtcctgcaccaccaactgtttggctcccctcgccaaagtcatccacgagcgatttgggatcgtggaagggttgatggtgagttgaggatgaggggctggggcaggaaggatggcagggaaacccaacttcttcccgggccttgcttactgtatggagttaagagggagagactggtttcgggaggagaggcccaccagtgcagaagtcacttaaaacactgtgcaaccctcaggcaaggctggaccctggcctgcacacatcccctcctgtggtctgtggtggtggccccaccagcctccacacctaggccaccaacttagtcctggaaaaaagaggcatgggagcttaggagcatgaaggcctcatcttggtccttctcttccccaagaccacagtccattcctacacggccacccagaagacagtggacgggccatcaaggaaggcctggcgagatgggcggggtgcccaccagaacatcatcccagcctccactggggctgcgaaagctgtgaccaaagtcatcccagagctcaaagggtatgaggacaagaagctgcaaccagggtgggggcatacgccaggaggactggactggcccggccctcagtccttaagaggaaagcaggggcctggcccagccacagggaaagggggaatggagggcaacgtccctaagttctgactcctgttcctcatgggggattctccaggaagctgacagggatggcgttccgggtaccaaccccggatgtgtctgtcgtggacctgacctgccgcctcgcccagcctgccccctactcagccatcaaggaggctgtaaaagcagcagccaaggggcccatggctggcatccttgcctacaccgaggatgaggtaggggctgaggagaggagaccctgggaggagccctctgggaagggacatgatttccacttgccagggagctgctctcaatgtgccaagtcagaaactgcagggcaggaagggagatctccctgcctcagggcctttgcacttgctgttcctttagtctggaatgcttcccttgccaggtgaccatacagtctgtccttacttcctccaagtctctggaggaacctccctcttcagcaaggcaccccctcaaaatatgttctttttgtggccatattcctcacctgaaatttcatttcatagtcactgttggccccagtggtgtgtgcactccaagaaaacagggatttaggggctgccttttcacttttgtggctccaacctggcatacagcaggtgactaatacatgcttagtgaacaaaagacaacagctcccatttttttcaatacttgctcagggccaggccatggccagatgccttctctgtgaggagtggatgccatggtcatggtggacccctgtacatccaccttggtgctgtctccctgcattaactcctgcaggtccactttcccacagtcactgggatcttttgttttaatggaatcacattgcatcacccgttttcaggattgaaaacactcctgtggcctttcatgacactagggctaaaaccctcaggtcctcccttcctgcagctccttctacctcagacactgtgctgagggccccagccggtcagatctttctagtcatctagacccaggctcatggccacccctcagagaggccctccatgctggcccattccaaacgcttgcattattcctaggaaagggatgtactggtacagcatgagggtgtttgtgacctgtgccctttggccagaccctgacacagtgccttggtcataccctgcacttggtcataccctccagtccagagactggacacagtagggctacatcaaatattatagatgaatgcatggatgggcgatagagttaagagtcggggcctcagctcctggaggtccttgctctgccggacacacttatctttgaaattctgacttccaggtcgtctctacggacttcctcggtgatacccactcgtccatcttcgatgctaaggccggcattgcgctcaatgacaatttcgtgaagctcatttcatggtaagggggaaggagctggagacttagagggaggggaactaaggggtggtcggaaggaacccccttgaacctcccgacccctcctccacaggtacgacaacgaatatggctacagtcaccgggtggtcgacctcctccgctacatgttcagccgagacaagtgaaacgggaaggtcctttctttccttcccaggggccggggccggaacatgtgcctcccgttccagcatctggctgcccgggggaggaaggacacccggggcgggcgccccacgccgatgggtccatggtgaaataaaaaacagtgctcacggctgcgtcccgtatctctgcgccggtcagggcgggttctgatccgggtttgaggcccgccccacccttactcgatcgcctgcgcccacgggcgaggggtcgcgctcgactccaagccgggttccacttcaggagaccgggaccgcgatggcagcggtagaggccccgcatggccggaagtcactccccaaagcgctgggccggcagcggtgggacccagggccggccacgggctctctgacgtcactgggcgcgacgccccgcgccgggactactgctcccagaaggtcgcgcgcgggcccccgccagtcaggtgggtgccaggccctggccgtggcgaaagagccggcggagccggagacccgctcccggagacgccgcctcgcgatccccgcgcgggcgggaccgggcggccggcatcatgaccctgtttcacttcgggaactgcttcgctcttgcctacttcccctacttcatcacctacaagtgcagcggcctgtgagtgcgggaagggcgcggggcggagagggcgcggggcccgggccgaccctcacctcccgcttctccaggtccgagtacaacgccttctggaaatgcgtccaggctggagtcacctacctctttgtccaactctgcaaggtgagggccaccgggaagccacgtgttctggcccccaggctctgcagacccagggacccgcccccgttgcctatccgcgcccccgccgccccacggtgggaccgccctcgggactccgcactgggaggcgtcaggatacctagagaggatggactttaaagagggcacgacctgagaagagacctagaagcaacttttgcgtagcacttagtaaaactgagaaaacctcagtagtgtggttggctaacaggttttttttggtgcggttaagagtgatcactgattccgtacgtgctgctaacactgcccaaggagcagcaccttcagacctgactcagatgccctgtgatcacccagaactcaaacttccagccccctcggggacccggggacctatcctctatctccccgattcctgtaattttgccaccatctggtggttcctcttccagatgggcccccagaacctgtcctgccctcttcctacccacgaacttcccacaaatcccacgtggtttatcttgatcccctcaccttgaagtgacctctttctgctttctgttctcagatgctgttcttggccactttctttcccacctgggaaggcggcatctatgacttcattggggtgagaggggccagggaagggaagggagttcaggaatggggctccctgtccccctgtgcttacttaagcctcaacctgacc

SEQ ID NO: 7986 - DNA, 6000 bp, Homo sapiens
gctggagtgcagtggcgcaatctcagctcactgcaacctcagactccctggttcaagcgattcttctgcctcagcctcccaagtagctgggattacaggcacgcgccaccacgcccagctaatttttgtatttttagtagagacggggtttcaccatgttggccaggatggtctccatctcctgactttgtgatccacccagctcggcttcccaaagtgctgggattacaggtgtgagccaccacacctggccttgtttcttaagcacttaccgctaacatgccaaatgttatccttcatcattgcaccactggaatgtaatttccatgcgggcagatttggaaatatatatttaattccccttttcagctttttttttttttttgagataaggtcttactctgtcacctaggctggcatgtagtggcgtaatctcagtttactgcagcctccgccgcccagactcaagccatcctcctacctcagcctcccaagtagctaggaccacaggcatagaccaccatactcagctagttttttgtttgtttgtttgtttttgatagagacggggtttcaccatgttgcccaggctggtctcaactcctgagctcaggtgatctgcccgccttagcctcccaaagtgctgggattacaggcctgagccaccgcacgccagcctgcattttttccaaatgttctaatctttctcattttattatttttttttttttaattttttttttgacacaagacctcactctgtcacccagcctggagtgcagtggcctgatcacagcttactgcagccttgaactcccaggctcaagagatcctcccaccccagcctctcaagtagatgggactacaggcatatgccaccacacccagctaatttttgtattcttttgtagagatggagtttgcccatattgcccaggctgatctccaactcctgggctcaagtgatcctcccgcttcagcctcccaaggtgctgggattacaggcatgagccaccacacccagcccagctgttaatcttattgatgattaattatacgtgatgggtcacttgtcagttgctgctttcaaggttctctttttatcgttcaataatttgattatgatatgtctggtgatggatatctttgagtttatcctatttgaagattattgagcttcttggctctagattgatggtttttttcatcaaattttgggagttttcagccattctttcttcatatattcttttttacccctttctttttgtcctctccttctgggattcccattatttgatgatgtctcacaggtctctgaagttctgttcacttatcttcgtgcttttttctttctgttccttagacttgatcatctcaactgatctatactcacgttcaccgatcttttcttctgcctactcaaatctgttgttgaaccctctattcctctattgaattttttctttttttttttttttgagacggagtctcgctctgtcgcccaagctggagtgcagtggcgcgatctcggctcaccgcaacctccacttcccgagttcaagtgattatcctgcctcagcctcctgagtagctggtactacaggcccataccaccatgcctgattaattttgtgtatttttagtagagacagggtttcaccatgttagccaggatggcctcgatctcctgacctcgtgatctgtccacctcggcctcccaaagtgctgggattacaggcatgagccaccacgcctggcccatttgaattttttcattttagttactgtacttttcaagtcccaagtttctgtttagttcttttaaaataatttctgcttttaggccaggcatggtggctcacacctgtaatcccagcactttgggaggccaaagtgggaggttcacttgaggtcaggagttcaagactagcctggccaacactccatctcaaaaaaaaagacagtattctttagcattagttccgctaatgattggacaaagatttccttagcctccaaaaaccaataatctcctagcctttgctgaggcatggtgggccatgctttcgacattcagccaggcaattgacaactctgccttcgccactacttctcccaggaaggcacacatcctcaaggtcagcccaatgtaagaagactgggttctcatctctggtctttcttgagcctgcatatactcctgggcatgcacacaaccctatgcatgcatgtgaccttctagatttccaagaatattttggagtttttcaaagccttctcattccccagctttatcttttaaactgtttcattagcctattattggcctcaactgttattcattgcttaggcagctgcctagttaaacaattgcatgcaattgtgtttcacaaatgcccctggggaaataattttgacgatgtatgagctctaagttaggtcaaatacagacaacattgcaagtaggggcttccagggaaccataagacgaatcaaataattctgactttctgggagtgaggcttttatggagtttcatcctcttctgccccgtttggtgtatgccaggctgctagtttccactgagaatgctggcagttaatattcaaggctaccatggagctggaatgggggaatggaactaggccaattaaaaatgtcacaaagtataaaaattagccgggcgtggtggcgggcgcctgtaatcctagctactcgggaggctgaggcaggagaattgcttgaacctgggaggcagaggttgcagtgaactgagatcgtgccactgcattccagcctgggcgacagtgagactctgtctcaagaaaacaaaaataaaaataaattttaaaaaagtcataaagttcactgctcttactaagattcagctgcttttcttgaataaacactttacagatttttgttgttgttgtggagacagagtctcactctgtcacccaggctggagagcaatggcacgacctcagctcactgcaacctctgccttcgaggttcaagcgattagctcctgcctcagcctcctgagtagctgggattacaggcacttgccaccacgactggctaattttgtatttttagtagagatagggtttcaccatgttagtcagcctgacctcaggtgatccccccaccctggcctcccaaagtgctgggattacaggcgtgagccaccacgactggccaaaaaaactattttaaaatctaaagtgggttgactaaaaccaaattaaccattttaatcggaaaacatctcatgtatcttattaccaaaccagtgccttgacgatgggattttcagtgtcatttgccaaattcgcaggcaccgcagtggggagccactgctcccacagcagaggcaatacacggcctagccttggggttgagaagttctggggacggtgtcgggggccctgggccaccatttttgcatggagccagccctgcgctgcgagggcgtggcatcggagagaccgtggcctcgtgggcagcatcggcggcccctggggacacgcgctggctcagtccccacctccgccagggaagcggtctgatgatacccatttcgcagatgggcaaatccacaagccaagtcgtgccgcccagaagaggcagaaccgggatttgaacctaggtttctcattctgcacctgaagaaataaatgtctggtccatgcgtgtgttggggggcgacggggacttttcttcaaccaagcccggtgtgccccctctcattttctagcacgttcttctcccccatctttgcacttatctcagactcccctcacacacctatcctgggtgccatcctttccctcagcccaccgcccatgtagtcagcctcctaagcgccccttccacctgtcccctcatctccccactgctctgcctcggtccagccctggccttggcaggggtccctgcctgggcctccccacgggctcccggcctcacagaggagcagccacctgtgcaaggtcacacagcaggagagacacttctgggattcaggacccacctgtgggtccgaagtggattttttgtttgtttggttttggagacagggcctggctctgtcactcaagctggagtgcaatggcacgatcttggctcactgcaacctctgtccccaggttcagccatcctcccacctcagcctcccaagtagctgggaccacaggcatgagcctggctaattatttttgtattttttatagaaacggggtttcactatgtcacccagtctggtctcaaactactgagctcaagcgatccgcctacctcagtttcccaaagtgctgggattacaggcctgagctaccacgccccgccctgatttggatcttgctcctattcccaggaaggcccatgtcctagcaagagagacaccaggtggtgcgcacgcccctccacctccaactcctccaccgccaacaaagcctgggacccagaggccatgggtcctacacaatctggtatttcaggtctataaatcatgggggtggcagggagcccatcaaagctgttcatccagcctggtctgccggctcagcctcttgtccaccccactgccgtgccccaaaacacacacacacacacacacaccctccctccttcctgggagactagcccaaggaggggcctgggcgtatatagggagccacggtgggtggggctggccagagaggctgcagacagagaaggtgaggagggggccctgggagtctgggtatggcatgaggggtctgaggctcagggaggggcagtgccaagttcaggccagtgactgccccaccggagcccgggtgtcctcttgtgcaaaatgcctccccaccagggctgtgggtacatcagtaccagcctgggccccgcagagagctggagcaacccctcgaagccagggtgtggctcagagatggggggtccggctggccctttacgctcctggcctcatccctgctcatgtgtcccaggatgatggcgtctgcggcagcagcggaggccgagaagggatctccagttgtggtgggcctgctagttgtgggcaatatcattattctggtgagactcgccccagtgctgggagccgagtggttgtgtggtggggaggggacagtcctgagctcggggtgggggatgagggtccagaactgtctctcgggcagactcagtggtcagcacagcctgggttgaaatcccagctctgcctctccccagctctgtgaccttagcaagcgactgtccctctctgtgccttctttcctcatctatagactgtgtcctcattgtgtgggctgttgtcatgtggattaatccatgtgtggccctcagctcagagaaagtgcccgaccaatgctggctatcaccatcagcatcactatggatataaagtgacagcctggtgcacaggaggccacaagaaggaaaaacaacagtgtctttcaattaacattgggttttggttttgtgttttttgttttgttttgttttgttttgttttgttttgttttgtttttgagacggagtctcactctgttgcccaggctggagtgcagtggctgatctcagctaactgcaacctctaactcccgggctcaagtgattctcctgcctcagcctccagaatagctgggattacaggcgcacaccaccacgcccggctaattttttttttttcagacagattctccctttgtcacccaggctgaagtgcagtggcgagatctcggctcactgcatcctccacctcctgggctccagcaattctcctgcctcagcttcccgagcagctgggattacaggcacatgctaccacacccggctactttttgtatttttagaagagatggggtttcaccatgttggccaggctggtcttgaactcctgacctgaggtgatctgcccacctcagcctcccaaagtgttgggattacaggtgtaagccaccgcgactggccgtgtgtttgttttagagacag

SEQ ID NO: 7987 - DNA, 6000 bp, Homo sapiens
gcgtgcgccccggtcttgtcacttttctccgggctcgccttttcacccccctccagcctgctccgcacgaagctccgcccactcccggcttctctacataaagcccaccctttccacgcggcccctatcccgcctctccagccatatccattcgctgttgccctacggtagcccgcactatctgcacaggctctgcctgccatccctgtctgatctgcataaggcccaccgcttagacccctaagcaagcctctctggcccgtagcccacagacctcgccccttccccgctccctatcacctgcaagctccgcccaagcaaggctcggtctcggattctcacccgggcaggggggcggcccgaagcgttgcaggcagctgctgcagcacttgttgtctgggttccagtattcaaggcggccgcagtactgggaggcttccggcggtggcgccagggccagaagcaacaaggccgtcaggaggcatcgtccaggccccatctggggggccgtgatagcgggacttccaaacacagcgcctctgctacactttccggggaaatcgggcagaagaaaggacgcggtgatgtgggggaacagaattctcacgcctcttcggaagccgggaatctacccccgagccctcatcccccaactgagccggttatcagagaagcccacaaggccactaggggactaacagggctgcggatctagattgcaagaatgcatatcccacctctgccgtgtcctcacccacccaccctcccttttccatccctaaaataagacaatgatagcacctgtctcatagggttattgtggagaattagaaccgtcattagaagtaaagcaggggctgggtgtggtggctcatgcctgtaatcccaacactttgggaggccaagacaggaggatcacttgagcccaggagttcgagagatcagcctggacaacaaaatgaaaccccatctttacaaaaaaaaaaaaaaaaaaaaaaaacagcaaagcactttgccaagtgcagtggctcacgtctgtagtccctgctactagggaggccaaggtaggaggattgcttgagccatgaattacagaccagcctgggcaacacagcaagacctcatctctaaaaacaaaaaaaactggccgccgggcgcagtggctcatgcctgtaatcccaacactttgggaggcccaggtgggtggatcacctgaggtcagtagttcaaaaccagcctggcctacatggtgaaaccctgtctctattaaaaatacaaaattagccgggcgtggtagcgcatgcctgtaaatcccagctacttgggaggctgaggcagaattgcttgaacctgggaagtggaggctgcagtgagctgagatcgtgccattgcactccagcctgggcaacaggaatgaaactccttaaaaaaaacaaaaacaaactaaagtgctgaaaacagcacctcacatacagtaaactcagtgtttaagtgtaaggcattactaactcccatcacaattcggcaggcacggaggagtcagccccatactggctggagaccacctcccagcacctcacctcacctttgaatcctaatctccttggggctagggctcctcccacctgccacaaccaggtctctcccccttgaataagcctcagatggaggtgctaaggttttcagcacaaaggtgtccccaccctaccagtaccgttagggtcctgggtcccaagctggccgtgccaagttcctcagctgaagttgtggccaggacccagtcttgtttccccttttcgtcacatgtgtgggtggagggaaatgccaaaccacagcaaaagcaagttgatgccgaagtgaaacacgcagctttattaagacaggggcggtagaagaaggtctccatgctgaacagattacattatggagcccgggagcctgggaaggatggggcaggagagtgaagggggctttgaggagaggtcctgccaggaacatctgtccctgttgggggtgaagggtaagggggccagggcctcagaagcggccatgccagtgatcaggggaacaccgatggttcctctctcggggatggtggccagtatggaacctcgggggtgacctgggaataggagcgttgagagttctgttagaaccctgaggagtggtgcagagatcctgcaggcctgcctctctgctctgggatgaggcaggagggtgctgaaataactagagttctaagacacgacctcagtggccagtatcaggggaactcagtggccagtatcaggggtggcaatccaggctggtcgtggattaggggttcaggctggtttggggattgggacttaggtactggtctccagatggagctcagaactactcttagggtataagagtcttgggaatgaccgggcgcagtggttcacgcctgtaatccccacactttgggaggccgagatgggtggattacctgaggtccggagttcgagaccaggctggccaacgtggtgaaaccccatctctactaaaaatacaaaaattagccaggcatggtggcaggtgcctataatcccagctacttgggaggctgagaaaggagaattgcttgaacctgggaggcagaggttgcactgagccaagactgcgcctttgcactccagcctgcggaagaagagcaaaactccgtctcaaaaaaaaaaaaaaaaaaaaaaaaaaaaaacagtcagccgggagtggtggctcacgcctgtaatcccagcactttgggagggtgaggcaggtggatcacgaggttaggagttcagaccagcctggccaagatggtgaaaccccatctctactaaaaacacaaaaattagccgggcatggtggcaggtgcctgtaatcccagctatttgggaggctgaggcagagaattgcttgaacccgggaggcggaagttgccatgaaccaagatggtgccaatgcactccagcctgggcaacagagtgaggctccatctcaaaaaaaaaaaaaaaaaaaaaagattcttgggaacgtggttactggggcttagggttaggctcatctgaggatataggggccttaggacatgaggagacatagcaggctggtcctgaggtacctgcgcctgggtccccgcccatagagctgcctctggaggttctgggaaatgggccgcagatgcatgaagttgcagaagccacctcgggtacattccctgcatagagggtagagagatggaggaagccattgtcactgacagcccctaccacgcattcaaagtctgggattccaagtgcccatcccacccttgaactaccataccccatctcatactggcgacagcatgactcccggaagtcagtgacaggagacagctcaccgtgcacagcctgcccgttgaaccagcggttactgagttcagccacggcccgctctccatcctcctccctccggaactgcaggaaatgtcagtcagggtcagcaggagaactcagagatcttcaggggactcactacccgctctggggctggactggatttagtgatgaaattcaagctgagagcctacagtggccaccatcaggcattgaaacgcctccacttctgggccctaagtggggggcagcaagcaccttgacatagacgttgcccacgaggtggtccccaaggttgtcgcacacattcatctcttcaatctccccatacttctcctgcagttctgtgaacacctcctgtggaagacggggaggaactcagctgagctcccacaagaaaccccatctgcccctaccaaccctcacctcgaagaagctatcatagtgctcctgcacctccacgtcactcacatgacctggggtgggggcgggcagggtggaatcagagtgtagcctactgggggctgttcaccttgcccccaggcctggtcccttactcacagtgtgatccgtctgcagtttgggctgtgttctgtggattccggtacaggttgagcagcactatggtctgcacagaatttaaaaggggcggggcctgagctcagagggcagggctgcatgaacagagagtgaggcatgaaggttgggggtggaaccttacaccccagcctaagcatcatgagtgcatcggcgatcctttgcccctaagaaaccagaaaagggatggaggggactggcaaggatgaacagcgggatggaagggactggcaaagatgaacagccgccgtgtgtagcctgtacgcatgggggcgcgaccaagttcccgggaaaacggcacgaagaccggtgggaggagcctgcagaaaggtccaatgagaaaaaaagccgggcggtggggagggactcaggaacccggaataggcgggacatggtgacgacggccccagaaggggaagggccagggagccgttaacccccgaggctccgtgccgggtctcacctggctgaatgtcggcttgttgtgaagccgggagcaccggtccccgtgccggcagaccccgatcttaaagtaaaaagagcagttaaccctggaaaaggtgcaaagacaaaggtgaaccgagggccggggaagctgggcaccccagaaacaccgccccaccacccaggaccccagtaccccggccccgaccccccgagagtccactcccagcgcccgttctcacttgtccttctcagtcccgaatatcgaagctaaatattcagccatttttacccaagccctccaggtctggctgctcttacgtcacttccgttgcttaggagcactgggaagtgtagttcgttgccctctccaggcgcttaccaagcgctcggaaacgccccagggcgcttgcgcgtgggaggcgcgcgccctccccatagactccccggtaggagttcttttaacagcgcatgcgtgcagtgttgcctcgcccaaagaagactacaatctccagggaaacctggggcgtctcgcgcaaacgtccataactgaaagtagctaaggcaccccagccggaggaagtgagctctcctggtgagttgggggtcgtttcgcccaccctagtaaatataaagagctctttaatccagccagcttactagtgggggtggggatgccctgctttcagcaaaccgacctttacatttatctctgatttgttctaataggggcgtggttgttcgtgatccttgcatctgttacttagggtcaaggcttgggtcttgccccgcagacccttgggacgacccggccccagcgcagctatgaacctggagcgagtgtccaatgaggagaaattgaacctgtgccggaagtactacctgggtaaggcagatcgctagggtcccaggagaagagaggggactggactagagcacccgagggaagagggcctcggggcctggattcttaagtctaagagatgaaggacctgcgaacgccgactcctggatttgagtggggagggcctgggtcctgaggaatgaggaagctggggcctcaatttctggatcccaagagaggagggggattgagggcctggactcttgggtcctgtgaaagagatggttgaggaatcagattcctggatcccaaagaggagccagattcctgagtccctgacaacagaaatctccatttgaacttgggtgtgggagagtttcttccaaatagatctcggtgggagttggagaagatcttcattgccttatgaggttttggggtttgtttgtttgtttttctttctccctaggggggtttgctttcctgccttttctctggttggtcaacatcttctggttcttccgagaggccttccttgtcccagcctacacagaacagagccaaatcaaaggctgtgagtctagagcacagaggagggaggccagtggcaggggagagggggaagcggggaatcttggtgggaagggacaatggaggatccaaaatgttggggctctgggtgagaagggaaggctggtctagggaagtctggagagcagccggaggccaacc

SEQ ID NO: 7988 - DNA, 6000 bp, Homo sapiens
tctctgtcttgctctcagtctcaatctctgagtctctttctctgtctctttaaaaaaacttttttttcttttttcttttttttttcttttttttttttttagagacggggtctcactatgttggccaggttgatctcagactctttccttcaagccatcctcccaccttggcctccccaagtgttgggattacaggcgtgagccactgcgcccagtctctttatctttccatctttctctccttgtctaagccgttctctctccttttgtctctgtctcttcctctctctctgtctctctctctctctctctctcaatctctatcttctctcctgccacccctcactcctgctccttgtctcactactcacagcctttcaagaaggacctgcagcccagagtccagcaggccaggagcctaggagagcgatgaggctgatgcaggcactggcagagtcagccctgctctctgacccagcttgagctcattctcacagtgcaacctcccccaggtaccttccagagcccccagctctggcctctgcccagcaggctcctcccagctggcccagctggagcataaaatcccctgtcagcacatgccaggcgcgttcctcggtgcctccccagcctccgtgaccccagggcctggcttaggctgggaagatgggagaagtcagatcaaggtggtctcccagctcagcaggggagcagccagctgggcccccagctcttccttgccctgatacatgaccttggcaagtctctttctttctttctttcttttcttgagatagtcttgctctgttgctcaggctggagtgcagtggcatctcggctcactgcaacttccacctcccatggcttgaacctcccaggttcaagtaattctcccacctctgtctcccaagtagctggtgctacaggtatatagcaccatgcctggctaatttttgtatttttactagagacggggtttcatcatgttggccacgctggtctcgaactcctgacctcaggtgatccatctgcctcagcctcccaaaatgctgggattacagacatgagccaccgcacctggcctcccttccttttttagtagacatcagtgcctaaatgatgtcagggatctctgctggggaggatgcaagagtgagtgtgacaggctgggagagtgtgggagagagggaagatatgcatgtgtgtacgtgggtgtgagagtggggaaggttagagtgaactgcgatctgtaataagcatgtggagagcgtgtgtgtgacagtgtcttacgtgggagtgcacagggtgtgggcgggagtaaaaggcagagtccaattccaccggcccccagtgtgggtgcagtgtgagcccaaagtgggcgccctttggcaaggactgcatgagctttcttctccctctttttcttgccctctctcccatctcttctttccttctccatgtctctctctctccctccctctatctatcttgatttatctttctttcttttgagatggaatcttgctctgttgcccaggctggagggcagtggcatgatcttggttcattgcagcctcaacttcctgggctcaggtgatcctcctgcctcagcctcctgaatagctgggactacaggtgcacaccaccactccagctaattttttaaaatttgtttgtagagacagggtctttctctattgcccaggctggagtgcagtggtgtgatcatggctcattgaagcctcaaacctcctaggctcaagtgttctttctgcctcagcctcctgagtagctgggactacaggcccgcatcaccactctggctatttttttttttttttttttttttttgagagggagtcttgctctgtcacccaggctggagtgcaatggtgcgatgttggctcactgtaacctccgcctcccaggtccaagcgattctcctgcctcagcctcctgagtagctgggaatacaggcattgaccaccacacccagctaatttttgtatttttagtagagacggggtttcgccatgttggccaggcaggtctcgaactcctgacctcaggtaacccacctgccttggccccccaaagtgctgggattacaggtgggagccgctgcaccccgccacttggctaattttttttaaatgtttttgcagagacagagtcttgctatattgcccaggcttgtctggaactcctgggctcaagcaatcctcccatctcggcctcccaaagtactaggattacaggcatgagccaccgcacctggcccttgatttatctttcttttttttcttttttctcttttttctttttttgagatggagtttcactcttgttgcccagactggagtgtaatagtgtgatctcggctcactgcaacctctgcctcccgggttcaggcgattctcctgcctcagcctccctagtagctgggattacaggcatgcgccaccacgcctggctaattttttgtatttttagtaaagacggggtttctccatgttgatcaggctggtctcgaactcctgacctcaggtgatcagcctgactcggcctcccaaagtgctgggattgcaggcgtgagtcattgtgcccagctgatttatctttctatctttctccatctgtttgagactctctcgctctctatattaagttgttaaatctcagtcaatctttatttcactgtgtctctccatctctatatgtctctgttattctgtttctctgtctctgttctcacctctgtcgctcccctcaccccacagtctgtctcacacacaccaggagctccataaatatttgttctcagccacactctgaccacgcctctttctcttatgtgtctctccatctccgagtggctctgctcatcacatccctggattttataaccatatgctggtgggcctgccctccccgcgtgcacatacacttgcctgggataagcttcttctgcctgcttatctcctgcgggaattggaaatgctagttttctccctacctccccaagacccccgccaatatcgttcccaggaacaagatgaggcatctggcctcagcccccagcttcatcctcgatgctggacttccatcttccctcacatgcttgactccttgccctcctcccacctcccctctcccaactgctctctacaccccctgggaaatgggctggatgccgagctgggggagtggctctgtcctgggggccctcgccagatggtgtccctaggtgccagagcgtggagctgtcccttgctggggcctttaataagcacaaaccttccaccctccaccttggctgttttccttctctgcatgctcctgggaccttgggctctccatctttccatgtccgtagccccagagagccaggaaggggaagcggcgtcaagtgcctggaaaaacagccccatgacttgagttcctccctaagactcaggagttccagccccatgtccatcctatttcaaaatccaggcactagataagccacacagaagccgggagtgtaggcccccagatccctcccctctcagaccctggggtctcagtcccttctctccaaggactcgggaatttgggcctctgatcctcctggccacactacccacccccgcacctccccatacacacacacacacacacacacacacacacacacacacacacacacacacatacacacaggacttaggacagatgttcacggtctgatttccaaatcctcctgggcctgtgtgggggtggggagagattggcagatagatccaccgactcttaagacttaagaccagatattctgacccctgtcaccctcttccaagtgcaccatgcacttgagtgcaccttgagtctccagcctctcaaggaaccgggagatcaggccatcagcgtctcagccagcaaaggcctgaaccaccagtcccttataaccctgtaagtccaacccccactcccaaccccactcccccatttagggacacggagtctgagcctaagaacagtggagaatctgaatgtggaccctccagttcttacaggtccaggaatgtcagatcagggtcccagccccccagccctccttcaggctgctcggggtccctcccacctgctcggccagctgcgcagcgtgggaacgccccagctgggctgcatggagccgtcaggacaagctgcgcggttcccagcctccctgcctgccccggcccggcaccgccgcctcccagccgtcgccgggcaaccaggccgaggggcccggccggccgagtggggagaggggttgggctgggactgcggggtcctgggaaaggaggggccgagggcctggattcctgggtcttaggacgtgctgtagtttgcagcaataacaagggaacagagggatattttgaggaggggttttgaggctgggggagtcgaggtaggggtcccaactgtcccccaggtatcggtgtgccctcttcccgacacgcaggcccgggggagccccggaccccgcatcccccagggcgcggaaactggcgaggccccaggagctcccatttatagctcagtttccactgagcgcagtccctctaggacctgggctgagcaagtttcttccactctctcccttccctcctcctcaccccttgcctgcccctcaaccccggcagggcgcaggtgtccaacccagccgggaccccctccctcctcgaacccaggtgttccggctcccagaccccaattgagctgggggcgcccacccgccgggggatcccgccctgcgtcccccattcatccgcgtctcagccgcgggagtttctcaacgggaagagggcggagctcccggggggcggacccgggcggggcgagcgggatcgggccctcttggggtctcccagagacccaggccgcggaactggcaggcgtttcagagcgtcagaggctgcggatgagcagacttggaggactccaggccagagactaggctgggcgaagagtcgagcgtgaagggggctccgggccagggtgacaggaggcgtgcttgagaggaagaagttgacgggaaggccagtgcgacggcaaatctcgtgaaccttgggggacgaatgctcaggatgcgggtccccgccctcctcgtcctcctcttctgcttcagagggagagcaggtaccgcacgaggggagcggaggaatatggggtgggggtggggagttgcttgcgggctgcctcttcactagcgagaagggagctgggggctgggactcctgggtcctgaatgaggaggcccctgaaggtgctaagctcagccctgctgccccgaactctcctaggcccgtcgccccatttcctgcaacagccagaggacctggtggtgctgctgggggaggaagcccggctgccgtgtgctctgggcgcctactgggggctagttcagtggactaagagtgggctggccctagggggccaaagggacctaccaggtaagagtgttctctccacgctgggacgggctggctagggggagagttgctgggctcggctgtacctgcagtttctattttgacattttcaagtttgggaaattgatgggctcgggtaaacatttaggagtcctgatttttgagctgcttctttgggggtgacccacggagtttgggaattattatgttattgcaaaatagtacataggccaggtgcagtggctcacgcctgtaatcccaacgctttgggaggttgaggccagaggatcgcttgaaaccaggagtttgagaccagcctgggcaacataacaagaccttatctctacacaaatgtatatatatattttaaacaaattagccgggtatggtggtgtgcatctatagtcccagttactcaggaggcttaggtggtaggattgcttgagcctaggagttcaaggctgcagtgagccatgatcaagccactgcacttcaggcaatggtgagaccctgtctcaaaaaaaaaaaaaaaagagaa

SEQ ID NO: 7989 - DNA, 6000 bp, Homo sapiens; identical to SEQ ID NO: 816

SEQ ID NO: 7990 - DNA, 6000 bp, Homo sapiens
tctcagcctcccaaccttctcggttccttacctatgtcacagctgactttgagctaaagtcatctcggggcagctaggtgcctatgtgagctggcgttcatttctcactgtttctccttccaaatacctccaggaagaaaagcaagtcctttttggtccaagacattaaaaaagccaggctcagcggctcatgcctgtaatcccaacacttggggaggctgaggcaggaggatcgcttgagcccgggagctggagaccagcctggacatgttaacatagcaagacccctctacagaaaatgttaaaaatgagctgggtgtggtggcgcacacctgtagtcccagttactcaggaggatgaggcaggaggatcacttgagcctaggaggttgaggctgcagtgagccatgatcacactactggactccagcctgggccatagagcaagaccctgtcctaggagaaaaaaaagggccaggcacagtggctcacgcctgtaattccagtactttgggaggccgaggcgggcggatcacaaggtcaggagatcaagaccatcctggctaacacagtgaaacccgtctctactaaaaatacaaaaaaattagctgggtgcggtggcacgcacctgtgatcccagctactcgggaggctgaggcaggagaatcacttgaacccaggaggtggaggttgcagtgagccgagatcccaccattgcactccagcctgggagacagagcgagactccgtctcagaaaaaaaaaaaaaagaaaaaagtgtgtgctaaaaaattcatcaggtactaaagagtgtacggtggaaagtaagtctttctcctacactcagatcatggatggatgtctcaggtcttcccaggcacatttgatgttatgtaccagccatatgcatgtgtgtgtcatttatttttcactctacacaagtagtacctaatatggtgaggttgttatgattacagactctggaggcaaagttcctgggtataaatctgaactctgtcactcccaagctaagtggctttgggcaagtgatttcacctccatgtgcctcagtttgctagtctgtacaatgggatggtaatagcacctacctcatggacttgagaagtcagcaacttcatacctctaaagcccttagagctagcagtgtgtggcactcaataaaatgttgactaatgatgattctcacttctgtactatgctttttcgtaccaattataaatattaatattttaatgtcacctttcttttattcatgtttctgtaccttgcttttgtcaccaacacagtgtaattcagagataatttcagagacatacaataggtctttttttttttttttcttttttgagactaagcctcgctctgttgcccaggctggagtgcagtggcacgatctcagctcactgcaacttccacctcctgggttcaagcaattctcctgcctcagcctcccgagtagctgggattacaggcacctgccactatgcccggctcatttttgtatttttagtagagacagggtttcaccatgttggccaagctggtctcgaactccagatctcaagtgatccacccgcctcggcctcccaaagtgctgggattacaggtgtgagccaccacacctggccacaataggtcttatatcttacggtgtctcctctaggacacatttcccataaataatttcaacatcccctgttgatgatacgtgggtgttttccagtcttttgctggtacaacaatgctacagcaaacatcttatggtttaagatctaatgaagggatcgaatgaggcaggagttcaagaccaccctgggcaacatagcaagaccctccctgtacaaaaaatttaaaaattagctgggtgtggtggaacaccagctagtcaggaggctgcggcaggaggatcacttgaacccaggtgtttgggactagcttggacatcatgtgagacctcatctctgctggacatggtggctcatgtctgtaattccagcactttgggaggccgagatgggaggattgcttgaggccaggagttttagaccagactggtcaaaatggtgagaccccatctctatttttttttttttttaaaagatgaataaaggtcgggtgcaatgaagcacatctgtaatcccagcactttgggaggctgaagcgggtggatcgcttgaggtcaggagttcgagaccagcctggccaacatggtgaaactttgtctctactaaaaatataaaaattagtcgggtacggtggcagatgcctgtaatcccagctactcaggaggctgaggcaggagaattgcttgaaacggggaggtggaggttgcagtgagctgtgatggcaccactgcactccagcctgggcgacagagtgagactttgtctcaacaaaaaaaaaaaaaaaaaaagggaaaaaaagaagatgaaaaagaaacccccatctctaaaaaaaaaaaagtaaaaataaaacaaattaactggatatgatgactcgcatctgcagttccagctacttgggaggctgacatgggaagatcacttgagcctgggagttcgaggctgcagcgagcaatgattgcgccactccactccagcctgggtgagagagtgagaccccgtttctaaaaaaacaaaataaaaaaaaaagggctctggtacatggctactgagtttcttcccctagaagatgtcaccgttccctagcctgcgggggtgggctggggtgggaaggatagaccaccatcatcggttcatttacataaaacaactattatatgcggtgcctggcagggctgggggacaacagaggcagagaaagccatacaccctgccctcacggagcttgtgatccagtggaaaagaaacacccatttccagtcatgagtggcctagaggggccaagaggtaggatgagggctggtcatgtatcacagagaagacctaaaggaaggaaagtggtgggccctgttaaaaagcatggaatggtattccagagggcattactgagtctgcacaggtctggagcatgcatggctcacacctgaccaaggatattcaagtcgctccatgtgaccagactgtggaccacagaggtctaagggggagagggcagatgagccagatagaatgacagggaggagagtatgaggggctctggaaaccgaggggtttggaagttttcctgagggcctagagggtcatggaaggttctagagcactggttctcaaggtgtggtctccagaccactagtatcagcatcacctaggaacttgccagaaatacaaattatcaggccccactccagatctactgaatgaaaaattctggaagtagccaggtagttactcaggaggctgagatgggaggctcacatgaggcctgaaattcaaggctaacctgagatagggtgttgctcttttgcccaggctgaaatgcagtggtgtgatcacagctcactgcatttccgtgtatttcagagctcactgcagcctcaaactcctgggctcaagtggtcttcctgcctcaacctcccaggtagctggggtcacagggatggaccaccacactgggctaatttaaaaaaattgttagcaacagggtcttaccatattgcccaggctggcctcaagcgatcctcctacctcagcctcccaaagtactgggattacaggtgtgcagcaccacatctggcttaatttttttttttttttttgagacagggtctcattctgtcgcccaggctggagtgcagtggagggatctcggctcactgcaacctccgcctcctgggttcaagcaactcctgcctcagcctcccgagtagctgggattacaggtgcccgccgccatgcccggctaattgttgtattttttggtagagacaaggttttatcatgttggccaggctggtatccaacttcagacctcaagtgatccgcctgcctcagctttccaaagtgctgggattataggcatgagccactatgcccagccagagactccatctttaaaacaaaaacaaaaactcagggtgtggtacccaccaacctggcttacccagccttttaggtgagtctaatgcatgctcaaatttgaaaaccactgggttaaacgtctggtctggagttcatcaaaaagtcatggcctgaatccttacctgtaaggcatcagaatgcaaatgaaaattaacttaatgaatattttacttgagccgggcacacttcccacaacagtataggatggctgtccttgtcctgttttgtagaggacggtgctaagcagcctattcattctcacaaggtctccaggaaaccacacttttttaaggagtagaattttggggtagggccgggcgcagtggctcacgcctgtaatcccagcactttgggaggccgaggcgggtggttcgcctgaggtcaggagtcgagaccagcctggccaacatgatgaaaccccgtttctactaaaaatacaaaaaataaattagccaggcgtggtggcgggagcctataatcccagctactcgggaggctgaggcaggagaatcgcttgaatccggggcaggggcgcggaggtttcagtgagccgaaatcgcgccacttcacactccagcctgggagaaagagcgaaactccgtctcaaaaaaatatatatatatatatatttgggtaggaagcacaagtagggaccgtgcttgctgccagaacaaccaatagaaactccttgaaggccttcctggcacaaacgtagtctccagcaccctctgccgaccaggccccgcgccctcagtgctgagacagcctccagccctcggtgccttaggggttgcgcgtcaccttggagaccgcgtgagaggagggcgtgcctctgcaaaggcggaagtcggctgtggaagtgtgggcggccattttgagaccgggcaagaggggcgggactggtgcggccgagtgacagttgaccggttttaaccaagtgactggtaccacggggccggggaaaaagctgtgccatccaggggcggggggatgccggggacggggaggaactaggaaggggaggggaaggggaaggcgagaaggggagaggcaggggaaagaggggaagagtcgtgggagctgggagaggagggaaagaggggaagagtcgtgggagctggcagaggagggaaagggggagccgaacgtgaagggcgaagggcggggcggggcaggagagtcggggtatagagcaggcaggtgttaatggcatgggaaggaagagtaagaagtggggcaagaaggtgtcgcggtacgaggggaaggtgagactcaagaaggtgccggctaagaagctggtgccggcgtggaaggagaaggtgtggggcgaggaaacaacgaagggcgaggaaagatcccgaggcgaagagacagttttcatcgagaaggggcagggcgaggaggaggggcgttaccagagggcgggacggggcgacgggcccgcgcgggaagaaccaatcgccgagaacccggggaaggaacgggtccataaagaccaagtggaggagtaggggcgcggtcaggagcggaagcagagtgaggagcaagccccgggcgagaaacgggggcccggccgggagcaagagcaggggcggggccgggagcaagagcaggggcggggcccggagacgggcgagaccaggtacagtacccagcccctgggcagaccccgagcgaggagaaagcggcgataccaagagaagtgcgagggtggggcaagaggttggggcacagccgggtggaagtacacgggtgcgatcgcaggcagaagcagtacgggggaacttaagagggggactgtcaaagcgagaaatagaaaccaagaccaggtgaagagcaagagtggaatacagggagggggcggaataaggagcaaggtgaggataaagttaaaggaagagacgtggaggcggcggggcggaacgaggcggaggagcaggg

SEQ ID NO: 7991 - DNA, 6000 bp, Homo sapiens
atacaagaggactatatgtcctagactgtaaaaaaaagacaaacttatagcttctctgttttttttttttatttttatttggtcctaccaacctgactcttttttcttaattaagactccacagcagggtctccctctgtcaccaaggttggagtgcagtggcgagatcctagctcactgcggcctcggactcctgggcttaagccatcttcccacctcagcctcctgagtggctaggactacaagtgcacaccactgtgctctgctaattttttttttattattttcctgtagaaacagggtcttactttgttgcctaggctgatctcgaactcctaggctcaagcaatcgtccttcctatgcctccaaattgctgactctccaggcgtgaaccactgtccccggcctccgtgatttattgatcaattttcctgtgatggacatctgagttgtttccaggttggggctgctgtgactatttgagcatctgacttttgatgaacatagagtgtaccatattgtagggcagtacccaggagtggaataaatgggtcatagtagttactgtgattctaccaaacatagcatgttagcaattcattgaaatcgttctctcagaagtatatttttccactttttttttcactaaaagaaagaaccgtggatgtatattttttccaatgcagaacatttagacagtcactgaactcgccgtctttagtttttccatcacgcgatgttaccatagcttcagactctctcttcctgcccgttttcaccctctctccccctggcctcatggtgttctgtctgactctctcagaccatctcctgtagcacctgcatcttgaatgtgacttaacaatcctggctgagcagagacttcgtagtgtggcagtgtctccaggccctggggacccagaaaagcctcaaggaggaggtcagaaatcctggcacttgtttctactgtacacaggcagccttagtcctcgggctggccaagaatacccacaatacccgtgctgatgactacaaaggaagggacttctgaatcaaaccacagaaactcctaaggcagaaaaatgatggacatgataacatgcaaatacagactttcttcttttgttgctgttcttctttctttctcttttaaattttaaagatggggtcttgctatgttgcccaggctggtctcaaactcctgggctcaagggatcctttcacctagacctcccaaagtgctgagattacaggcagattttcttttaacgaagacaccatgggacaaatgtcagatgacagaaggggaaaaggtgtttgcaatatttaaaaatcaatgagatattaatatctagaatataggtcaggtgcagtagctcatgcctctaatcccagcactttgagaggctgaggcgggcagatcacttgagatcaggagttcgaggccaacctggccaacgtggcaaaaccccgtctctattaaaaatacaaaaattagcagggtgtggtagtgggtattgctctgtcatcccggctacttgggaggctgaggcatgagaatcagttgaacccaggaggtggaggttgcagtgagctgggattgagccactgcactccagcctgggagacagaatgggactccatctaaaaaaaaaaaaaaaaaaaaagaatataaaaggaacagctgcaaatcagcaagcgaaaaagacagcaaccataatagaaaaatggccgggctcagtggctcctgcgcctataatgtaagattacatgcttgtaatctcagcactttgggagaccgaggtgggtagactacctgaggtcaagagttcaagaccaccctggccaacatggcgaaaccccgtctctactcaaaatacaaaaattaggctgggcacagtggctcacgcctgcaatcctagcactttgggaggccaaggcaggcggattggctgagctcaggagttcgagaccagcctgggcaacacagtgaaacccgatctctactaaaatacaaaagaaattagccaggtgtggcagtatgcgcctgtagtcctgggggtgctgaggcaggagaattgcttgaacccaggaggcggaggttgcagtgagccgagatggtgccactgaactccagcctgggcgacagagcaagactctgtctcaaaaaaaaaaaacaaaaaaaagtgagcagggatcacaatgagcagataacaaagaaacccaaaactctgataggcacttgagaagatgctagaaattgttggtaactcatcagggaagtggaaattaaaatgacagcgagtccaggcgcggtggctcttgcctgtaatcctaacactttgggaagctgaggtaggaggatcacttgagaccagcagttcaataccagcctgggcaatatagtaagaccccacctctataaaaaatttaaaagttagttgggcgtggtggcacaagcctgttgtcccagctgctcgggaggttgaggtgggaggatcccttgagcccaggagttccgggcagcagtgaaccataattgcgccactgcaccccagcctgggcaacaaagtgagatctcatctctaaaaataaaatagagaaaataaattaaaaaacagtgagtcaccctatataaatctggcaaaaattagttaagttggaaatgccacatgagggttggggatatggggacccggggaccctcatgcactggtagtgagtagccattccgagggctacccagcactacttacacaaatggtgcgcatggatatgtcacccagcaattagcttctgggtacgcacaataaaacattctccctcagcttcctgggggaccaatacacagatgttccctccagcattatttcgggagagctggaggcagcctgggtgtccgctcccagtaggggtaggtggaaaaacagaagggatcagtcaccagagaatcctgcaaagccaccactgtcacacaccaggtgtccacagagcaacaagggtaggtcttaaaacacataatgatgactgacaaaaataagaaacactattaatatcttatgatataatgctcaatgacacagaatcattttacatttacataaagttttagggaaaaacaatatttaatatacaactatgcgttggataatgtataacagatacaacatagaattgtattgtactgtataattatattagcctaaatatataattatataattatacattatataatgccaaattatataattccataatatgacacaaacttttgtgctatttattgcagttgtgttaacatcagtatttaattatggaacacctagaaacctgctataccttgaagaacggtttctatgtaattttgtttaactatgggatattgttttatataacttactgtataccactacatgttaataaaaaaaatttttttttttttttttgaggtggagccttgctctgtcacctgggctggagtgtagtggtacaatctcggctcactacaacctctgcctcctgggcttaaatgattcttgttcctcagcctcccaagtagctgggattagagtcgtgtgacaccatgcccagctaatttctgtgtttttagtagagtcagagtttcaccatgttgaccaagctggtctcaaattcctggcttcaagtgatctgtctgccttggcctcccaacgtgctgggattacaggcatgagccactgtgtctggcctagtaataattttaatagggctggacgtggtggtttacacctgtaatcccagcactttgggaggctgaggtgggcgaatcatgaggtcaggagttcgagaccagcctggccaacatggtgaaaccccgtctctaccaaaaatacaaaaattagccgggtgtgttggcaggtgcctgtaatcccagctactcaggaggctgaggaggagaatcgtttgaacctgggaggtggaggttgcagtgagtcaagatcttgccactgcactccagtctgggcaacaagagcaagagtccgtctcaaaataaataaataaataaataaataataataatagcaacacttacattacattaaccaggcactggcactgttttaagttttatctcatttaattaattatctcatttaactctcccaacaaccacgtgaggtcggtactattaatattccccttactggatggggaaaccgaggcacagagaagctaagtggcttatccatgtaactcaaggaagtggcaaggctgggtgggattcagatccagattatctggcttggagtcggagtccttgttcttttttttttttttttcagacgaagtctcgcccaggctggagtgcagtggctcaatctcggctcactgcagcttctgcctcccgaattcaaggagttcaagcaattctcctgcctcagtttcccaagtggctgggattacaagcatgtgtcaccacgcctggctaatttttgtacttttagtagagacgggggtttcaccatgttggccaggctggcctcgaactcctgacctcaagtgatccacccacctcggcgtcccaaagtgctgagattacaggggtgagccaccactcccggccggagtccttgttcttaatcactatgtttggtgctttttaaagtcaggagatctggtgcacatccctgctctgctgcgtgatatcttgcaagaacttccccactcagagcctcagtctgccctctgtgaaatgggagaatgatggcacgttacttaccgtggtggggagaaagcgcaggtacctcctagatactctctctcccaccccacctccggcggccaacggccaagcaaacctccagccaagatttggggtatgtgggcagggctccggcgaaggggagtggccggggagtcctggtccaatggggcccgggggcggggacttcctcccatctctgtccagcatgcgtgtactcctcgcagttccatctacctcgcgggtgcctctggtgtctccagaggtctccgaccccagcccgcccccagccctcccgcccagcccgcagccccctccctctgttccccgacctcagaccctgggcttccgacctcgacatcatgggtgacgcagaaggcgaagacgaggtccagttcctgcggacggtgcgtatctctgggttaggggcctgtggggctatctcttggggctctctgagggtctctctgtctctgaatgtccctgtccggcttgctggtggtctctgagactcgaggtctcttcctatgtcactttgagtgactgtcactctgtcttttagtctccttcacctttctcactacagagaattagtaggattggggactccagaatgggaaagggatcttcggttgccctctcttctgactttagcgatttgtcccccacaagaaggacccccgagggagcacaccctcacaccatcttggaagcaggcacttggggaaggtggttctaattcctgggcttgatttagccatccccccacccccaccttagccctaattctctttttgctccagactctgacctatttaaattcttgagaagggagctggagtgagctggaggacacagctgcttccaactcctagcccttgagggtcttgtgggggagggatctcttgggttctgggtctttctttccttcttcgttttgggcaggagggctgctcccaatggctgctaatggtcttgcagggtctctgggtggtgtctctccccatctgtctctttgggtgtctccatgtctctgtctcttcctccatctcagtctccctgtctctgtttcttagcttaaggccctctgattttcgctgtctctctagctgggttactccctgcatctgagccccagctgggggcagggatgggaattggaacaacaggtgtccctcccagaatagccggcttttctggggcctgggcaggggatggggaggggatgagagggaggaggggctgccatctcctt

SEQ ID NO: 7992 - DNA, 6000 bp, Homo sapiens
atgcttcccttgctgattgggtcaccctgtccaccctgacatgcaccacaggccccaggccttggaaccaggcccagccttggcctttcctgcccccatttcaccttgagttctcagaatgagccctgagcctgtgtcccctggagtatgggcctcagtcccatgttgggagcaggacaggctgaccaggctgtccccatcctccaggggggcatgtgctctgtgtacctgaaggacagtgagaaggttgtcagcatttccagtgagcacctggagcctatcacccccaccaagaacaacaaggtaagggcagggggcaaggagataagatggggccgttgggtgctgacatggaccctgaccatattccccccacccccaggtgaaagtgatcctgggcgaggatcgggaagccacgggcgtcctactgagcattgatggtgaggatggcattgtccgtatggaccttgatgagcagctcaagatcctcaacctccgcttcctggggaagctcctggaagcctgaagcaggcagggccggtggacttcgtcggatgaagagtgatcctccttccttccctggcccttggctgtgacacaagatcctcctgcagggctaggcggattgttctggatttccttttgtttttccttttagttttccatcttttccctccctggtgctcattggaatctgagtagagtctgggggagggtccccaccttcctgtacctcctccccacagcttgcttttgttgtaccgtctttcaataaaaagaagctgtttggtctaaaagtgcgtgtgtgtgtgtgtgtgtgtgtgtgtgtgtgtgtgtgtgtgtgtatgccgtgggaatgagggtgttgtttttaagtggggtcatttgcagaccccacttccttgctttgtggttggggcaaataactggaccctacctaaatctgttttcccatctagataatagtgatagtgcctgccccagagagctcttgaggggagtgtgtatgagaagacgtcggaaggagatgatcagagtagagcttgtcatgtgattgatgacattatatcttattcaggcatgaattatgctaagtgaaaatcacagtatcccccaggaaacctaaattcctcctgtggtgcaggatacagtgcttgatggtcctttttctttgttttctctttatttttatttttttgagatggagtcttgctttctcaccaggctggagtgcagtggcacgatcttggctcactgcaacctccgcctcccgggttcaagcgattctcctgcatcagcctccccagtagctgagattacaggcgtgcaccaccacacccagcgaatttttttgtattttagtagagacagggtttcaccatgttgaccaggatggtcttgatctcttgacctcgtgatccgcccaccttggcctcccaaagtgttgggattacaggcgtgagccaccgcacctggccttttttttttttttcctcccctgagacagagtctctctctgtcatctaggctgaagttcagaggtatgatctcggctcactgcaacctgtacctcctgggttcaagcaattctcctgtctcagcctcctgagtagctgggattacaggcgtgagccaccacgcctggctattattatttttttttttttgtacttttaggagagacgggtttcaccatgttggccgggctggtcttgaactcctgacctcgtgatccgcccgcctcggcctcccaaagtgctggtattacaggcgtgagtcactgcacctggccaatgatccttttttttttcttttctgtttgaggtggggtctccctctgttgcccgggctggagttcagtggtgcagtcattgctcactgcagcctcaacctcctgcgctcaagcgatcctcttgcctcagcctcctaagtagctgggactacaggcgtgtgccaccacgcctggataatttttttatttttaagtttttcatagagacgggtctcactatattgctcaggctggtctcgatctcctggcttcaagtgatccttctgcctcggcctcccaaagtgctgcaataacaggcgtgagccacagtgctcagcggtcctttttcttgaaccctgatagcagtgacaccaggattgctgtagttcatccaatgacttgggggcaggagtgagtgcaatcttagagactggggcttagtacccagaacctgtttcccttcctcgttagatattcctgtctttttacaaatgtaaatgtattataaaacatttcaggccgggcgcaatagctcatgcctgtaatcccagcactttgggaggccgaggggggcggatcatttgaagtctggagtttgagacgagcctgaccaatatggtgaaaccctgtctctactaaaaatacaaaaaaaattagctgggcatggtggcgggcgcctgtattcccagctacttgggaggctgaagcaggagaatcgcttgaacctgggaggtggaggttgccgtgagccgagattgcaccaactgcactccagccagggtgacagagcaaaactctgtctcaaaaaaccaaaaaaaaccaacaacaacaacaaaaaaaaacaccaaaaaacatttcagacgttcaagattatataccaagaacaccaatgtccccatcagccagctgaggaaacaggaaacaatatgtactagataggacccacttcagcagcaccctaaatccattcccccagaagtaaccaggagggccgagttccttgtgtctttccctttcttgaatttgtatttttactaccttggtatttggttttaaagtttacataaacaggatctgatttttcttccactcaatttaagggaggttcgtggtgtcttatctatagcctctaattcgtttctcactcaagccctgtacagccagatactgctgttctttggctgagcctcaggtaaaatggttggctctccagtcctttatagaaaatcatggcaggaaggaatgggagagaaaacagattctgcctcccagctccacgtgaggaagagttttattattaatttttattttattttttttgagacggagtctccctctgtcgcccaggctggagtgcagtggcacaatctaggctcactgcaacctctgcctcctgggttcaagcgattcttctgctcagcctccccagtaggtgggactacaggcgcgtgccatcatgcctggctaatttttttttttttttgttatttttagtagagacgtggtttccccatgttggccaggctggtctcaaaactcctgacctcaggtgatccgcctgcctcagcctcccaaagtgctgggattacaggcatgagccactgcgcccggcctattattattaattttaaaaatagagattgcagtcttgctatgttacccagtgtggtctcaaactcctggcctcaagcgatcctcctgcctcggcctcccgaagcactgggattataggtgtcagtcacagcgcctggccagaagagttttcgagggctggcttttcaggtcgttttctgggcctcaatgtctatttctgacaatgtggggaaaagaaagatcagattgttactgtgtctgtgtagaaagaagtagacataggagactccattttgttctgtactaagaaaaattcttctgccttgagatgctgttaatctataaccataccctgttatagatgacggggttctctataaccaaccccgtgctctctgaaacatgtgctgtgtcaactcagggttaaatggattaagggctgtgcaggacgtgctttgttaaacagatgcttgaaggcagcatgctccttaagagtcatcaccactccctaatctcaagtacccagtgacacaaacactgcggaagaccgcagggacctctgcctaggaaagccaggtattgtccaaggtttctccccatgtgatagtctgaaatatggcctcatgggaagggaaagatctgaccgtcccccagcccgacacccgtaaagggtctgtgctgaggaggattagtaaaacaggaaggaacgcctcttcgcagttgagacaagaggaaggcatctgtctcctgcccgtccctgggcaagtcttggtataaaacccgattgtatgttccatctactgagataggggaaaactgccttagggctggaggtggaacatgcgggcaacaatactgctctgtaaggcactgagatgtttatatgtatgcatatctaaagtacagcatttaattctttaccttgtctatgaaccgttgttcacgtgtttatctgctgaccctctctccactattatcctatgaccctgacgcatccccctctccaagaaacacccaagaatgatcagtaaatactaagggaactcagaggctggagggatcctccgtatgctgaacgctggtcccctgggccccctttatttctttctctatactttgtttctgtgtctttttctcttccaaagtctctcgttccacctaacgagaaacacccacaggtgtggaggggcaacccatcccttcagacaattgggaggtgagggccgattgccttacacggtgagacaagcggcctgactcgtgactatttttttggacaaatcaggcagccactgactcccttcattatggcctcagctttatctctgggcaataagtgtgatcccttccttcgctgcgtcctttgcaggggcggtggcgctctgcaaggcccaagggggcgtggtccagatgactttgaatcccagttgtcgcccccagggtcagccaggagactagtcagaagcaaacgcgcctgcggcaatccgcccgatgcctttggtctctctcgggcttccgtccacccgcccctcccccgcgtttccattggctgtagctccggcccggggcgggcgaagagggagcgagtgggcggggccgcgtggcgtcagcgcaagatggcggcctcggcagcggtgttctcgcgcttgcgaagcgggctccggctcggctcgcggggactgtgcacgaggttggcgacgccgccccgccgggccccagatcaggtgagcggaacgagggtggccctctgaatgtggggtcccttccctggagttacggacatatcgccgccccttgggggttccgggacgcctcacctcagggtgctgaatgaaacgccgcttgtgttttggggcccttcccaacctcctgggtggttgctcccctaggctggaggctgggaatccaggtgtgtccttagaccccacctcccacccacgtgggtgccggaggaggagggggttaccgttccccgtttcagtgaccactcaggtgatacttgagcaggaggggcctgggacgctggagtcccagtctggccgtgggagttattttctctgtggcgttggtggtggcgaggtagacgtttgggtttccaattcgacttgcctccatgttgacagagacccagccattctgacctccaagtctatcacttctgtgccttagttccccaagccccagacaagtgattgcccttccccgcctccgctcctatcccttaccctataactctgctacttttagccccaagcagccggacgtcgtaactcccggttctgtctgtaccccttcccccaccacttgtgccctccgttccctctcatcccagtgtttaggccctcccatcccttattctccgtgctttgcttttctgggctgcagaccctccagtcctgttgccttcaggatcctgtgcacctggcctgttagcttttaaaactcctggcatcctggtgcgggacagtctggttttgaccctctgagcagccccacatcctgactgctactccagggacacagatgtccagggctctgtgggtgtctgcctcttggctcctgaacttgattcttcttggactggagggtggggaccatcctgacctctcttctctcttggctgacctcccctttct

SEQ ID NO: 7993 - DNA, 6000 bp, Homo sapiens
tttagtagagatggggtttcaccccgttggtcaggctggtcttgaacttctgacctcatgatccacctgcctcggcctcccaaagtgctgggattacaggcgtgagccaccgcgcctggctttttgttttgttttgagacagtgtctcactcttgctcacactggagtgcagtggcgctgtcaccactcactgcagcctcgacctcctgggccctcgtgatcctcccacctcagcctcccaagtaactgagactacaggcacatgccaacatgccaagctaattttttgcattttttttttttaagagagatgaggtttcaggccgggcacggtggctcacagctgtcatcccagcactttgggaggccaaggtgggcgaatcacgaggccaggagttcaagaccagcctggccaacttggtgaaaccccgcctctactaaaaataccaaagagtggctgggcgtagtggtgggcgcctgtaatcccagtcactcggaggctgaggcaggagaatcgcttgaacccaggaggcggaggttgcagtgagccgagatcgcaacactgcactccagcccaggtgacagagtgagactctgtctcaaaaaaaccaaaaaaccaaagctctgctgtcatgagctgatgttcagtgttctcatggaggagacaaacaatgatcagataacttcctagggtaataaatgcataaagaaaaagtatagcaaggagcagcagtgatctggggactcagaggactggtttagacctgatgggatggtcgggaggcctcttgggaaggcgcatctgagcagagatgggatgaagtgaggagggaagccctgggatagctgagtgtgcctgaggcacactcagggcctcatgcttaccgcaaggcctccgcaattgctgttcgctctgccagaagtgtttttccctagagactacacaacttactcctttaggcctttgcttaaatgtgaccttagcatggcctattttttttttttttttttgagacagtcttgctctgttgtccaggctggagtacagtggtgtgatcttggcttactgcaacctccacctccaagattcaagcgattctcctgcctcagcctccccagtagctgggactacaggcgcccaccactatgcccggctaagttttgtatttttagtagagatggggtttcatcatgttggccaggctggtctcgaactcctgacctcaagtgatctgcccgcctcagcctcccaaagtactgggattacaggtgtgagccactgtgcctggccagcatggccttctatggtgactacagtcaacatataaagaaaagttgtgaatagccagaaagatgctcagaaatcccttaaagtacacgacacgacacacgcacacacaccacaagaaaatccacaagaaatgccatcgtgcctgccacaaaccttcacaaaggctggcaatttttataatctttaaaattttagagccaggctcagtggctcacgcctgtaattccagcactttaggaggctgagacaggagcatcactcgaggccaggagttcaagaccagcctaggtaacatagtgagactctatctctaggaaaaaaaaaaaaacaaacaggccaggcgtggtggtgggcgcccataatcctagctaaatgggaggctgaggcaggagaatcgcttgaacccgggaggcggagattgcagtgagccgagattgagccactgcactgcagcctgggtgacagagcgagactccgtctcaaaaaaacaaaacaaaacaaaaacaaaaaaaccccaaacaaaacaaaacaaaacaaaaacaaacattctgagatatctcagacctggaatctgttccccccaatgatcatccagggcaggaatttgcttccttccatagctggttgcccaaattctgttaaaatatattctgtgatgggaagcctattccctcacctaacccagtattagacctaatttgcctccaggtgactttggtttacaaggtctggctttactccttggggccacataacttgtctgacctcggggggatgtggaaggagggtctcaaatgtcagccttagaagcttacatatttagaaggcactggggagctacagaaaagtctaatgcaagtgaaggaaatggtctgatttgtgcttagataaaccccacagggccaggcatggaggctcatgcctgtaatctcagcactttggaaggccgaggtgggaggatcgcttttgcccaggagttcagcctgggcaacatagggagaccccatctctaccaaaaataataaattagccaggtgtggtggctcatgcttgtaatcctagctacttgggaggctgaggtgggaggatcatttaagcccgggaagtcgaggctgcagtaagctaggataatgccactgcaccgcagcctgggcaacagagaccccatctcaaaaaaataaagacctcataggccagaatggtcaaggctgagggaggcacagacagaggggtcgggcagaataaaagaatcatagggggatgtgggagctcagaggaggtgcttgatgcttctggggagtgttaggtagtgctgcctggaggaggtgaagtctgaatggtgaaaaaggaattaaagaagggagtggagccgggcacgttgggtcacgcctgtaatcccagcactttgggaggccgaggtgggcggatcacgaggtcaggagttgaagaccagcctggccaagatggtgaaaccctgtctctactaaaaatacaaaaattagcgaggcatggtggtgcgcacctgtaatcccagctactcgggaggctgaggcaggagaatcgcttgaaactggaaggcggaggttgcagtgagtggagatggagccgctgcactccagcttgggcaaagaataaaactccatctcaaacaataataataaattaaaaaaaaataagggagtggaaaagacaaatacagggaaaaggagcctgggatgttctgcccaatctgacccatggcgctgccttgctcaaacgccactgttgtcagaattaagagaagaatctttaggctgtttttttctcctcctcctcctccttttctttttttttgtagaaaagtgtgtcttgctgtgttgcccaggctggtctcaaattcctggcctcaagcagtcccctgcctcagcctcggaaagtactgggattataggcgtgagccgctgtgcccagcctggtcttctttcattcattaaaaaattaactgcgcagggattagtggctcatgcttgtaatcccagcaatttgggaagccgaggtgggtggaccacttgaaggtcaggagttcgagaccagcctggccaacatggtgaaaccccgtctctactaaaaatataaaaaattagccgagtgtgttggtgggtgcctgtaatcccagctactctggaggctgaggcagcagaatcgcttgaacccgggaggtggaggttgcagtgagccaagatcgcaccactgcactccagcctgggcaacaagagcaaaacttcttcttctgaaaaaaacaacaacagcaacaacaaaaaacagagcgcctactgtatgcctggctctgctgggctaggcttcgttggttactatatcttacttctctggaaaaagacatataaattgaacctgtattttcccctataattattagcctctaagcactaaagttttttactttgggggggaaaaaaaagaagttaccccagctcaagggttttgccccatgcctggcagggagcaattatgaccagaggggctgggacatctgctcctaattggcttttcctgctgaggtcctggaatactaaagggtttctgaagggcccgggatgtccccccccccagttcttctggggtgggggagcgggtccctgtatgtgaagacggaatttcctgcccatttgctcctcacaccttccggaggccaaacgggcagcccagctgcggcccgaagggggaggggctcggccgcccggcagatggcggcatttacatacagctgggagccccctcttgaggccgagctcctcgccctggcgtctggtgcgtccgcgatgcggggtttgggagggtggctttgtcttgcggagggggaacacacacacgcctgcacacaggggtccacaaagagccctggatcttcatcgtatccacacacagctacacccgtggatctcccaaacccagtctcattcacacaaaccagcgcacacaggggtctacaaagaactccggatcttcatcgtattcacacgcggctgcatccgtggacctctcaaacccagtctcattcacacacaggcgccctcagccattcaccaccttgcacagcctctaccacacccgcacagagcacaaagtcacaggtttatacgcctatacaggatctcccataaacacacacgcacagagaagcagccacacagccacacaatctcaaagcgtcacacaatcacgaagtcgtgtacacttctagtgtcccactcgggtgtgcgtgcagaatcagaattgtttacaacctcataaatgtgtcaatcacacacaactccaggcgtatgctgagccgcacagtcccacgtggactcacaatgacaaagtcatgtgcaccctccggtagctctggttcataccacacacacaaaatcttaaaatcatgtacaacctcacacacaggcttagccccctaaccccaccccaccctagccacacaaaaagtcgcgggatcacccacgcatgacctcgctcgtgcccacgaccacagacggaatctcgctgttgctcctgcacgctccccctcccctgtgaccgccccccccgccccgcccttggtcccttggggccgggtagctgcctgaaggggcggggccattctctcagatataaggcttggaagccagcagctgcgactcccgagacccccccaccagaaggccatggtctccccacggatgtccgggctcctctcccagactgtgatcctagcgctcattttcctcccccaggtcagagccaggtgggaggtggcgtggaaagggatgaatgcggaggggaggggtgagtgcgacctgaaggtcctggggaaggagcgtggggcggacgggaagcctgggtcctcccggccgcctcaccctgcgcccgtctccgtcccagacacggcccgctggcgtcttcgagctgcagatccactctttcgggccgggtccaggccctggggccccgcggtccccctgcagcgcccggctcccctgccgcctcttcttcagagtctgcctgaagcctgggctctcagaggaggccgccgagtccccgtgcgccctgggcgcggcgctgagtgcgcgcggaccggtctacaccgagcagcccggagcgcccgcgcctgatctcccactgcccgacggcctcttgcaggtgcccttccgggacgcctggcctgtaagtgctgcccccgggggactcccggtgctggaggcctaaccctgccagcgaaacctccacctcctctcccctccagcttccaagaccctaatcctgcctcccagggggtggacgaaattcccagaccagtaactctaccgtctggaaccccacattcacagacctctaaactctacacactggggattctaaatgttctgattccccaaccctggatgctgggaccccaaattcccagaatttcaaacccaagctctgaaatcctaaactcaaggaaccctacctctgctccttggggatccctaaaaactgtggtcctcatctttatccccaaacctctcacaccttgtcttggggaccactaatatcttctctctctttttttttttttttctgtcctcagttctttcagttgggtcctgtattaattactctttcacctccaaaatcctgtctcccacccccacaacccaaaggcacaaagatgaacagacctgtattgcaatgct

SEQ ID NO: 7994 - DNA, 6000 bp, Homo sapiens
tttccctaagtccccacatatgagactctcttctctatcctcactagggttaatcttgcccttctctggcttctgctcaattttttttttttttttttgagacaaagtcttgctctgtcgcccaggctggagtgcagtggcgcgatctcggctcactgcaaccttcgcctcctgggttcaagcggttctcctgcctcagcctcccgagcagctgggaccacaggcactcgccaccacacccagctaatttttgtatttttagtacagatggggtttcaccatgttggccaggctagtctcgaactcctgacctcaagtgatctgcccacatcagtttcccaaagtgctgggattacaggcacctggccttctgctcaatctcttattgatgagtatgaccacagacatcactctgtcctgtactcaacactcttagatccaatttccctcctgaattttaccactggccaaagacaatacaggccaggagcagtggctcgtgcctgtaatcccagcactttgggaggtcgaggcaggtggatcacctgaggtcaggagtttgagaccagcctggccaacatggtgaaaccccatctctactaaaaatacaaaaattagtcgggcatggtggtgggcgcctgtaatcccagctactcggcaggctgaggcaggagaatcgcttgaacccgggaggcagaggctgcagtgggccgagatcacaccactgcactctagcctgagtgacagagcaagactctgtctcaaaaaataataatgaaataaaatacagtacaacatgcatctctcaaagaacagcacggagaggtctcagtaagtcagacagaacatctcacaaaccaagcactaactatgcatcaggaccagcgccaagcatcatgcagatgcatcccaacagctcagcaagtgaggactattattagccctgtttttatcgatgaaaaaccccgactcattgaggtgcagtcgtttgtcaaatggcacatctagcaactgaccttactgggattcaaaaacaagttcttcctgattctgacgtccagggaataggtcccattgagtgcttactatgtaccaggaactgagcatatacacatctcagtcgctcctcacaaccaccctcggaaagttacagatgagaatggcaggtccaagatcacacagcaaaaggctgggcacagtggctcaggcctgtcatcccagcactttagggtcaggaggatcccttgagcctaggagttcaagatcatatagcaagtaaaggaagcagcaggacttggaccccacgcagtccaatggctatggttcatgctgattgagggattactaccagccaggtactatggtctgtttttcaatgtctcagttaatgctaaccagaatcctttaagtactggtattctcccccaagtgctacagaccctactgaattcaatttcctctctccacaatcttaaaagcccatctccagcactgactttccgaatagtgaaaattataatagtgattttaaagacagcagctcccaaaactcaagggattaccacataccagactccatgtgctaagcccttagaagacctgtatccaaatcccaattttaccacgtcctaatcctgactctggacaagtagcttaacctttctgacctcacttccctcaactgcacaataagaatggtaaggccgggtacagtaactcacacctgtagtcccagcactttgggaggccgaagcaggaggatctctggagcccaggattttgaggccagcctgggcaatatagcgagaccctgtcactgttaaaaaaaaaaaaaaaaaaaaaaaaactgggcgtggtggctcacgcctgtaatcacagcactttgggaggctgaggcgggtggatcacctgaggtcaggagttcgagaccagcctggccaatatggtgaaaccccatctctactaaaaatacaaaaattagccaggcatggtggtgtatgcctgtaatccaagctactcagtaggctaaggtgggagaatcgcttcaacccggggcgggggggggagaggttgcagtgagccaagattacgccacttcactccagcctgggcaacagagcaagactcagtctcaaaaaaaaaaaaaaaaaaaggaaaggtggctgggcgcagtggctcatgcctgtaatcccaacgctttgggaggccaaggcagtggatcacaaggtcaggagtttgagaccagcctggccaacatggcgaaactccgcctctactaaaaatacaaaaaattagctgggcatggtggcaggcacctgtaatcccagctactcgggaggctgaggcaggagaatcacttgaacccaggaggcagaggttgcagtgagccgaaactgtaccactacactccagcctgggcaacagagtgagactccatctcaaaaaaaaaaaaaaaagtaagattaccaattcttggccagcaccttgggaggctgaggcaggtggataacctgaggtcaggaattcaagaccagcctggccaacatagtgaaacccctctctactaaaaatacaaaaattagccaggcgtggtggtgggcacctgtaatcctagctactcaggaggctgaggcaggagaattgcttaagcccgggaggcagaggttgcagtgatccaagatcgcaccactgcactccagcctgggcaacagagcgagaccttgtctcaaataaataaataaataaataaataaataaataaataaataaataataaaaataaaaaaacaccatcttaaaaaaaaaaaaagaggacccttttttttttttgagatgaagtcccactctgtcgcccaggctggagtgcagtggcgtgatctcgtctcactgcaacctctgcctcccaggttcaagcaattatcctgcctcagcctcccaagtagctgggattacaggcccccaccaccatgcccggctaattttctgtagttttagtagagacggggtttcaccgtgttagccaggatggtctctatctcctgacctcgtgatccgcccgtctcggcctcccaaagtgctaggattacaggcgtgagccaccacgcccagccaaggacccattcttaaaggtgttacaaggattaaacgagttaataaacagagtccttagaacaaagatgcacggcaggtggttaagtgcgatgttaagtgtgcatcaaataaaacaaatcttcagtaagctagggaaacagtgggacagtcactgacttaatgctagttttatacaaagtgtgagctgggaacaagtataaggacaacttaatgggggtccatgggatctgacaacagggaatcacacagtacaggttctgaacagtatccctattcaaagggaatacgtagtattccttttcaattatctttccatttcagtgtacaatgtaatgggctgttcagtttccattgtattttacctgaacttttccttcctctcatggccagcaatgctagttttccattgaagacagcaatgcgccgggcacggtggctcacacctgtaatcccagcactttgggaggcagaggcgggcagatcacctgaagtcagaagttcgagaccagcctgaccaacatgcagaaaccccgtctctactaaaatacaaaaaaaattagccgggcgtggtggcgcatgcctgtaatcccagctactcggaaggttgaggcaggagaatcccttgaacccaggaagcggaggttgcggtgagacgaaattgcaccattgcactccagcctgggcaacaagagcgaaactccgtctcaaagaaaaaaaaaagaagaagacagcaatgcaaatttgccttctcaaattaacttactggggaaaaaaatgcactagtcattatcaagaaaaagaaaaaaactagtacttcaggactcagcaaaattggtcaaatagtaagtgacaggatgtcgatttccccggctccaattctaagtttttcctattgctgtctctgagctttctcccccagcttccctggaattcccagctacaccaatgactctcagaatcattatcattatagtcccaatccacgagctctcactgtgccagcccctctgcttaaaatctttacacacacagatttcatcagaatcctcaagacgaccctatgatattgggactatctgctctcattgtacagatgagaaaaaacggggttcaaggaagcgaagacacaggccccactgccgcacagtggagcgggacttgaaccaaaattcgacggcttccaaacccaacaatttttcatactaagcgctcaaacatcaatactaataataatagtatagtaacgaagtgagcgttatgcggaggcgctgagctaaggcatccaacgtacacgacctgacttctcactcccatttataaagccggtgatacagtcggattctaacccccattccacaggggaggaaactgaggctcaaagaaacaaatcgtaagtccgaagccgtacaacggagcccgaactgagtccagacacccggacgccacccgtccctaccgcaaccggcccagtcccaccacccccggcccgcgcctcacctggcccaccgggcccgcgcccactcgcgccgcccgccctccctcccggcggcgccaactgtcagacactcctcccccggcccgggctgcccgccccggaagcatcctctcaccgccggaagctgaactgactcgtccgcggccgctctaccccaacaggccgccaccagcgagagtgcggccataaccatcacgtgaccgcccaccgacaccagcgagagtgcagtcgtaaccgtcacgtgaccgcccaccgtcggcccggcgctcccctccgcccgaagctagcaagcggcgcggccaatgagaaaggcgcatgcctggcccccgccggcctgcagtctagccgtagtgcgcctgcgcgcggctaggaggggccgtcaggcggggatacagcctggaaggtgcgtgtggggctgggtctcggagtgggagacgtggagtgcaggtactgtgcgatctgggggcgcggcgcctcggctaccctcctcgtgttgtcttccacgctataatgcatggaatataatatatattatatggaatataatatatggaatataatatatataattatagcgttgtcttccacgctataatttatgtcgtcctcggtctctttatgtcaccattcctctccttctgtctcatcccacttaaatcctcacaactccttctgtcgccatcaccctctttaaatcctcacaactcctcttgttgtcatcaacgcccttaactcgctttcgttccctgtaagccctctttgccaccataggtcgtaatcgctccctttaaattcgtcatcgccatatgttacctgcatcctgcttttgttgccatttctcctttataaaatcctcatttctctttaaaccctcatcatacccccaagtcaccttcgcatggctactgtccccatcgctcttcttaaatcgcgctaatgcaactcttacgtcatcattaccccttgtgtctttgtccctcccttggcatcactgttcctctgaccagtcaccatccactcctcatgcttccagttttccccataaggagccacccagccttacagttatttttcttccctccgtgtcttcgtcatttccccgtgtcacatctcacataacatacggggtactgcagcccattacctggggtgtgtcagaatcccagccccaccactacacctctggataccttgactgccttatggcacctttccaatcccagcttcatctgcaaaatgcacacggggacatccacatcagggctgagtgtgacgattctgtgagtttattcttgtggtaggctcagcttgacatggtgtttttggctaatattgttattaaccatgtcaccctcggccgggtgcggtggctcatgcctgtaatcccagcactt

SEQ ID NO: 7995 - DNA, 6000 bp, Homo sapiens
tgttctctgagctggggttcttggcctcatggattccaaggaattgaaccctgggccatgcagtgagtgttatagctctattagaagccatgggtcatggaagagaaccgtggaacccagtgactagtgttcagctcgattagaacaaacccaggcacttagccatggaagaacagtggtgagcctttagcctgattgggagcagcaatgggtgccttgctgggtcaggagtgcagcggacaccatgctggatctggaggggtggaagtcagtggcacatcggcaggcggcattcagcagtggtggacagcgagcaaaagctcagctcaagctggaacaaacatggaccagaagagtgtgcattggcaagatttaatagagtgaaaacagagctccaatacaaagagaggggacccaaagggggttgcccacccctggctccaatgcctggggtttatatcccaatcattgtccctctccctgtgctctcagatgatagatgatttgactatttctttacctcctacttttagcctaattggtattttagtgagccctctttactacctgattggtcaggtgtgagctgagttacaagacctttgtttaaaggtgggtgcagtcaccttccccagctaggcttaggaactcttagtcggcctaggaaatccagctagtcctgtctctcagtaccccctctcaacaggaaaacccaagtgctgttggggaggttggccaacaactgtactaacttctttctgctgaatgggggcataataggggtcatgcagttgagatttcctcaggagggatgtctttgatgtcatcaacattggagcatgggctaggaggcagatccaggggtctgccgtagatcttagccatggactgcacctggggctccgtttgaagaactatttgtagttttacagcttcaattctggaagagacaaacttaacaaggaggttaaagacacagggattgaaatgtctggcctgaagtgcaggggattatttctttggcacacttcacaggccctgactacctgcttgatagttttgaaaaggcctggtccagcaaataatgatttggccattggatgggtgctatcaacgcctaaatgaaaggtttggtgaagggttttaagtaatttccattggttagctgcaggcaaaagtatttttccttctttggtggctagacatcctgaggggagggaactatgtccttgtgaggtaccccattctatttcttctgctgagcactggggcttggtttcctggaggggattaccccatactagggttccttctataagcatttctaatggagggtcccgccttgtggctctttggcttcaatatctgcttggtggttcccttctatttccctttcctttcctttctgatgaccccagcagtgtaagatggccacctctttaggtttccgtacagcccataataactcataatggcttcctgatgtttaataggtgttccctcagaagttaggaattccatttctcaccatatttttgtgtaggcatggaggagaaggtaagcataattagagtgtttatatatatttacccttttcccttctcctaattctagtgtatcatggcccctgcttttgctaggatgtctctccctaacaaaggagtggggctttcaggcataattagaaaggcatgtgaaaagagtaaagtcccccagttacaacttagtggctgggcgaagtaactagtgactgcttgtcctaggacccctcggatagtaacagatctggaaatccagctagtcctgtctctcaaaactacaatgataaacaataagagaaaaagaaaggaagaaaggatatacatacataaagaagccaactaataatatgacaggattaagctctcacatatcaataataaccttgaattaaatggattaaactttccacttaaaagaaagagactggctgaatggatttaaaaagcatgacccagctatatgctgcctacaagaaacacatctcaccaggaaagacatatatagtgaaagtaaagaaatgagaaaagatattccatgcaaataaaaaccaaaagtgagcagcaatacctatgtttataaaggaaacagactttaagtcaaaaactgtaaaaagagacaaagaaggtcaatacataatgataaaaggatcaatcgagcaaaggatccatgaggaaattcctgcctaataaattttggtcagaccggttgtctgctctcaaaccttgtctcctgataagatgttatcaatgacaatgcttgcccgaaacttcattgcaattttaatttcaccccggtcctgtggtcctgtgatctcgccctgcctccatttgccttgttatatcttattaccttgtgaagcatgtgatctctgtgacctacaccctattcgtacactccctccccttttgaaaatcactaataaaaactttctggttttacggctcagggggcatcatggaacctgccgacatgtgatgtctcccccggacccccagctttaaaatttctctcttttgtgctctgtccctttatttctcaggctggccgacacttagggagaacagaaaagaacctacgtggaatattgggggtgaattttgcccgatatctggctgaatttcccctgataatgccactctctatgtccatgtgtacacattgtttagcacccacttatgaatgagaacatgtgatattcactttctgtgcctggcttgtttcacttaagataatcccctccagttgtatccatgttgctataaaagacattattttattcctttttatggctaaatagtattcaatggtgtatatataccacattttatttaaccattcatctgttgattccctatttttgctattgtaaatagcatttggaccacatttcaagtacttaattagtggccacatgcagcaagtgactatcacattggacaatgtagccccaacccactgtatgaccttgggtaagacttgcaaactgtcattgcttcaatatctccatctataaaatggggatggcaacaatacctcactaagagtgtaaagactgagttactgtgtgtaaagcacttcacgcctccccatcggtgcttcaccctggggctgcaatgagcacccaatcttagtgtcagatgacacagcacagcaagaccgaggcccttggttcaggaaagtccatgctgccacctcttcagggtcaggaaagtacagtttccacctcttacaaataggactgtttgtctgctcctcctgggtcaaagtaacttcgggttcaggtcctggatccagcaaagggtttgcttaacattgcaagaaagatgttgcctcatggtcaaaagtcaggcgtaggatgagacaggcagacacgcacacattcacacccacgttttgcaaagatggactgaccctgtcagaggatgtgtgggtgaaggtgcacagtgaggatagagacatatgggagtccagtagacatcaatcaaactggactcagtttgcacacacctggagctcaagagtctccagggggaaaacagagacacaaagtcagacagagagagagccagagaaatttcctgcaccgtgaagatagtcagaggcagggaagaaactccttagcactagttagagtgatcagaaaccaagaggacctgatcgctgtacctgccaggtctcagtttctgtctccttccaactgaccacctcttcctctgagactcaccagttctgcatctcttgctcctccttctgtttctccgaccacttccacctgtggctgtcacagaagggcggatgaaggaggggacactggagatagactcagcatctgcaggcttccaaagagaggggctaggagatccaccaacacaccagcacaaatacaccagcacacacagatacacacaattggttcatgtattgctaggttacagtttgctatgctacaaaggcagtaggccaaatttgattgaattgaataattccttattttcatcagcttctcctttttttttttttttttttttttttgagatggagtattgctgtgtcacccaggctggagtgcagtggtgtaatcttggctcactgcagcctccacctcccaggttcaagtgattctcttgcctcagcctcccgagtagctgggattaaaagtacccaccatcacgcccggttaatttttgtgtttttagtacagatggggttttgccatgtgggccaggatggtctcgaactcttgacctcaattgatctgcccccctcagcttcccaacgtgctgggattacaggtgtgagccaccgcacccagccagcctctcagttttgaacatgcactaccaccacctccacaacacacaaatgtaaatgcactttcgtatataaaactgtataaatacaaggaagctcatacacatgcaaggatacacacataagcacccccagattcaaccacagaaatatacgccagtacatttgcataaattcaaacacccctttacatgtaaaaatcatataagcacatacagggatgcaagcaggcatggacaaatgcatgcaagcacagacaaacagacaaagctaagtaaaaaagtgcaagctcacctatgcttacaaaaatagacatacatatacccacaaacccacacacccacacattcacttgctcacctggactttgatatctctaccactgtatccctgccaatatctacagagtgggtaaagggataggcatcaggtcactgggttgcccaagcaggaagtctgggttccctaacaactttttctaagctaatgctcctggatgatgatgaaaaaggaggtggggaatggatgaaattttataacagggtgcagaggcagggtcaggataaaaggcccagttggaggctgcagcagggtgcagggcagtcagaccaggaccatggaactcagcgtcctcctcttccttgcactcctcacaggactcttgctactcctggttcagcgccaccctaacacccatgaccgcctcccaccagggccccgccctctgccccttttgggaaaccttctgcagatggatagaagaggcctactcaaatcctttctgagggtaagacacagacgaatggggtctgagggtgagctgcttcttgccttggtacttggggaagcttcaccaaacagaatgaggcagacttccagagtcaggggtggcacgggcatggttggtgagtacggagcatggtgaagcatgatgggtggtattattaggagaaaagcatcaaattaaatttagcagagtttatttgagcaaagaagtgactcatgagttggacagctccctaaaccaggaaagacaccacacggcagtatggtcaagtggtatttacaggcagaaaaaggaggtgacatacagaaacagcctgattggccacagatcacagcttgccttacttggtcacaatctgagcagtttgcagcctgtgtggactgaaagcccagctgctctgattagccaacacttggctacttgtcacaagaatatattcatttgggccaggtgcagtggctcatgcctgtaatcccagtgcttttggaggccgaggtggtggatcacctgaggtcaggagttcgagaccagcctggccaacatggtgaaaccttgtctctactaaaaatacaaatattagctgggcatagtgatgcgtgcctgtaatctcagctacccaggaggctgaggaaggagaatcacttgaatccaggaggcagaggttgcagtgagccaaaatcttaccactgcactccatcctgggtgacagagtgagactccttctcaaaaaaaaaaaaaaaaaaaagaatatactcccaagttaggttgcagttcactctacagagagagctttaggtcaaatttaatttaattaaacaattctccccttttggtcagcctcaaaattttgagattgacca

SEQ ID NO: 7996 - DNA, 6000 bp, Homo sapiens
actccgtctcaaacaaaaaaagctgttcatccctgtcatctatccaacttctttcccatctctgggctctaagtcttgccattttcctggtaggcaggaacttcatggccatggatgtgagctgtccaaacactcagaaaaaaagaatcttgactttcttctcttctttgacctcctttactctatttcagccaacattcccatagccccaccctaatccttgtcatcactctgaaatgtgaaacacagacatttcactctctgaccacaaccactaataccccaactcccccactgcttcattgacaatggcctgaggggtatactggccaactaggtcgttggttaaggttccgaagagtgcaaacactatagaaggtcaagtctccctcctattaaaagactttttttctaacattttgaaaacttttgttacatgtttacaaggaagtatttgaagaagagattacaggcagtttttctaatatttcataaagaaaaacaggtggggcctggcagtccaaagtggtgattaacagcatgaaatttactttcacagccaggcatggtagctcacacctgtaatcccagcactttgggaggccgaagtgggtggatcacctgaggtcaggagtttgagaccagcctgacaaacatggtgaaaccccatctctactaaaaatacaaaaattagctgggcgtggtggctggaatcccagctacttgggaggctgaggctggagaatcacttgaacccaggacacagagattgcagtgagccgagaccgcaccattgcactccagcctgggcaacgagagcgaaagagcaaagctccatctcaaaaagaaaagaaagaaagaaaagaaagaaagaaagaaagaaagaaagaaagaaagaaagaaagaaagaaagaaatttacagtcacacaagaccatactaagactctaccctcattagctgtggaatgcggaagcaagtcacttacaaccaactttgggggccttacctaactcatttgcaaaatggagatgataaagccaacctcacagtcttgcaatgaggagtttaactaagattatgctcataaaaagcttcccacagttctggggttttcttcaagcggataaatggagctgggctaggactgttttaatccaaacacagatgagcacaggaaaatatcagatgttgacatgtatgcaacatggcccacaagcctgcatacagacaccagaatgcacacatgagaacatccacatacttatatgtagtcacccaattgtgaatgcatacatacaaacatgaatatgcggcattcatcttgttttacacagaaatgcacatcatagacacccctaaatcatgtgtgcacacatgctgtatgcagagacagacacatagattggcaagcattgagaaacagtggcacaccctgtcaggcacacacacacatgtgcatgtgcagacataagttggaatggatacccattatcaagcacaaacatacaccccacaaagcctggtgcacacataaattcatgtatcaacatggacatacagaaacatacatgcacatagacactaccagaatgacacacagacagttgaataaatgaggataaacatggcagaggcatccaggagaactcactggacaaaatggcacaaaatacaaagatgcaggagcacacagggtgattgagggaaacattgacttgcagggaaggagaaagagaagatagaaagacaggatccaagacaacggtagacagacaggtgggcaaagtcctgtgcagggctccagggccaaccagaataacctgagagtctaatgctggcctgtccttccacagatactgcctaactcagcaccacactccaggaggccatgaaggattaatttcctattcacagctccatggagtaaagcttggctgtgctgaggaaggggtggggaaagaggttcccaaagactctgtccttttcctccttcccaaaggaaaagatctgtgagctttagactagagaatgtaaaagcaaggaatgtgtttagggaacatcttatccatccgcttcatcgtacagaggaaagagaacaactgctattcattgagcacttactgccatgtacctcacctgcattaacacatatacttctcccctaaatagctgaagaggtaagagctgttcttggctccataaggctcagagataaagtcagctattcaaggccacacaacaaagaagggataaggttaggattccaatccaggccttaatcattgcaccatccatccagaaaaggaaactgaggccaagcaaaggaaagggatcttcctgggttttccactaactcactctgaaaggctgtacccaagacactgcccactgggacaagtccctcccacatgatttcagacaccattctctcactccatgctccagggtaatcaacaagtccaaaattgattgacctctatgtccacaaacactagagttctccaaacctgtctctccccaccccctccctggccagatcatggcaacctgctgatcactcagtgcacttcctagtgccaacctcactgagaaacaaagttcccgaatttctatctcccacctttttaaggaactagaaggaaaaggaggagcccaggcttagggccagcccaggtgcaggctggtgaccaggattagagggattgatatctgccaagctggtgctaatcctccttcccacctcttcccctccaaaatcaacaaacaactttcctctgtcccctttgttctctgatctttgttccctccacacaggtctcagagctcagcatcctagaacactttgagcaagatgtcagtcctgggggggccaacctcacccacctccacttgtccacagttggtgacccagaggagaggtgcaacagtggaaggtccaaacatcagagcctgtcctgtgcccatctggagcccctctcagggtctggctgaggctcatctcagacccacataggaccaatatcaacacctgcctcatgctcatgtcagagcccactgggaccaacctcagaccctatatggtgccactcttatgccctcctgaagcaggactctcttatgccctcaatgacacctgagacaacacacagagccctcttggcaccaaacatgacttcaatattctcctggtgtcaagttcagtgccaacttgtttcccatcctcgcatacacctgggggcagtcccaaagccaacacgatgcctttccctccctggacacacctgatgctgatatcagaacccgccaatgtcatcagtgtgtccactgctgatgccagtcccagcactcacctcctgctaagcctggcctgcacttgactcccagggtgatctaggccagtcaatgaaggggggcgaggagaaagttcacatcccagctccctcacttactccctgtgtgacctcactcaagaggatttatggagtctagatctgctcatcttcaaaatgaggatgatcatgatgaaccaacctcactgttacaaagattcaaccagatcatacacacctagacttaatcttcccatatatgaccatgctcaccaaagggtaactgtcctgtttactaaggaagaatttccttgagggaaggacaggagggctactcatcccttctccactcacacccaccccaggatctgcctctgtgcctaatactggagtttaccccaatctcttctgcgattgttccctctgcctactaatagtagtagcccctgacaaagcaggaatcgcccttaaaggagacttaactcaccctcaaacgtggtcttctcttcccaaacactccctttccactggcaggaaaaccaaatccagaaagtggaactaaagacgcagagcaagagagatgggagttcagggccactcacacatgtcccctgcccactgtctgttttctgtcctctgtagatctttatataaaatgagaaacataaataacaatcatagtattaatagggatgatacaatcaatctagtgggtttccctaagaatctgggttggaaaccagtggagttcttcgtaaattacaacccttgggacacttgagatttttccagcatttgagggttgttattactatttctccagacctagccaatcccctctgccaactggtaacatgaggtactcttctccacgtgtggggaaagttcctctgaaatatggctctcgtcttctgcccctttcccagccagagatgggcagcggaggttctatggcacccatcctggcctcactctgaggttccaatgaggattctgggcatcaagagacagctctgggtcaaagcaaaatcaagtcagtccctgggcccagtgctgggctgctgggctttctgggagcacctgctgggcttgctacacactccacctcccagaaactccacacccacagccctgggtcttcctagccccaagactttcaagtccatatgcctggaatcccccgtcctgagacccttaaccctgcatcctccacaacagaagacccccagatgcacagccacacttccatctcaccctagtaaaacccagacctttggattcctctcccgtggaatgcccaaatccacaactttggggtgcattctcactcccagatcccaaatccaaagtccaggtgctcccctgtgcaaatattccaaactcctcagttccacagtttatctgttgcccgctcctaaatccacagccctgcagcaaccctcctgaagtaccagatttagtctggagttcccctccctgttcagcttccctggggtccctctcctcctcccttgctggctgtgtcctaagctgtgtgggattcagggttggggtgtagttgggaggtgaaatgaggtgattatataatcaaccaaagtccatccctctttttcaggcagtataaaggcaaaccaccccagccatcaccatctatcatcccactgccaccatgctggcctcagggctgcttctggtgaccttgctggcctgcctgactgtgatggtcttgatgtcagtctggcggcagaggaagagcagggggaagctgcctccgggacccaccccattgcccttcattggaaactacctgcagctgaacacagagcagatgtacaactccctcatgaaggtgtcctaaggcagggagatgggtggcacggggtgggggctgcccagttggctggggctttgtggcaggggattgaccagtgtggaccagagtcttaggaaagggagtcttggagtttcagcatcagggtcctagcaggaaagacaggatcttgggatgtccagctccctgactgtgagaacctgggggcgaagcatcccagtacatgatatctcagtgctgggcccattcagagtgggggctgctccctctaaccactcccacctgcctccaacagatcagtgagcgctatggccctgtgttcaccattcacttggggccccggcgggtcgtggtgctgtgcggacatgatgccgtcaaggaggctctggtggaccaggctgaggagttcagcgggcgaggcgagcaggccaccttcgactggctcttcaaaggctatggtgagggggtgcccaagagggggaaggtggccaggtggatgcaatggtctccgtgtccccagccttctccctgactctcctgcccactggaggctatggcagagccccctgtctggtcttctctccccatctcccttcatcgtggcctctccctgtgcgtccctcacctgtctccagcgtccctgtcgtgattcctccctgcctctctctgccccgtctcctccttctctctcactggagtctcctctttcccctctctctccatctctgaggacatcctgggtttctgttttccagccctggtcctctgtcttcatttgtctttttgtcgctctcggcttctgtgcttctccgtgtttctcctctctctgcttccctct

SEQ ID NO: 7997 - DNA, 6000 bp, Homo sapiens
ctctgttgcccaggctggagtgcagtggtgtgatctcggctcactgcgacctctgcctcccgggttcaagcaattctcctgcctcagcctcctgagtagctgggactacaggcacacaccaccatgccaagctatttttgtatttttagtagagtcggggttttaccatgttggccaggctggtcttgaactcctgatctctattgatctgcccatctcagcctcccaaagtgccgaattacaggcatgagccaccatgcccggccagcttattggctctttatgaaaaatattcaatagagagaagaaaacaaatcacacaggaaatgaaaacatgacacagccactttggaaaagagtttggaagtttcttataaatatacactcatcatagaacccagcagtcacactcacagatatatccagatacacgaaacatagatccccacaaagacatatgcatatatgccaagaataatacatattattcaaaatagccagaccttgggaacaatccacatttccatcaactggtgaaaagcaaattgtggcacatctatatgcggtgacatgctactctgcaatgaaaaggaatgagcttctgatgtatgtaacacatggttaactctcaaaagcattacgtatgcttcccagaagcaggcttggtatatggaagaaatgctgtagattttcttttcttttttttttttttgagacggagtctcgctctgtcgcccaggctggagtacagtggcatgatcttggctcactgccacctccgcctcccaggttcaagtgattctcctgcctcaggctcccgactagctgggattacaggcaccctccatcaagtccagctaatttttgtatttttcatagagagaggggttcaccacgttggccaggctggtctcaaattcctgacctcaggtgatccacccgcctcagcctcccaaaaagctaagattacaggcgtgagccaccatgcccagccgtagattttcatttatatgaaatgtagatcaatagtgggaagaaaaaactagaacagggctggatgcagtggctcaagcctgtaatcccagcactctgggaggctgaggcagaaggattgcttgagcccaggagttcgagatcagcctgggcaacatagggagacctctgcctctacaaaaaatttttaaattagccagttgtgatggcacaggcctctacttccagctactcaggaggctgaggccgggggatcatttgagccagggaggtcaaggttgcagtgaacaatgatcacaccactgcactccagcctgggggacagagcaagaccctgtctcaaaagaagagaaaaaaacctagaacaatggttgcccacaagagatggagcatggttgactaggaaggagtaggaaggagggttctcttttcattattattattactttagagaagggagtctctctttgtcacccaggctggagtgcaggggtgtgttcatagctcactgtagcctggaactcctgggtgcaagtgatcttccacctcagccccttgagtagctgggattacaagcgtgcaccaccacacttagctattgtttttttcttttttttagtagagacaggggtctcgcaatgttgcacagcctggtctcaaatttctggcctctagtgatccttccacctcagcctcctatagctaggattataggcacaaaccaccacgcccagctccaagagaactttcttggatgatgaaaatattctgtatcttcacagggatttcgataccttcaaaattcagcaaatgttcacttaccatgtgtgtatttcatcacaggtaaattttacctaaagaaatcgttaagggaaaactccatctacacaccttcacaggaactatgacacagtaaatagaatcaagtcctccagttggcgatggaatgggatctggcacaccagaagggggctcacctaagcctgacatgggacactgtgtggttctagcaggaaggaaggctgcatgtgccgtccagatgccagtgggcaagaggacaggatgatggaggatgcgcccgcttactgcccattgctgccattctctccgtgagataagaagcgggttcatcaacaaagagtgaggtgactgaagagggttttggagtttgaggaggcaggaacaaaaggataggaatagggcggggggagttccaagagaggacaatgagaggcgaggcatttttccaccacggagtgtgtttcagctttctgcaataccccagcggttctcaactgggttgatttttttcctcccaaggggacattcaatagtatctggagtcatgtttgtttgtaacaactggtagggaatgagtgggtgggttctgtcatctactgagtagaaaccaaggacactgctaaacatcctaccacacacaggatgcagcccccaccacccatgaaggcccaagacatcaacagcagtgagttgagaaattgcaatacatcccttccttgccccaagttccctctgtagcaggagagcaagtcagaataacagaactcaaagcctcttaaaaccccccttctcggccacacatggtggctcacgcctgtaatccccagaggcccaggtgggaggatcgcttgagcccaggagttggggaccagactgggtgacatagcatgctagatctcatctctactaaaaattttaaaaattagccaggtgtggtgatgcgtgcttgtagtcccagctacttgggaagctgaggcaggagaatcccttaagcccaggagatcgaggctgcaatgagctatgatcacaccactaaactccagtctgggtgacagagtgagaccctgtgtcaaaacaaactaactaactgcccttcccataaatcccagtttccccaatcaggtggtcccattaggcccatcttttttttctttttttttcttttttttgagtcaaagtttcactcttgttgcccaggctggagtgcaatggtacaatctcagctcactgcaacctccacctcccgggttcaagtgattctcctgcctcagcctcctgagtagctgggattataggcaagcaccaccacgcctggctaattttttttgtatttttagtagagacagggttttgccatgttggtcaggctgtctcaaactcctgacctcaggtgatccacccacctcggcctcccaaagtgctgggattacaggcatgagccaccacgcccagcctcattaggcccctcttaaccaagttctagggtgagggataagttgcttacagggttggcgtggatacagcactacaccctccccttaaaagtagggagtagacgccaagggaaactagagctatataatcccatcatcaagccttcagccctcttccaggacctgccccaaccggcctatccaggactgaaacaacagcatgggccccacctccaccccaccatatgcctgggacctagggtgtcaaattccccaggacctccaaacacttcctcctctgcccctctgagaacagcaatcctggtgcacacccacgaacctgtgggggtacccacacctccacctggcctcccagacccttgaccgcaggggctctccacccagcctagcccctggcaccagagccctggcccagctccaggttttgcattctgcccttgtgacctggccaggaggtgggtaactagggccagtttcttcttcttttttttttttttttttttttgagaccgagtctcaccctgttgcccaggctggagtgcagtggcatgttcttagctcactgcaacctccacctcccgggttcaagcgattctcctgccccagcctcccaagtagctcagactacaggcgtgagccaccatgcctggctaatttttgtattattagtagagacagggtttcaccatgttggccaggctggtcttgaactcctgacctcaggtgatccacccacctcggcctcccaaagtgctgggattacaggcgtgagccactgcgcctggcctactagggtgagtttctaaggcaggagctgagagtagacatggctagtagggtgctcaggagggcaggaggagggctgtttatgagccagtggtgggagagagtgtcattctagtctgagaggctttttccctgtggcttccagctctgcccttttcttaaacactccttcagcctcagcttggcttcagtcccaccaagtgcagtctgactcgtggagacatgagagatagagagagtgagagaccagagagatcaggagacagtgactgagagggacttacagggagatcagggagagaagcagagagaaggagaaagcccagagagcataagaaatgaagacccagagacaccaaaggagggagagacagagacacagagagacaaaaagattcagaggcagagactgtagaggcagaagcaaagcaagacacagagcatttcagagacccacggcaagagacagggaacagcatggagaactatgaaaaaataggcttccagagaaagagaaaactccagctctggagggaaagggacttagccagggccactcggcccatcagtggcagaaatggacttgaacccagagaaaaagaaacaagtgccccaaataccaaaggaacccagcccccatccctggcccatcattttgcgacagccccatgactaccccaaaaccaggcccaggctccaactggcaaagcaaaaaaaaaaaacaaagaaagaaagaaagctttgccccatcccaggagggcccccaggcgcagccccctcccacggcacctttccagctggctgtgagccctagggccgcaggaaaggtatggcaagatgatgggagggatttaaagttcacagcgagaacaagaaaagtggggttaaggaggagggtgtgggcagaaacaacttaagaacaacctctgccccaccaccccccaagcacacccagagctgcaggctctagcgcatcccagccagtgtctcctgcagctcagcaggtaaagggccccggtgagggaggcagagaaggagggggtgtctcccaagagagggtgggtcgccagctccaatctctgtctctgagactggctaggaatcttttttgctgtttcctctgagagctctcatgtccctgttctgagcactgggatttctttactggtgcttcaccaagtaggtggcttctctctctgcaatgcaaccccatggttggcaacacttgattttttcctgtcactgtttctgcctgtgcccttcctctctgtctccgtctctttctctctctctctctctctttttttttttttttttttttttgaggctggagtgcagtggttcaatctcagctcactgcaacctccacctcctgggttcaagcgattctcctgcctcagcctcctgagtagctgggattacaggtgcctaacaccacgcctgactaatttttgtgtttttagtagagacagggtttcaccatgttggccaggctggtctcaaactcctgacctcaagtgatccgcctgcctcggcctcccagagtgctgggattacaggcgtgagccaccgtgcccggcctcagtctctcttggtctgccctttgcagcctacccgtctctttgtgtggctctaatattccctgcctctcttattctctctctctctctctccatctctgtctatgtgactctgtctttgtgtatctgtttctgtctgtcattctcgtctccctcagtctctgtgtctagctctgtctctccctctctctgtccctcttaccctttttctctccatccttccatgtccctctctgtctctcagtcagtgtccatctcactgtctctccactcaatctcccttgtctttctctagctctgtgtctgtctagttctgtctctttctttctctagtctatgtcagcctctctctttctgtgatgtgctctctggctctccctatctct

SEQ ID NO: 7998 - DNA, 6000 bp, Homo sapiens
aggctggaaggcagtggcacaatctcagctcactgcaacctctgcctcttgggttcaagcaatcctcctgcctcagcctccagagtagctgcgattacaggcacgtgccaccataaccggctaatttttttttttttttcagacggagtctcactctgtcacccaggctggagtgcagtggcacaatctcagctcactgcaagctccacctcccaggttcacgccattctcctgcctcagcctgccgagtagctgggactatagacgcctgacaccacgcccggctaattttttgtatttttagtagagatggggtttcaccgcgttagccaggatggtcttgatctcctgacctcgtgatctgcccgtctcggcctcccaaagtgctgggattacaggcgtgagccaccacgcccggcaagaacttttaagttttcttatctataggatgttgcaatcatcatctttaaacattagacatggaatctttataataatcttgccatatatatatatatatatatattttttttttttttttttttttttttttgacactgagtctcactttatcgcccaggctggagtacagtggcacaatcttggctcactacaacctccacctcctgggttcaagtgattctcctgcctcagccaccccagtggctggggactacaggcgtgcaccaccacatccagttaattttttttttttttttgagacggagtctcgttctgtcgcccaggctagagttcagtggggagatctcagctcactgaaacctccgccttgtgggttcaagcaagcaattctctgccacagcctcccgactagctgggattagaagtgcccaccaccacgtctggctaatttttgtatttttagtagagacggggtttcatcatcttggccagactggtcttgaactcctgaccccgtgatccacccacctcggtctcccaaagtactgggattacaggcgtgagccactgcgcctggccggttaatttttatattttcagtagagacaggatttcaccacgctggctaggctggtctcaaactcctgacctcaggtgatccacccgccttggccactgtgcctggtcaacagtctttctatttttattctaggctggagacctttgtctcaaaaacaaaacgagaatgctccctggagtctgtactgatccctcttccctcccaccgtagattagttttctccttgcatttaaaaagacctttctggctggcatccagtgaatgaattgtggaggagggggagaaggagagaggaagcaggtagctcagtggggaagctactgcaaaatcctggcaagcaatgacagtaccttgaatcagggctggtgtcagttggatcagggtggtagggaaaggaggaaatggataaatttggaatgtatttggaggtagagccagcaggatttgctgacaaactgggtttaaagtcaaagagagaaatcaaggttaaacctgacaaataaaaacagatgtggtctcaggcgagtagagacattatgcagaaagactattgcatcagggggaaagatggctgtaaaaacaatgaacaagaccagaatctgataacccagaaggatgtgttgtctaatgaaactaattttttcccctcctcctattttttttttgagacggagtttcactcttgttgcccaagctggagtgcaatggcgcgatctcggctcactgcaacctccgcctcccggattcaagcgattctcctgcctcagcctccctgagtagctgggattacaggcatgcaccaccacacctggctaattttgtatttttagtagagacggggtttcaccatgttggccaggctggtctcaaactcctgacctcaggtgatctgcccacctcagcctcccaaagtactgggattgcaggcatgagacaccgcgcccggcctctcctatattttgttgtcatcagcaagtgaaaagatggtgataccttttacagaggtaaggaaggaggtgagagaaagtattcccagatggggtgggaagctggtacagcccactttgcaggaggtgggggaatcgggaattcttttatatccatgaagtttgagatgtctgttagctctcccaggggtagaacagagggagcagataggctcaaggttggatttggaacgtcctagaaaccttccagaacaaggcaaaggaggaactgagaactggcatttacttcatagcaagagcgtatgagcctccccacccctcctcctttggcttcagggcacccctggaatgttagaggctagaatcaatgctaaagaagaccacagtcaaggattccccagactccagggagcactctggctatgctcttgagagaaagggctctggactagaatacaaattgcaagattgcaggccgggggcagtggctcatgcctgtaatcccagcactgtgggaggccgaggtgggtaaattgcctgaggtcaggaggtcgagaccagcctggccaacatggtgaaaccccaactctactaaaaatacaaaagttagctgggagtggtggtgggcgcttgtaatcccagctactcaggaggctgaggcaggagaatcacatgaacccaggaggcagagattgcagtgagccaagatcgtgccactgcactccagcctgggcaacagagcgagaccctgtctcaaaaaaagattgtgaaaattctaagaatctaatttttttttttttttttttttttttgagacggagtctcgctctgtcgcccaggctggagtgcagtggcgggatctcggctcactgcaagctccgcctcccgggttcacgccattctcctgcctcagcctcccaagtagctgggactacaggcgcccgccactacgcccggctaattttttgtatttttagtagagacggggtttcaccattttagccaggatggtctcgatctcctgacctcgtgatccgcccgcctcagcctcccaaagaatctaatattttaaaactccagcatatgcaactcaaagctcatctaattatacacttaagagttatgtatttcattgtatataagataccttgaggaacaaaaagtatctgtaaacaaatactgagctctagctactgatatgcatgctgatgtatttgggagtgaagtgtactggtatctgcaactgactttgaaatgcttaaaaaaaaatcaatggataggcaaaatgaacagatatgtaatgaaaaaagggccaggcacagtggctcatgcctgtaatcccagcactttgggaggctgaggtgagaagatcacctgaggtcaggagtttgagaccagcctggtcaacatggcaaaaaccccgtctctactaaaaatacaaaaaatagccaggcatggtggtgcacgcctgtaatcgcagctacttgagaggctgaagcaggagaattgcttgaacccgggaggcagaggttgcaatgagccaagactgtatgctattgcactccactctgggcaacagagtgagactctatctcaaacaaaaaaagaatagataggtaacaaagaaaggataataaaatggtggaatctgatgggtatacaggtgttcactgtatgtttgaaattttaatatttttataataaaatacgaaatcaaaatgcaaagcaaacaaagtaactgccctgctgaaaacccctccagacagcttccgtttgcaatagaaataaaatgcagtcttttccaagaccttgcaagatggcccctgcagacttcatgaatcttatctcctacattcaatctttgaaaatataacaaatatttattgagtgcctactgtgtgtcaggcactgcactatatgttggggatacagcagtgaaccaaacctacaataattcatgcacaaatggttctaacattcttccttctcaagaagcccattcccctggcaggccttctcacttcctgaaattgttttcatctcatcttcatctgcatgtggatatgagctcaggaaggccagagcccttctctccatcgctcatagctgcaccctcgggtctagaacaaggtcttgtttatagtaagacctcaataacagttagttgcagaaatattagctaacatctatttagtgcttgttacatgtgcacctgcgtctgctttaaatggtgtgcacagatgtactatttaatcctgaaaactagccccattttacaaggctaacagaggcacagaggaattaggctgtgaattcaagcagtctggcttcagccatcacggtcctaaccgctctgcaaactgcctctaaacgaatgaatgaatgactcaatcattctaactggcccaagtcaaaatattaactctgccactcagccaagttgacctggggccaaccgatttatctccctggacttcagattgtttatccttaaaggtcaagtccttcctctcagttcgtgaagatgtaagatgctggagaaaattgactcaaagacaccccatacacgcacgcacacaggaacccacatccgaacaatgagcgaggtaggagctggggagagtggcgcggggtcaccgccagatgcggggtgtggcaacctccaggcggccaaagtctctgacttccaggttcttctgtttgcttactccctatccgggggcccaaggcgctgtctccgccgcccaagccccgcgtaaacctgggtgacctcggagacatccgttggagcatgagttcccgacatcaggcggcggcggtggtccgggagaaacccggcggcggggagataagcctgcccaggaggcagggggctgggctagctgccccgccccgcgcctgacttcgttggggagggagacgcccggctcccgcccctaactagcccagccgcgcggagcgcctgggagaggagaaggagccgacctgccgagatggaggcgaccggcacctgggcgctgctgctggcgctggcgctgctcctgctgctgacgctggcgctgtccgggaccagggcccgaggccacctgccccccgggcccacgccgctaccactgctgggaaacctcctgcagctacggcccggggcgctgtattcagggctcatgcgggtaaggggctctggggacgtcctggctaggggtgggaggattcctgggagagaaacccgagtgccagggtgaggggcttttcgggtatcctagggaggaggcaggggcaggggtcccaaggcaaaggggctgctgctgtcctggggttgggggcaggagcaggttgtccagggctgagaaggggagaggtgcccgggagagaggatcgtggggtgggggaccagggctaggaggggcagagacctctgcctacagaatcctgggaaggtgatgggcagggaccgaggctgaaagagacaggagtcctccagccgaggagaagctgatgcagctgggcttgtcccagagggagaggtagctggagccatacaggtggggcatgctgaagagggcacaaagaagaaaagggggaggcgtccctgcggggagttggaggcagagaagaggctggagggttgcaggctcagagagggggtcccgctgaaggaatctgccagcagagaatgcaggatgggaggatgggtggagctcagttgggagttcctgggactggggaggaaggagagcaagaaagaaggcagaggcagccccagccttaggggatagcaggtgggagtgggcagaggcctgaagtttcccattcaaaaggattctgggtgacttcaaggacgtagaaaaaagggtggggtcttgggggagagatggggcggatactcagcagtgtctgctccagaatttcagggttttgtggtgactgaaaggggtggctggatatttggggggcagggagggccctaaggaattaagggagacccaaactgcttctggattgcccagcgtcagaggttagggttcagcaggaagcaagggaacgacagga

SEQ ID NO: 7999 - DNA, 6000 bp, Homo sapiens; identical to SEQ ID NO: 2038

SEQ ID NO: 8000 - DNA, 6000 bp, Homo sapiens
gcagaggcctgagcttccctggtcaaaatagggggctagggagcttaaccttgctcgataaagctgtgttcccagaatgtcgctcctgttcccaggggcaccagcctggagggtggtgagcctcactggtggcctgatgcttaccttgtgccctcacaccagtggtcactggaaccttgaacacttggctgtcgcccggatctgcagatgtcaagaacttctggaagtcaaattactgcccacttctccagggcagatacctgtgaacatccaaaaccatgccacagaaccctgcctggggtctacaacacatatggactgtgagcaccaagtccagccctgaatctgtgaccacctgccaagatgcccctaactgggatccaccaatcactgcacatggcaggcagcgaggcttggaggtgcttcgccacaaggcagccccaatttgctgggagtttcttggcacctggtagtggtgaggagccttgggaccctcaggattactccccttaagcatagtggggacccttctgcatccccagcaggtgccccgctcttcagagcctctctctctgaggtttacccagacccctgcaccaatgagaccatgctgaagcctcagagagagagatggagctttgaccaggagccgctcttccttgagggccagggcagggaaagcaggaggcagcaccaggagtgggaacaccagtgtctaagcccctgatgagaacagggtggtctctcccatatgcccataccaggcctgtgaacagaatcctccttctgcagtgacaatgtctgagaggacgacatgtttcccagcctaacgtgcagccatgcccatctacccactgcctactgcaggacagcaccaacccaggagctgggaagctgggagaagacatggaatacccatggcttctcaccttcctccagtccagtgggcaccatttatgcctaggacacccacctgccggccccaggctcttaagagttaggtcacctaggtgcctctgggaggccgaggcaggagaattgcttgaacccgggaggcagaggttgcagtgagccgagatcacaccactgcactccagcctgggtgacagaatgagactctgtctcaaaaaaaaagagaaagatagcatcagtggctaccaagggctaggggcaggggaaggtggagagttaatgattaatagtatgaagtttctatgtgagatgatgaaaatgttctggaaaaaaaaatatagtggtgaggatgtagaatattgtgaatataattaacggcatttaattgtacacttaacatgattaatgtggcatattttatcttatgtatttgactacatccaagaaacactgggagagggaaagcccaccatgtaaaatacacccaccctaatcagatagtcctcattgtacccaggtacaggcccctcatgacctgcacaggaataactaaggatttaaggacatgaggcttcccagccaactgcaggtgcacaacataaatgtatctgcaaacagactgagagtaaagctgggggcacaaacctcagcactgccaggacacacacccttctcgtggattctgactttatctgacccggcccactgtccagatcttgttgtgggattgggacaagggaggtcataaagcctgtccccagggcactctgtgtgagcacacgagacctccccacccccccaccgttaggtctccacacatagatctgaccattaggcattgtgaggaggactctagcgcgggctcagggatcacaccagagaatcaggtacagagaggaagacggggctcgaggagctgatggatgacacagagcagggttcctgcagtccacaggtccagctcaccctggtgtaggtgccccatccccctgatccaggcatccctgacacagctccctcccggagcctcctcccaggtgacacatcagggtccctcactcaagctgtccagagagggcagcaccttggacagcgcccaccccacttcactcttcctccctcacagggctcagggctcagggctcaagtctcagaacaaatggcagaggccagtgagcccagagatggtgacagggcaatgatccaggggcagctgcctgaaacgggagcaggtgaagccacagatgggagaagatggttcaggaagaaaaatccaggaatgggcaggagaggagaggaggacacaggctctgtggggctgcagcccaggatgggactaagtgtgaagacatctcagcaggtgaggccaggtcccatgaacagagaagcagctcccacctcccctgatgcacggacacacagagtgtgtggtgctgtgcccccagagtcgggctctcctgttctggtccccagggagtgagaagtgaggttgacttgtccctgctcctctctgctaccccaacattcaccttctcctcatgcccctctctctcaaatatgatttggatctatgtccccgcccaaatctcatgtcaaattgtaaaccccaatgttggaggtggggccttgtgagaagtgattggataatgcgggtggattttctgctttgatgctgtttctgtgatagagatctcacatgatctggttgtttaaaagtgtgtagcacctctcccctctctctctctctctcttactcatgctctgccatgtaagacgttcctgtttccccttcaccgtccagaatgattgtaagttttctgaggcctccccaggagcagaagccactatgcttcctgtacaactgcagaatgatgagcgaattaaacctcttttctttataaattacccagtctcaggtatttctttatagcaatgcgaggacagactaatacaatcttctactcccagatccccgcacacgcttagccccagacatcactgcccctgggagcatgcacagcgcagcctcctgccgacaaaagcaaagtcacaaaaggtgacaaaaatctgcatttggggacatctgattgtgaaagagggaggacagtacacttgtagccacagagactggggctcaccgagctgaaacctggtagcactttggcataacatgtgcatgacccgtgttcaatgtctagagatcagtgttgagtaaaacagcctggtctggggccgctgctgtccccacttccctcctgtccaccagagggcggcagagttcctcccaccctggagcctccccaggggctgctgacctccctcagccgggcccacagcccagcagggtccaccctcacccgggtcacctcggcccacgtcctcctcgccctccgagctcctcacacggactctgtcagctcctccctgcagcctatcggccgcccacctgaggcttgtcggccgcccacttgaggcctgtcggctgccctctgcaggcagctcctgtcccctacaccccctccttccccgggctcagctgaaagggcgtctcccagggcagctccctgtgatctccaggacagctcagtctctcacaggctccgacgccccctatgctgtcacctcacagccctgtcattaccattaactcctcagtcccatgaagttcactgagcgcctgtctcccggttacaggaaaactctgtgacagggaccacgtctgtcctgctctctgtggaatcccagggcccagcccagtgcctgacacggaacagatgctccataaatactggttaaatgtgtgggagatctctaaaaagaagcatatcacctccgtgtggcccccagcagtcagagtctgttccatgtggacacaggggcactggcaccagcatgggaggaggccagcaagtgcccgcggctgccccaggaatgaggcctcaacccccagagcttcagaagggaggacagaggcctgcagggaatagatcctccggcctgaccctgcagcctaatccagagttcagggtcagctcacaccacgtcgaccctggtcagcatccctagggcagttccagacaaggccggaggtctcctcttgccctccagggggtgacattgcacacagacatcactcaggaaacggattcccctggacaggaacctggctttgctaaggaagtggaggtggagcctggtttccatcccttgctccaacagacccttctgatctctcccacatacctgctctgttcctttctgggtcctatgaggaccctgttctgccaggggtccctgtgcaactccagactccctcctggtaccaccatggggaaggtggggtgatcacaggacagtcagcctcgcagaggacagagaccacccaggactgtcagggagaacatggacaggccctgagccgcagctcagccaacagacacggagagggagggtccccctggagccttccccaaggacagcagagcccagagtcacccacctccctccaccacagtcctctctttccaggacacacaagacacctccccctccacatgcaggatctggggactcctgagacctctgggcctgggtctccatccctgggtcagtggcggggttggtggtactggagacagagggctggtccctccccagccaccacccagtgagcctttttctagcccccagagccacctctgtcaccttcctgttgggcatcatcccaccttcccagagccctggagagcatggggagacccgggaccctgctgggtttctctgtcacaaaggaaaataatccccctggtgtgacagacccaaggacagaacacagcagaggtcagcactggggaagacaggttgtcctcccaggggatgggggtccatccaccttgccgaaaagatttgtctgaggaactgaaaatagaagggaaaaaagaggagggacaaaagaggcagaaatgagaggggaggggacagaggacacctgaataaagaccacacccatgacccacgtgatgctgagaagtactcctgccctaggaagagactcagggcagagggaggaaggacagcagaccagacagtcacagcagccttgacaaaacgttcctggaactcaagctcttctccacagaggaggacagagcagacagcagagaccatggagtctccctcggcccctccccacagatggtgcatcccctggcagaggctcctgctcacaggtgaagggaggacaacctgggagagggtgggaggagggagctggggtctcctgggtaggacagggctgtgagacggacagagggctcctgttggagcctgaatagggaagaggacatcagagagggacaggagtcacaccagaaaaatcaaattgaactggaattggaaaggggcaggaaaacctcaagagttctattttcctagttaattgtcactggccactacgtttttaaaaatcataataactgcatcagatgacactttaaataaaaacataaccagggcatgaaacactgtcctcatccgcctaccgcggacattggaaaataagccccaggctgtggagggccctgggaaccctcatgaactcatccacaggaatctgcagcctgtcccaggcactggggtgcaaccaagatcacacaaatccctgccctcatgaagctcatgctctcatggggaggaagacagacatacaaagagatctagaatgtgaggtcaggtgttgacaagagccctggagggaatagagcagggaaaggtcagaaaaggaagacccagggtctctagaggaggtgtcagggaagggatctcccaagaatgccctgatgtgagcaggacctgaaggcaatggggagggagccgtgaagacccctggaaaagcagattccacacagggaaatgccaaggtcggaggtgctaaggaaataggagacacactgctgaccttgacctagtaggacacacacacacacacacacacacacacactcactcactccagggctgggggatgaagagacctgctcaggacccaggaccccatttttccaccctaatgcataggtcccaatattg

SEQ ID NO: 8001 - DNA, 6000 bp, Homo sapiens
ggctgcagaattggagggaattgtgaacagagagaggacagggcaacttcccaggcaacaacactactattgccaatattttgccaaggatgggagcaggagcacagagggaaaacagaccttgtcaacgtctcctccaccaacacataacacccactttcctgccaaatactcagatagagaaggtcactgaaagtacaagaaaattcaaatgagaaaaaagacttgaggaagaaaccatgaggcattggggtgtggggaggtgggaaggagtacaggagagaactggcatggctgccaagttgtcagtcaccttcttatgttcttaagaatgctgcatttcttttgtttgaccagtttcacttcccagattcccgtaaagcacatggtctaatctgttacctaacagcaggaaagcatgatctcacctgttcttgccctcaagtaggaacactgccctgggactatactgcagaccaccaggctgagccatccccagaggtcaggagcttccaaccgggaacctttcatacactcttcaagcaacgtacagctccaccgacagtcacaataaaaattctaatatcttccctcctcctgttgctgatgtccatggtctctagcagcctgaatccaggtaaataagactgtctatgaaggggaaaacggggggaggaaatggagcaaaacaggccacaggtgcatcaaaatgtagccctttcagctacagggattgggagcaagtgagcctttttcagtgccagtttcctcatttactgaaaggagcaaactgtacttacatctagtgttgtgagggttaaatgagatattgtatgtgaaagtgtctgcaactacagctggcagatatatacatatgtacttattggttcaacgaatatttgctcccatgccttcacccccaagccttttccagaagagtaatgcatttccccagggtcaaacttggtggcagtagtgggagggtattgaaggcaaccatatatttataaaagataaggaactctttgcttatattcttttttttttttttttaaagacaggatcttacgctgtcgcccaagcttggagtacaatggtgcaatcatagctcattacagctcaaactcctgggctcaagcagtcttcctgcctcagtcttccaagtaagtagggctaaaagtgtgcaccactctgcctgcctagtttttcctttttttttttttagagtcaaagtatcactatgtttctcagtcagatctcaaactttgcttgtattgtttatattctttagagtgcaccaagcatgacatactttaatgctattcaatggtagctaataaacggaagaaaatcctatcaccaggtagtgtccgtatttgaagctttagccacaccaagccctgctgcaacagtgcaccatttgggtagcagacctttggctaaggctttctaatctgctccagttttcactacaaccaaagtggccaagccctttgcaaagaaatcatgcagaagacagcttagccccatgtatatttccacttgggagcaccatctccccaagggccactttgaggtgaaacagctttgttacatactcagcgtcaacttggtcctaaaatcaggagatgttcagccttctccactccaatttccaatgttccttgctttgtagagagagcgctctggaagctgctgagccccatagccctggggcctaaaccaccattcaggaagggaaggtttttccatcactgtgacagacacccaggccagagtcctcagcctagactaaaaggtctagccccaacctccgtttccagtgcaaccccctccactcactaaaaattactctctctccacccaaactagactgtttgcccttccctgaacagggcttgtgttttcccaccagttcaactttgcagatacactcaactcaaaaaccatcttcccacaggccagacaagtgctcagctcctcccacacccagacaatcactctccatcctgaaagctggcttagccctactggactctctcttcttgcacttatctgctgccttatattgaagaccttcctgtgtctctcctgcctccacccactacccttagaggttgcagcctccttggcagcacagactggtgcactgtttccatatccctcatgctatccagctcagcactcagcaaccattagctaaccgcacgaatgcgtcctcaggtttctaaatcaaaccagggcttcagagcaggtctactgacaactgggctgaccgattccttgtagtgagggctgttctgtgcattgtgagatgttcagcagcatccacatgccctctctccactacatgccaatagcagccttccccctccctcaagcaccctcttccttcatgaaagcaaaaaatatttctagatattgccaaatgtctccttgagggaaaccacccctagtcgacaaccattgctttataccaatagttctccacctggcccacacatttacacttatctaggcatttaccctcagcctggaagtcaggggggcctagatccaaatcctggttctgtcactccctttgcaaccctggacaagtcgcttcattttttttctagcctttttatcgtcttaagatgaataaataccactgttcacacaggcttgttgtgaagattagatgaacctcagtgtaacctggaaagggttcaataaatggactgaatggaatttctaaagtcgctcctaaagcactagggtgaggaactggggaaagctcgctgcgccgccagggggcgccatcacaaaccacctcggtgggtggcgccgggctcgagctttgtttcccagccaagtagtttgtaatgcgggcctgactctgagctacttagtggctggaagaaataatagcccctccattcccaaaataaatctcaaaataaaatctaatcttattttatatccctttttttttttttttgagatggagttttgctctgttgcccaggctagagtgcattggcgcaatctcggctcgctgcaacctctgcctcctggattcaagctactctcctgcctcagcctccctagtagatggaactattggtccctgccaccacacccagctaattttcatgtttttaatagagacgtggttttgccgtgttggccaggctggtctcgaactcccgacctcaagtgatccgtccatctcggcctgccaaagtgccaaagcgtaaaccaccgccccgagtggctggcattgtttattatgtcgctgatattgtcccaaatttggccattgggagttccttctagttggtttctgtgacttttgacacaaccccatcatttttcaagcagttccttacttctggccccacagaatgtttacttctggccccacaaggctcctcttgtgctttcttgcccagccctggatcagctatttctccagggacccctggttcctttcatgggaaaatgatgtttacagaccatgggcacccatatgcccattgctagtaggtgccggtgcttctatgccctctagtggtcggagctgggaaataacacacccacactagtgtactgttacccacatttcacaaattaggtaaatgaggcacagaaaagttagacaacttgaccaacatcacagagaaaataggtagtagaactggaaaacaaaaataatgacagatgcacaagtcctaacaagcaaaagtaacttcttcacacatgcatgttagcagaaagccacaagcccaatattccagcatagacactctctttggaaaataaccagaattccacagcaataaacacaatgataaccatcacgtactcaacacccgcctggacactgggctcccacatattcccaacaactctgcaaggaggattttaccatcctccttttacaaatcagggaatcaaggatcatagaagccaagtgacttgtccaagtcaacatagttaagtgacagaaccattagctgagcccaggtctatatctggatataaattccatgcttatgccactatataagcatttcccaaaactgattttaggtgaaacataaataaacttttaagtttaactgtgtttattttaacgcatgacaggaaaaaaaattaagcacacatcaaatctctgatttcatggacaatattgcataagacaaaaatattttgtcttcagttcctggcctcaagccatcctctcacctcaacctcttgagtagctgagatcacaggtgtgagccaccaagccctgctaagacaaggatgttttgtaaactaaatttaattacaaaaaaagtatgaagtaaataataataaaggtggtaaagctgtagagaaaatcataaagttggtctagaaatgtctggggtctggatgacataatactacagcaccatgcagcttcattctcagttactcccaggaaattagagtcacataacactgcagaaagaacaattcagaatcttagacccgggctttagccctggatgtgtccactcctaggaccccaaacatctctgtgacctccttgctggaggtaaatccaaccttcccagacgtgtgagaacactaggaacatcctgcacacatagaggggtttctctgtcacagagaaaataacaccaggtttgaggaccccagggactctctgtgtggtgctgacagacccaaggcccagacacagcagaggtccgtgctggggagggcgggtcgtcctgttatggaacaggggtccaaacaagcttgcttctcagagcatcttctggggaactgaatataaacagaaagggaagaggaggagggacaaaagagacagaaatgagaggggaggggatagaggattcctgaacagagaccgcacccatgacccacgtgaccctgggaaatgcttctatccctgagaggaggctcagcacagaaggaggaaggacagcagggccaacagtcacagcagccctgaccagagcattcctggagctcaagctcctctacaaagaggtggacagagaagacagcagagaccatgggacccccctcagcccctccctgcagattgcatgtcccctggaaggaggtcctgctcacaggtgaggggaggactccctcggagtggatgggaggagggagcacagagactggctagggtctcctggggaggacaaggctctgagaggagacagagggcttttgttgaagcctgaggaaacagaacaccagagagggacaggggtcacaacaggaaagtcacactaaactgggattgataaaaagggaggaaaatcaattgatcatgttttccaagttaatcatcatttgtcattaccatttgaaaaaaaagaaaaatgatagaaatcagaactgcattaggatgacactccaaataaaaatataacaaggaaactaaatgctgcccttactcaccaatcagaagttgaaaaataaccaccagatacactcattaactcatccacaagcatttgcaatcaattttagtcaatggcatacaacaagcatcagacaagtctcagtcatcacagagcttatgctgtcatgaagaggaaaacacacacacaaagagatatagaatgtgaggtcaggtgttgacaagagccctggaaggaacagagcagggaaaggtcagaaagaaaagacccagggtctgtagagggggtgtcagggaagggatctcccaagaatgccctgatgtgagcaggacctgaggccagtggggagggagccatgcagacccctggggaagagcattccacacagggaaatgccaaggtcaaaggtgctgaaggaatgggggtgtcacactgctgactttgactcagtaggacacacacacacacacacacacacacacacacacacacacgctccaacgtggaggggtgaagagacctgctcaggacccagggccctgtttttccaccctaatgcataggtcccaatattgaccgatgctct

SEQ ID NO: 8002 - DNA, 6000 bp, Homo sapiens
ttactccagttttcactacaagcaaagtggcccagacctttgcaaagaaaccacctagaagagagctcaccccaccaggtgcagtggctcacacctgtaatcccagcactttgggaggccaaggcgggcagatgatttgaggtcagcaactcaggactagctgattaacatggtgaaaccacgtctctactaaaaatacaaaaaaattagccgagcatggtggcatatgcctgtagtcccagctacatgggaggctgagtcaggagaacagcttgaacccatgaggcagaggttgcagtgagccaagatcgcgcgccactgcacttcagcctgggcaacagagcaagactccatctcagagagagagagaaagagagagagctcaccccatgtatatttccacttgggagcatcatctttccaagggccactttgaggtgaaatggcttttttacatactcagcatcaatttggtcctaaaatcaggagacattcacccttctccaccccaatttccaacatcccctcctttgtagagagagcactctggaagccactgagccccatagccctagggcctagaccactattccaaaagggaagacttttccattactatgacagacacccaggctggagtcctctgcctgcactcaaagctctaaccccaacctctttttccagtgcaaacccttctactcactaaaaatttctctccactcaaactagcctgtttgcccttccctgaacggggcttgtgttttcccatcagctcaactttgctcacatgcccagctcaaaaccacatttccacaggccagacaagtgctcagttcttcccacacgtagatgagtgctctgcctcctgagagcctgcttagccctactggacactgtcttgttgcacttatcatctgctgccttatattgaaggccttcatatgcctctcctgcctccaccccctgcccttctaaatttcaaactccttggccgcacagactggtgcactgtttccatatccctcacgctatccagctcagcacttggcaaacattagctcaccacaagaatgcatcctcaggtttttaagtcagacaagggcttcatagcagttctattgacattggggatgaacagttccttgcggtgggggctgttctgtgcattgtgagacgctcagcagcatccacgtggcctctttccactagatgccaatagcagccttccctctctcccgtccccaccccggtatgaaaaccaaaaatgtctccaaacattgccaaatgtcccctgggcggaaaccaccctcagtccacaaccactactctataccaatagttctccacctggccacacattcagactcacctgaacatttacactcagcctggaagtcagggggacctagatccaaatcctagctctgtcactccctttgcaaccctgacaagtcgcttcacttttttttaccctgttttatcgtcttaagatgaataaatatcccttctcacaatcttgttgtgaagattaaatgatccgcagcgtgacctagaaagggtttaataaatggactgtgtagaatttctaagtcgctcctaaagcacgagggtgaggaactgcggaaagttctctgcgccgccaggaggcgccatcataaaccacgtcggtgggtggccgccaggctccagctttgtttcccagccaagcaaactttgcaatgtgggcctgagtctgagctacttcgtagctggaggaaatgacactcctcctcatcccccaaaataattctcaaaataaaatcgaatcttattttatcttttcatgacatacatgctcaatatgcttttcacaggggagagggaaaaaagaaatggatgagaatatatgaggatattatgaaagaaatcatattttatatgatttataatagatgactcattacttataatattacttgttaatcataaaattacttataataatagctgacatgttttaagaactcctgtgtctcaggcattgttctaagcacttcacatttatctcattttatcctcacagaaatcttatgcattttacatttttttacttttcatttttcagactttcaaaaatattgtaaaaatagtcagagttccagtatatccttcatccagctttttcaaataaccttaactctaaagcaattatcaaaatcagtcacctagcattgatacaaaaaattttaaaatatagaaatatggggccgggcacggtggctcacgcctttaatcccagtactttgggaggccaaggagggtagatcacgaggtgaggagatcgagaccatcctggctaacacgatgaaaccccgtctctactaaaaatacaaaaattagccaggcgtggtggcaggtacctgtaatcccagctactcgggaggctgaagcaggagaatctcttgaactcaggaggtgggggttgcagtgagcccagatcgagccactgcactccagccttggcgacagagtgagactctgtctccaaaaaaaaaaaaaagaaatattaaaattttgctaatcatcccagtcatgtcttttttctgctccagagtccaacccaggatcccacactgaataacactgtcacatttcctaggcctcctccaacctgggggagtttcccactctttccctctctcaggaccttgatgcttttgaggaggtctggtcagttgttttgtagaatgcccctcaatttgggtttgtctcatgtttccttgggatgtttcaggttatgcattttgggcaagattagcacagaagcgatgtgtctttctcaggacatcccagccggagccccaggatgtctatatctctcattaccgatgaggttcactttaagcgcttggttcaggtggtgtctgccaggtttctctactgtgaagttactattcatctcattgtaattaataagtatcttgtggacaggtactttggaaatatgcaaatagccagtttgttcttagcatacttttaccaattaatttctagaatccagagataattgtagccgataaacaattcttactgtggtgttagccagtgattttctgcttccatcattgcttctacactgattaactggaacgctgctgtaagaaagagctagttcttctttctcatttatttatgtattcacttatttatatatatatcagcatggactctcaagtatttatcggttggactacattactattattattgattatgttgctatattgtccccaaattggccattgggagcttcttctagttggcatttgtgatactttccacacatccccatcatttttcaagttgtgccttactctcaggccccgcaagatgctccagtctcctcttgtggtttcctgccccagccctggaatcagccatttctccagggaaccctggttcctttcatgggagaatgatgtttacagaccatgggcgcccatatgcccattgctagtaggtgccggtgcttctatgccctctagtggtcagagctgggaaataacacacccacactagtgtactgttacccacatttcacaaattaggtaaatgaggcacagaaaagttaggcaacttgaccaacatcacagagaaaataggtagtggaactgggaaatgaaaataatgacagatgcaccacaagttctaacaagcaaaagtagctttttcacacatccacatcagcagaaagccacaagcccaatattccggcgtagacactctttgaaaaccagaattccacagcaataaccacgatgacaaccaccatgtactcaacacccgcctgggcacggggctcccacagcagctcacttattcccaacaactctgcaaggaggattttaccatcctccttttacaaatcagggaatcaaggatcatagaagccacgtgacttgtccaagtcaacatagttaagtgacagaaccattagctgtccccaggtacatctggacataaagttcatgtttatgccactgtgtcagcatttccaaaaactgattttaggcgaaacgtaagtaagctttttaaaaactttaatacttatgcgtttattttaatatacattgagaaaacatttaagcacacatcaaatctgtaatttcatggacaatattgcataagacaaggatgttttgtctccaactcctggcctcaagccatcctcccaccatagcctctcgagtagctgggatcacagatctgagccaccgatccctgctaggacaggatgttttgtaaactaaatttatttagaaaaaaggatgaaatatataataataaaggtggtacaagctagagagaaaatcataaagtcagcctagaaatgtctggtgtctggatgacataaagctacagcactgtgaagcctcattctcagttactcccaggaaattagagtcacataatgctgcagaaagaacagctcagaatcttagatccgggctttagccctagatatatccatttgtaggaccccagacatctctgtgacctccttgctgggagtaaatccaaccttcccagacatgtgagaacagtaagaagaccctgcacacacaaaggagtttctccgtcacagagaaaataacaccaggttcagggaccccagggactctgcatggtgctgacagacccaaggccaaggcagagcagaggtccacgctggggagggagggtcatcctgttatgaaacagggatccaagtaagccttgcttctcagagcctggtctggggaactcaaatgtagacagaagggagaaaggaagaagagaaaatgaggcaaaactgagaggggaggggacagagaggtgacctgggcagagcttcacccatgaccctggaaagtgctcctgccctgggaggaggctcagcatggaaagaggaaggacagcagagcctaagtcacagtagccctgactacagcattcctggagcccaggctcttttccacagaggaggaaagagcaggcagcagagaccatggggcccccctcagcctctccccacagagaatgcatcccctggcaggggcttctgctcacaggtgagtggaggattcctgggagtgggcaagaggagggatcacagagaatggctggggtctcctggggaggatggggctctgataggggacagaaggcttctgctgaagcctcaggggagagaacatcagagagggacacgggtcacaacaagacaatcacattgaactgggattgataagagggaggaaaatccattgatcatgttttccaagttaatcattactggccactacaattagaaaatgataagaataagaattacatcagggtgatactttaaataaaaatataaccagggcactaaaacctgtctttgaccaccaaccacaagttgcaaaataaccaccactccttaactcatccaccagtatttgcaatcaaattttaggcactggcgtacaacaaatatcagacaagtctctgtgttcaaagagcttacactcttgcagagatgaagatagacacccaaagagatctagaatgtgagttcaggtgttgacaagagccctggagggaacagagcagaaaaaggtcagaaagggaagacccagggtctctagaggaggtgtcaggggagggatctcccaaggatgccctgatgtgagcaggatctgagggcagtggggagggagccatgcagacccctggggaaggggattccacacaggaaaatgccaaggttagaggtgctgaagaaagaaaggtcacgttactgaccttgaccaagtgggacacacatacactctccaaggctgaagggtgaagagactctctcaggacccagggccccatctttccatcccaatacatgggtcccaatattgactgatgctttctccctcctagcctcacttctaaacttctggaacccgcccaccactgccaagctcactattgaatccatgccgc

SEQ ID NO: 8003 - DNA, 6000 bp, Homo sapiens
taaactggtttggccaatatctcccaggattcccctgtccaaattattcctgggatctgacccatttcctggaaaggggcgagcctgggttttgaagttcaaactagagtttaaatcacaactctgcccctaatcccacgtaaccctgtgcaccttatcctctgagccttcgtctcctcgtgtgtaagcctgctaactcctgagagactggacaagatgccgtggagagccttggctctgagtagctctgctgctggacagttcagttggcagtccccaaacgtaaggcgtaagagtttaagaagtatcggccaggcacagtggctcacacctgtaatctcaacactttgggaggccgagacgggctgatcacctgaggttgggagcttgagaacagcctgaccaacatggagaaaccctgtctctaaaaataccaaaattagttgggcatggtggcgcgcacctgtaatcccagctactcaggaggctgaggcagaagaatcgctcgaaccccggaggcggaggttgcagtgggttgagatcgagcaattgcaatccagcctgggcaacagagcgagactccatttcaaaaaaagaatcaataaaaatgttaaaagcaccgttgtttacactcagcaactctgtgaagtaagtgccgaaaagtgctttggaggtaggtaaagtaagccataggctgggtaacttgccagatatcccacagctggagccatcatatgaacccaagcaacccagctgcatcctggacctagccactccaagggctctgtgcctcagaaaagaggcccaaagggttgcactctagctgcaggccagtcactccccattctgggctctagtttcctcttttggccattaatgaaaacatttcccagagctgacatgagaactcaatgccaagcgtccggtttgcacagcagcaggcattgcgcttcccaggtaggaagcaaggtctaggtgtcccgagcaggcctgcaatcccgcagccgcgccgctccagccactggggagcagtagagggcctagaaagaagctcagccaccgaaggctcttgaaggtgaattcctagggcttccaggtctggagccaggcttattcctgggagggggttgtaacggggaattgaagtgcagaggggctagtgaccccagcagaacacctggggtcctggttcccagggctacagaactgtcctagatactgtgccaaatgcactgcagaatattcttgcagtcttatcaagtggggggtttgtacccatgttataggagaaaaaactgagtttcagatgaccagtcagttggcagagctgagttgtaaaagaatcctggactcttgaggcccaggctcttctgcgtggatgggaattgcccttttcccatctcctgggttcacgccattctgcctcagcctccccagcagctgggactacaggcacacgccgccatgcccggctaatttttgtatttttagtagagacggggtttcactgtgttagccaggatggttttgatctcctgaccttctgatccgcccgcctcagcctcccaaagtgttgggattacaggcgtgagccaccgcgcccagctggcaattgcacttttttaaaattctgcactctaggaggcagaggtgggcagatcacttgaggtcaagagtttgagaccttggcctggagtggtggctcacacctgtaatcccaacacttggagaggccgaggcaggtggatcacctgaggtcagaagttcgagaccagcctggccaacatgatggaaccctgtctctactaaaaaatacaaaaattagctggacgtggaggcaggagaatcgcttgaatgcaggaagtggaggtcacagtgagccaagattgcaccattgtactccagtctgggcgacaagagtgaaacaccgtctcaaaaaaaaaaaaaaaaaagagtttgagaccagcctggccaacatggtgaaaccctgtgtctatgaaaaaaaaaattggctgggcatggtggtgcacacctgtaattccagctacttgggaggctgagacaggagaacagcttgaacccaggaggtggaggctgcagtgagccaagattgtgccgccactgcacttcagcctgggcaacagagcaagactccatctcaaaaaacaaaatctgaaatacttcaggcatgcaagtatttagcattcagtattcataatgtaagaaaaacctatgaagcacaacccagtttaagtaacacaggcagggcagggtgcagtgcctataatcccagcacttcgggaggccaagctgggagaatcacttgaggtcaggacttccaggccagcctgggcaacacagtgagaccctgtctttacaaaaaatttaaaaaataggcccagtgcggtggatcatgcctgtaatcccagcactttgggaggccgaggcgagtggatcatcaggtcaggagattgagaccatcctggctaacacggtgaaaccccatctctactaaaaaaatacaaaaaattagccggtcatggtggcatctgcttgtagtcccagctactcaggaggctgaggcaggagaatcacttgaacccgggaggcggaggttgcagtgagccaagatcacaccatcgcactccagcctgggctacacagcgagactctgtctcaaaagaaaaaaaaaattaaaaatagccaggcatggtgtgtgcacctgtaatcccagctacttgggaagctgaggcaagagaatcacttgagcccaggagtttgacgttatgattatgccactggacaccagccttggtgacagagagaggccctatctctaaaaaagaaaaaaaaaaaagtggccagccacggtggctcccgcctgtaatcccagcactttgggaggctgaggtgggtggattacctgaggtcaggagtgtgagaccagcctgcccaacatggtgaaacctggtctctactaaaaatacaaaaatatagccaggcgtggtggtggccgcctgtaatcccagctactgaggaggctgaggcaggagaatcacttgaacctgggaggcagaggttgcagtgagccaagatcacgccactgcacttcagcctgggtgacaaagcgagactccgtctcaaaaaaaaaaaaaaaaaaaaagtaacacaggaaataaaaccaagacaagatgagctctctgtgtctctgtgtgtccctccccagacccaaccctggcgtcccccagaggtaacccctcccaggaactgggcgtttgccactcccctgcacgggtctacacctctgctacaaacgtgtgtccctaagcagcggacgccttttgaaaacaagtcaactgtatcatgctacgatattttttctgatgtttgtgctgtttctgagacggccttatgacaccttcccctattctgtagcattctgttggctcactttgccacagtgtatgcacccattctcccacaaatggacttttcatttgcttctcaatgtttgctaccaaaaatctccctgcaataaatttattttatatatccccttgtatgtgtgtgagggtcccctaactgctcacaaatatctcagcaactccgccctccccactcagacctcatttccctcctaccagacatgctcaaaggaaactgggagcaacacaaagatgactttgaatctctgtccaccacccctagactgtatgacacccgcaagtgacaacctcccctctctggcctcggtttccccctctgtaaaatgggggatggcctaccttgccagtcatggcaggtcaatataaaacaacttctggctgtgcacagtggcacatgcctgtaatcccagcactttgggaagctgaggcaggaggattgcttgaggccaggagttcaagaccagcctgggcaatatagcaagatcccatccctcttaaaaaaaaaaaagaagaaaaatatatgttgttgttgttattattgttattattagagacagagtttcgcttttgtcacccaggctggagtgcaatggtgtgatctcagctcactgcaacctccacctcctgggttcaactgattctcctgcctcagcctcctgagtagctggaataataggcatgtgccacaacatctggctaattttgtatttttagtagagatggggtttcgccatgttggccaggctggtctcaaactcgacctcaggtgattctcctgtctcagcctcccaaagggctgggattacaggcataagccaccatagctggcctgtttttttaaaaaaagaattccagtaaagagctgatcatggttctcactccttgaataccaggaacaccatctcgtatcacataatgagacagggagacattctggtcctcatctcacagatgaaaaatgtcaagcttcgaaggatcaaagtgcccacctagtcacacgggtagtcagccacaggtcagcctgccttatttattcttcatgagtatttatagtgactaacatttactgggcgcctactgtgggccatttctgtgcatgtgacaacccctttaagtccttgtttctaatcccaagaagcaaggaaatggggtcagggaagggacaaggtttgcccaagtccaggcagggggagaggtcaagctcagaaccatcacctgcccatgacacatgcccaggactcaggttccctaggcttccttccaaaggctcagcagtgacgagccagcccttgaaccagcctcttcccccacccaagcagccacctctcaggggaattgtggccaccacaggtgcagggagcagtttctctccactcacagcctgaagcatacccggcaggggctgtccccaggcccaacaagcaaagggcccagtagcgagggccactggagcccatctccggggggctgggcaggaagtagggtggggtttggggtagggatctggtaccctgggactgctgcaactcaaactaaccaacccactgggagaagatgcctgggggtccaggagtcctccaagctctgcctgccaccatcttcctcctcttcctgctgtctgctgtctacctgggtatgtggccaaagggcaggaactggcgggaggtgggggaagctgtggaggctgcagagagggcacaggcagagggaagggggctcagggaaaggggaagaggaggcagaggataggggacccagggaagatgcctatagaaatcgtatctgtgccaagatgggccaaggtggggctggagggagcccagcgaaggagaaggggcgtccacagtctcacacagggaggcaggagcaagagtcacctcccccacctcctgttccccacaggccaaaataaggaactaaagttgctcttgactgagcaccagggctgggggcaggaaggggacttaggggtagcagcattcagcgtctgtcaaggggagaaaaagctttctctgccttaaacctcaggtgcctctctctgttgggagtcccttctcagcactgggggaatgggtgtctcatggactccccctcacctgctcaaggacagctggcaggggctgtggccacgctaacccaggagttcagagaaaaaggttccccacccaaggggacactgggagcaaggattggagttcacgtctgagtcttaagcccgtgacgatgagggtgctcggcccctctccccatctcttcctccttctctcttcctcacctccctcctccacctacctccagaagaggggactggccatgtgggaggcctggctgagagctggggcttcccagaggagcccggattggacactgcagccagcctgagccgcctcgtctcactcagagacacccccagtctccaccccgctctgagccccttcaatcaccagcagcccagcccaaggactgaactcacccctgacccctaggttgacacatacaacttacagagaatgagggccaggcacagggtcacaggccagggcaggccacagac

SEQ ID NO: 8004 - DNA, 6000 bp, Homo sapiens
cgccacctccccgccaccttctctctccagtcccagagggaagagaaagtcccttgctctcagtcttccttacccatctacagaaacataatagctgcaaacataatagctgccaccccaaatggcaacagttttacaagccttactgacccttaacatttctatcctgggccagaatttctgcttttttattttttttttaatttttaatttaatttaattttttttggacacagagtattgctctgttgcccaggctggagtgcagtggtgggatctttgctcgaggcagcctccacctcctgggttcaagtgattatcctgcctcagcttcctgagtagctgggactacaggcgtgtgccaccatgcctggctaattttctgtattttagtagagatggggtttcaccatgttgcccaggctagtctcaaacttctgagctcaggcaatccacctgccttggccccccaaagtgctgggattacaggcgtgagccaccacacccagcccagagtttctgctttcttgataagggaaaggcctattggcttttaccagggagtctcagagattaaatcagacctcctcctctaccaggtctgttggctgcttagaagtagcagtttttcttggttcctttttttttttgagacggagtctcactctgtcgccaagctggagtgcagtggcgtgatcttggctcactgcaacctccgcctcccaggttcaagcgattctcctgcctcagccccccgagtagctgggactacaggcacgtaccaccaccccccgctaatttttgtatttttagtagagacagggtttcaccatgttggccaggatggtcttgatctcttaaccttgtgatctgcccaccttggccttccagagtgctgggatcacaggcgtgagccaccacccccggccggttcttttttttaatgtatttatttttaagacagggtctggctctttcacccaggctagagtgcagtggtgcaatctcagctcattgcaacctctgcctccctggtttccatcatcctcccacctcagcctcctgagtagctgagactacaagcatgtgctatcatacctggctaattttttttttagagatggggttttaaccatgttgcccaggctagtcttgaactcctgagctcaagcaatccactcaccttggcttctcaaagtgttgggattctaggcgtgagccaccgtgcctggttgggcttttgggtttttttttttttttttttttttttgatacagggcttactctgtcacccaggctagagtataatggcgcaatcatagttcactgcagccttgaactcctgagctcaagtgatcctcctgcctcagcctcctgagtaactgtaactataggcacacaccaccatgcctggctaattttaaaaaaattttaaagacgggggtcttactatgttgcccagactggtctcgaactcctgggctcaagcggcactcctgcctcagcctcctgaagcactgggattacaggcatgagtcactgcgtctgttttctcttggttctaatagtgattgcagtaataactagaatgccaggagcgcctgccacagagctggatgctgtgctgtgtagacagtggtgacagcatagatatgaaaggctttgcaagactgtgctggggcctcagtggggtacagacttaagaggaagacagattcagagacattaaatgtcctagctgggcacagtggctcatgccagcactttgagaggctgaggcgggcagatcacttaaggtcaggagttcgagaccagcctggccaacatggtgaaaccccttctctactaaaaatacaaaaattagttgggtgtggtggcggacacctgtaatcccaactactcgggaggctgaggcaggagaatcgcttgaacccgggaggcagaggttgcagtgagccgatatcacaccactgcactccagcctgggcaacagagcgagactctgtctcaaaaaaaaaaaaaaaaaaaaaagtctcaccccagatcaggtggtcagttaggcttggtgcctggagtgaccctggtctgatctcagaacttgagtggtttccactaagccacaggaatcatagccgttatctatccagccacacattcattcagcacacagtcattgagcacctagtatatggcaagcaccgtgcaggttgctggggacacagtagggaacaaagcaggcaaatgttctgtctttaggagtttgcattctcatggaggcatcagaaatgaacaaacaagtcagatgctcgtgtgttagacagcgaggagcgctaaggaaagttaagtaggaagcgggggctagggctgttggggagtgggaatggtagacgcaggacacagtggccagggaaggcctaggtgagaaggaggctcttgagcaaagatctgaaggaggcaagggggcttgacaagctgacaagtgacaggagaaccatgcaggcagagggtccgccagtgcaaaggccccagggtgggagggcgcctggcacagtatagaagaagcatccaggcaggcaggcgaggctggctgaccctgcgccgagtgccatgcacatgatctcagtggtcctgtgagcgagccgtggttactccctgtgtgcagagctcatgggttaagtctgtgtgctcaggctcagtgaggttaagtcactagtccaaggccacacagctaacaaggaggtagagccagaatgcagccgcgttcttcactgctgtgcctcagagtgccagaggcctcagtatcagggtgctcaggtcactagggtggcaccaggggcagcagtgctggagtgccaggtcctggcaaggtctacactgtggcagagaaggtccggggggtcacagggaagtgactggggcagtgggggtgaggcccagggcaatggctacttagcagtgggtatagagtattcgtcactgctgcttgggggacaggctggcaccgcactcagccctgatggtcaccgcctctaaccctgcccgcagtgcgccaagtgccgggaatcatttcacgggagtccgctgggcggccagcagtgctaccgcctcatctcggtggagcaggagtgctgcctggaccccacgtcccagaccaactgcttccatgagcccaaacgccgggcgctaggccccggccgcactgtcctctttggcgtgcagcccaaattcaccaacgtggacatccgcctgacgctggacgtgaccttcggggccgtggacctctatgtctccacctcctatgacaccttcgtggtccgtgtggcccctgacactggcgtccatactgtacacatccagccacccccagccccaccacctccaccaccccctgcagatggtgggccccggggggctggggatccaggaggagcaggggccagcagtgggccgggcgccccagcagagccacgggtacgggaggtatggccgcggggcctgattacctacgtgacggtgacggagccgtcggcagtgctggtggtccgcggcgtgcgggaccggctggtcatcacctacccacacgagcaccatgccctcaagtcgagccgcttctacctgctgctgctgggcgtgggagacccaagtgggcccggcgccaacggctcagccgactcgcagggcctgctcttcttccggcaggaccaggcccacattgacctgtttgtcttcttctccgtcttcttctcctgcttcttcctcttcctctcactctgtgtgctcctctggaaggccaagcaggctctggaccagcggcaggagcagcgccggcacttgcaggagatgaccaagatggccagccgccccttcgccaaggtcaccgtctgcttcccacctgaccctactgccccggcctccgcctggaagccggctgggctcccacctcccgccttccgccgctctgagcccttcctggcacccctgctgctgacaggggccggtgggccctggggacccatgggagggggctgctgcccaccagccatccccgccaccactgctgggctgcgagctgggcccatcactctcgagcccacagaagatggcatggctggcgtggccacactgctgctccagctgcctggcgggccccatgcacccaacggcgcctgcctggggtcagccctcgtcacactgcggcacaggctgcacgagtactgtgggggtggtgggggtgctgggggcagtgggcatgggactggtgcgggccggaagggactgttgagccaggacaacctcaccagcatgtccctctgacatgcccagggttctcatccacagcagctgggtcacctgatagggccgccctggacttggggtccctccacctgggggcccctggacactgtctacttggagaccactggcccccttcccccagggttgcccagatggggcctcctttgttctgcattcagcagctatttatcgagtacctactctgtcaggcactgtcataggcgtggggcaaagcaggaaccaagagacgaggttccctgatctcatgggacttaggttctggtgaagggagacaatcagtgcacatgcacacaccccacacgcatacacacatgaacacatgcacatgtgcacacacaagtaagatggcttcagagagggagaagcactgtgaggcctccagaggatgtggcagtgagggacgatggggtgaagtcagctgggcattcaaagaagctagactgagaacgcctgagaagaaccagctacgggaagagctttgggaagcaaaggcagaggccctggggtgggagcaggcttgttttattggaaggaccagaaaactggtaagtgtgacccagatcaagtgtgaggagatgaggctggggatagtcaggggctggatcacccagggccttgtgggccccacatagggttttgggttttattctcagggcaatgggaagctgttggatggtttgatgaaggggagtgacaggatccgatgtacctatttaagaatttaagagggtcgggtgcggtggctcatgcctataatcctagcactttgagaggccaaggtgggctgatcacaaggtcaagagttcgtgaccagcctggccaatatggtgaaaccccatgtctactaaaaatacaaaaattagctgggcatggtggcacacacttgtagtccgagctactcgggaggctgaggcagaagaatcgcttgaacccaggaggcggaggttgcagtgagctcagattgcgtcactgcactccaacctgggtgacagagcgagactccacctcaaaaaaaaaaaaaaaatttaagaggtcactcagttgtgctgtggagaatggaccggagggacaagaggggcagcagggatggtgggctggagtagggtgctggcaatgagggagtctggctcagatgtgggatgtgtatggaagaatataaatgatggtgtggatgtcagggtgagggaggagacaaaaccacgatgacccctagctttgtggcctgaactgtgggtggctgaggggatcgttaattgaatggggcagactgaggcttgtgaggaagatcagagtctggttcttgacatgagatgcccttcagacatctcttcactcaggtccaactagggatacagaaacactgaatatttcaacagcagaaattgaatggggggattgatagcgctggcgagggaagcagctggaaagagacagatggcaccctgagacagcccagaggtgaataggacccccaggctgcagggataaagctcagtggtggtgttacctcaccggggaccagggtcacacagcaaagctggaacaacagaggcgtgttgtgggggagcctcagaggggacaaaacctctgcctgagatcccaccccaggtgggcatgggggccactgaggttggggatgaaaatgccggtaccgtcagtgcacagccctgttccagacagtgc

SEQ ID NO: 8005 - DNA, 6000 bp, Homo sapiens
gatcaggagttcgagaccagcctggccaacatggtgaaacctcgtctctgctagaaatacaaaaataagccgggcgtggtggcgtgcgcctatagtcccagctactcgggaggctgaggcaagagaatcgcttgaacctgggaggtggaggttgcagtgagctgagatcgtgccactgcactccagacttgggcgacagagtgagaatctgtcaggtggattctgagggtactctgaccccacgaacccagcatgaaatcttccaggcattaaggaacattgaggatgtggaggattggaaatccctccagggaaaatacacttctcttgagcagggtcacgaggggtgggggcaatgtgggaggtggggcaaatccaaagacaaggtcaacagcaataataataataacaatgacaggcatttgttgcttgttggctgggcctcttgcatacagttctcccaacatccctgtgaggtggtgatgcttatccccattctccaggggaggaggctgaggcccagagaggtgaagtcgtgtgccacaaaataccccagccatatggtggtagaaccaagttttcagccagactcaccagctcacagcagagctgccctggactctacagccattcagtgtatagctgggccactccatcattcaaggcagttcaacgtcaagattcctgatttgcctcaacctggggcctctagaagataccatcacccccaacaagctgaagacgtgtgtccggaacactcagacacacacaaagtgctatggatacaccacaccccgacctagctgtctcttcctgatggacctcactgggtagaaatgcctggcaccgctgcctcagatccctaggtcagctctcactccccaatagaagtttctgagatgatgatgaaaacgttctccatctgtgctgtccaatggagtagccactgatcacttgaggctagtgagcacttgaaggtggctagtttgaggaactgcattttttaatgcatttaattttagttactttgaatatatatacacatatatacatttatatatacatattcatacacatacattttacatatattttatatgtatatgtaatatatatataaattatatatgtatatatttttatatataaatatatattatatatttataaatatataaatatataatatatattatatagatatataaatataaatatatattatatatataaatatataatatatattatataaatatatataaattatatatttatatatataatatataaattatataaattatatatatttatatataatatataaatatatataaattatataatttatatattatatataaattatatattttatatataatatatacaatatatataaattatatataatatataaatatatataaattatatataatatataaaatatatataaattatatataatatataaaatatatataaattatataaatctatataaatatatactatattataaatatagtatatatttatatatatttatataatatatttatatagtatatattatatatttatatgtttatgtatatataaatatataatatataaatatatttatatattatatatttatataatattttatataatatgttatatatttttatataatatattatatatatttatatgctatattatatagtatattatatataatatattttatatattatatatatatttatataatatttatatattatatttatataatatgtttatatattattatatttatataatatgtttatatattattatatttatataatatgtttatatattattatatttatataatatgtttataatatatataatatatttatataatatgtttatatattatatatataatatatttatataatatgtttatatattatatatataatatatttatatattattatatatattttataatatataatatatataatataatatatatattatatatattatatatattatatattagttataatataaatatataatatatgtatataattatataattatatacatattatatatgtatataattatataattatatacacatattatatatgtatataattatataattatatacacatattatatatgtatataattatataattatatacatatattatatattataatatattatatattatattatatattataatatgtatatataaatataatatataatataatataatataatatatataatataatatataattatatataatatatattatatataaaataatatatatatattcagtttttttttttggagatggagtcttgctctgttgcccaggccggagtgcagtggcacaatcttggctcactataacctccacctcccaggttcaagtgattctcctgcctcagcctcccgagtagctgggattacaggcatgcgccaccacggccagctaatgtttgcatttttagtagagacagggtttcatcatgttgcccgggctggtcttgaactcctgacctcaagtgatctgcctgcctctgcctcccaaagtgctaggactacaggcatgagccaccacgcctggcctattcagtatatttttttgagacatggtctcactctgtcacccaggctggagtgcagtgtcatgatcaaagttcactgcagccttgacctcccaggttcaacaatcctcctgcctcagccttctgagtaactggaactatagttgaaagccaccaagcctacctaattttttaaatttgttttgtgtaaagttggggtcctactatgttgcccagcctggtctccaattcctaggctcaagcaatcttcccacctcagcctctcagaggggtaggattacaagtgtgggtcacctgtgcctccctaaatttatatttaaatagccacatatgactaatagctatgatattaaacagcataacactagaccctccattatccaagctctgttgatccaaccaacagagcacatttgatctctcctacctcccagcctcacacacacaggccccacaccctccttcctggctccactcacccaagatattgcaacctcctcaatacaccttgatgactatctcagcctccacatccttgcattgctatttatgctgcctggtgcacctcatgctgcctcaccccatcatctgcctcatttctactcttactccaggtctcagctcagatgccccctcccccaggaagccctccctagccgtcaggttgaatgaggtgtgtctccttgggctctcccagactcctgggctcctccatcccagccctgatcactctggatcataattgtgtgagaggggtctgcccccccaaaccctacaggattgtgtgccctactgtggacagagggcagagcagaggtggtctcaatcatcactgtgtcaccaacatcacccagcacacacaactgggcactgggaatgtgtgctggaatgaatggaggatgctttttaaaaactaggctaagccaggtatggtgagtcacatctgtaatcccagtactttgggaggctaaggtgggaggatcacttgagcccaggagttcaacaccagcctggggcaacatagtgagatcccatctctacaaaacatataaaaattgaccagggatggtagcacacaactgtggtcccagctactcaggaggctgagacgggaggattgcttgagcccaggagttggaggctgcagtgagcaatgatcatgcaactatactccagcctgggcaacagagcgagaccctgtcttaaaaaaaaaaaaaaagaataacacacttggaataaacatgatccaaaaaagtacaaaacatacactctggggctgggtgcagtggctcatgcctatactcctagtactttgggaggccgaggcaggaggatcatctgaggtcaggagtttgagaccagcctggccaacatggcaaaaccccatctctactaaaaatacaaaaattagccaggcatggtgacgcatgcctgtaatcccagctactcagaaggctgaggcagaagaatcacttgaacctgggaggcggaggttgcagtaaactgagattgtgccactgtactccagcctgggtgacacagcatctaaaaaagaaaccaatccaaaaactacaaaatattcttgcaattataggtgacatatttaaatggtaagacaaccaatgttcatgaatggaaagacagagcaagaccctgtctcaagaaaaaaaaaaaaaaaaaaaaaaaaaaaaaacaggctgagcgcggtggctcacacctgtaatcccagcactttgggaggccaaggtgggcagatcacctgaggtcaggagttcaagaccagcctgaccaacatggagaaaccctgtctctactaaaactacaaaagtagccgggcgtggtggcgcatgcctgcatttccagctactccctgaggtgggaggatcgcttgaacccaggtggcagaggttgcggtgaactgagattgcgccattgcactccagcctgggcaacaagagcgaaactccatctcaaaagaaaaaaaaagaaaaacacgaggctaagagcttttttttttttttgagacgaagtctcgctctgtcacccaggctggaatgcagtggcgcgatctcggctccctgcaacccctgcctcccaagttcaagtgattctcctgcctcagcctctccagttgctgggattacaggtgcccaccaccacgcctgactaacttttgtatttttagtagagacagggtttcaccatgttggccaggctggtctcaaattcctcacctcgtgatctacccaccttggcctcccaaaatgctgggattacaggcgtgagccaccgcacccagcctgcctcagagccttcaagtgagtcagccacaggtgaaatcccacctctgtctattggcagacttgcctcttttcctgggcctctgtttccacatctgtgcaatgggaacagttatttatggtggctgctgaatgaggcagtgtgtgtttgaacaaacccaggggaattgttcaaacagaggctgttatgactattgctacagtgactgctgttgtagtcacgctgagtgagaaaaagaggttgaagagggtcaggggaggagtcctgggaagttccccagtcaccctgaaaaactggttcaacctctgtctgtgctcccatcccagggagtataggtggagcctccagagcccatggacagggcatgctggggctgggccagccccagcggtgtctctaaggcacccctgggatccccactgagctggcctacttcagacagccagggcccacccctctggcccccttagtgtccagctcgtggccccttggcatttccacaagacgccaagatggagattcccatggggacccagggctgcttctcaaagagcctcctgctctcaggtaaggaggaaatagaccctaaaggccaaggggagaaatggggactcagcccagagattgaagtttcctcttagaagtagggaaagattacctgagaggatgaaattagaataagatgggggaggggcaacagaatcacagcctcattgccattttatctatggaattttctataatgttaggaccatgaaggcaggaatttatgtatgtttggttccctgctatatctccagtgtctagaaattgaaggaagtttagatgtattacatatagttggtattatagcttatatattacatatgcctataagtattggttgaataaatgaatgaatgaatgaattcagagagtccatgtgtttagaagcaggccacacagcatctcaaggtagaaaaacctctggatcaacaggatggcaaatctgtggtaaccatgcctgtgttcccactcctgcacccagggcag

SEQ ID NO: 8006 - DNA, 6000 bp, Homo sapiens
aatcagtgatgcttgccacagggcggctgggggtgctggacaagtgggcatctctctgtggtctcagggcctcccccaccatatagtctctgcactggccagcttgggcttccccacagcatggctgcctcaaggtagtcaaactttatatggccgctgaagacccaggcagaagctgcatggccttttctagctcattttgggagttccgcaacttcacttcagctgaattctgttggttgtatgcaagtcaccaaactgcacagatttgagaggagggtgccatagaccccagctcttgatggaaagagtatcaagctctcattgtggaaacacacatgggatgaaagacactgtcacaacatggcaaaaccccattcctacaaaaaaaaaaaaattaactaggagtggtggtgcacacctgtactcacagctacccaggaggctgaggtgagaggatcacttgagccctggaggacgaggctgcagtgagccatgatcatgccattgcactccaacctgggtgacagagcaagaccctgtctcaaaaagaaaaaagaaagagattgttgtagccgtctttggaaaacagaatctgtcccagctgccatgcatggctggaagaggtggccaattcctgatattcaaaagtgtggaaggatttgccaagcttaagtcaccttagctccaacagatgcaggaaagcaaacatccattcttgttggcttcaagagtgggcaacagaggctttcagacagtaggaatttccttaaatgtgggaaggagctgcagatgctaggtaatccttcccgcaaaatatgtactatagcccgctcctttggttttttttgttgtgttttgttttttagacaaggtctcactctttcacccaggctggagtgtagtagcacgatcttggctcattgcagccttgatctccccagttcaagcgatcctcccacctcagcctcctgagtagctgggactacgagcacaaaccaccaccacccccggttaatatgtattttttgtagatacagggttttgccatgttgcccaggctggtcccaaattcctgggctcaagcgatccacctgcctcagcctcccaaagtgctgggattgtaggtatgagccaccacagctggctttgaatgttcaatatcaataggccctttgcagaagttcttatcgaaactttccccgcacaaccgtctctcattgtacaatcaaaaaatgcattcacactgccacccaatacaaaaaatttcaatagttccattttccagatctgagactggaatcagggaagaaccattcccctccaaatatgtcattctccccatattccacaagctgtgagctagttgtaaagttaatcgtcacacactgtgtgaaaaataatgggaaaaaaggtcaagaaaagataagtcagccaggcactgtggcttccgcctgtaatcccaacattttgggaggctgaggctggtggatcacctgaggttaggggttcgaaaccagcctggccaacatggtgaaaccctgtctctactaaaaacacaaaattagccgggcatggtggcgcatgcctgtaatcccagctacttgggaggctgaggcaggagaattgcttgaacctgggaggcggaggttgcagtgagccaagatcacgccattgcattccagcctgggcaacaagagtgaaactctgtctcaaaaacaatgaaaaggtaagtctggccaaccgtggtggcccacacctataatcccagcactttgggaggctgaggtaggaggatcgcttgagcccagagtttcagaaaagataagccttgttagttaaaatatgtgaggatatacacctgcggccgcatggatggaattagaactttttttttttttttttttttttttgatactgagtctcgctctgtcacccaggctggggtgcaatggcatgatctcagctcactgcaacctccacctcctaggttcaagcaattctcctgcctcagcctcccgagtagctgggattacaggcacctgccacaacccctggctaatttttttattttaagtagagagggggtttcaccattttggccaggctggtctcaaactcctgacctcgggtgatccacccacctcggcctcccaaagtgctgggattgcaggcatgggccaccatgactggccatttttatatttttttgtagagacggggtttcgctatgttgcccaggctggtctcaaactcccgggctcaagcagtcctcccgcctcaggctcctaaattgctgggattacagacgtgagtccctgcggctgacctggacctcagcttttaccctaagtgagacagaagtcatgggaggaccctggggcagaagagtgacatgagttgattcacatgtaaaaggaatccttcaggctgttttgtgagaataaattacaggggacaaaggcagatgatgttacaagactagtttctgcaagtctgcaagggtccacggctgctgttttggtgtttctgacttttctccttcatacacatgccatagagttctcctccctcacccagaacctcagatggctaggttcttcttttttttttttttttttttgagacagaatttcactcttgttgcccaggcaacatcgtgcagtggcacgatctcagctcagtgcaacctccacctcccagattcaagcgattctcctgccttagcctcctgagtagctgagattacaggcatgtgccaccacgcccagctaattttgtatttttagtagagatgcggtttcaccatgttggtcaggctggtctcgaactcctgacctcaggtgatccacccacctcggcctcctaaagtgctgggattacaggcatgagccacagcgcccagcctcagctggctgggttcttgagggaggtggaagtgggcgatggctgctgagagggcatgtaccagggtccagcccaaacagaaggtgcacaggctggggacagaagagctagggtatgggtgtcggtgctcacagtgtgtgagcttgacagcacctgggactgtcttggagtgccgccgcattccccatgagtgagtttgtattgtatatcctgggatgctccagtctggatggaatctgcacgtgagtttgtgtgccttgcaaacaaaccttccctgagcacctgcactgtgtctggtcttgtgctgggcggggtgcccaggggaggagcccttagctcaccacagtgatcaagacatccctggccctgccctcacaggctcacagtccactgagggagacagacctatccccagccagggacccccagagtgtgccgggctcaggtgggggagcccagagggggaacctgacccagccagggaaggcagaggggacttcctggaggaggggatggtacagttaatcctaaaaggtctttcccaatgtaacagttgctctgtaggatggatgcagtggctcatgcctgtaatcccagcactttggaaggcaggaggatcacttgagcccaagagttggagaccagcctgggcaacatagtaataccctgtttctattaccaaaaaaatacaaaaattagctggacatggtaacacaagcctatagtcccagctacttgggaggctgaagtggaaggattgcttgagcccaggcggttgaggtttgaatgagctatgattgcgcccactgcattcccggctgggcaacagagcgagaccctgtcaaaaacaaaacaaacaaacaaaaaaaacgttggtctcctgtatgaccaatggataaagtaaccttgaccagtctaataactcccaggctgacctgtaatccaagccttctctgtatgtctgagcaggcaaagcccagctccagggctacctcaacccccaggctgatcagaagcttgggtaacctctcccagtgtggccagcgaccccccaccctcccacgttctgaccactgtcctgggcaactagtgacatctagtgggggattttgtcccagtctgacctggcctgtaggggccttgggcagtcggacctgtgacccacgcttcctagcagtggctggactcctcccccttcccgcaggtgccctggcctcttcccctgccctcctcacctgctctggccagtctgactcctcccttccccacaaggttgggagggaatgaaggagagagcgggaaggaggaagggagggtggcattcctgggattccctggatagggggaagagtgggagggccttccatgggtgagcaagcagagagggcaccccgtaccccacccccagccccatcatcgaagcggcctaggaggacctggatttgaagaccattgaaaataagagattaaaccggttgattccaggctactggtcagacgaggaaagcagcccagagcactgaccacaggggaaaacatctccgggcatactgggagcagctgctgggggccactggtcaggctgcgggggtcactggttggactgggagaggccagtgcaggccactcggacggcacgcttggggccattagttacactgggagaggccatcgcaggccacaggttgcagtggggtcctctggttaaaatcgacgatgccagcccaggctgctggtcacagtggggacgagtccccaaggcccctggtcagaataacgaggagaaggtccgcgattgcctggtgagatcccagctcgggtcactggctacgctggtcgatcaggccccccgctgcaggcgctggtcagtaagcccggacagctctaggcttgggggcggacgagccccgagcctggccccgtgcactgggaggtccgctccgggcagtgggaggtcctggccccgcgcccgggcatcgggggacgaggggggcctggagggcggggcggggcggggctgccgggggcggggcctctggctcccagccccgcagcggccgagctgcagcccgggctcagtctccgccgccgccgtgaacatggagcccccggacgcaccggcccaggcgcgcggggccccgcggctgctgttgctcgcagtcctgctggcggcgcacccaggtatggctcgggctgagggcaaggtgggactggggagaggcccctggggaccccgggaaagcgaggagaaagggctttaccctgaccccaggaagcaaaatgtggggaccccaaggaggagggatatgggagtgttggaaggtacgccttccagtgagagagatctggggacagccaggcaggagagctggggatacccaggcggtggatcagagacaaccagagaagtcagcccccttcccactcagcaccctggaatctgggtcccacctgcctcctccctcagaccctggaatctgggcccccagcccctctttcctcagacccaggagtccaggcctccagtggctagaatagcttcccccagggcacagaggatcaaaaccccagggctctctccctcaaaggtcctcaagttttgagaggtccagggaccccttagagaagcgaggaccatgtgtccccacaccagcgatccacatgtatttaggagtttccagagtccagtataaagaacccgcctccctcaggaaagggctggagcaccagccccgggcagtgacagtggaacaaagtgtttccaagtgacaggcccccttcctggggcctcagctacatttacacacctgcatgaggatagaaggagaggaggccgggggctggggggtgggggtgggggtgctggggacagagggacagagagatgagagagattggggaagagagaggaactctctgcctccacttgtctgcagatcagacccagccttaggcaccagcctggaccccgtcacccctccctggggacaggctggggccagaggtgagcgcttgggaatccaggcccctggcacactcatggtcaacagtgggtccccaggggtagggctgggccagattgagcagagaagg

SEQ ID NO: 8007 - DNA, 6000 bp, Homo sapiens
ctaaaagtcaactccccaggcgggcgtggaacccacccagtcatttgtcaccaaacttggtgctcagcctcatgcttgtgacccaagggtgtgaaactccagcctacacctctggggcatttttttctttctttttttttttttccttttttttttggcagagccttgctgtcacccaggctggagtgcagtggcacaatcttggctcactgcaacctccacctcccgggttcaagcgattctccggcttcagtctcccaagtagctgggattataggcacccgccaccacatcctgctaatttttgtattttcagtagagacagggtttcaccacgtaggccaagctggtctcaaactcctgacctcaggtgatccatctgtctcggcctcccaaagtactgggattacaggcttgagccaccatggccagcctcctggggctttcttcctgggctcatccctgctcacaaagaacagccaggagagagctaagcccactcattcgtaggccaggagaaaggaggtgctagaggccttcctagaagaagacttcctggggactggttcttttgttcaatggataaacgggggtcccaggattttgcaaagcaagttagtagcaaggctggcactaaaacccagaggtcctggtccacaaacctggcctcagattggggagagaaggtcagagagatctaaagcacatttattgccaggcgcgatggctcacacctgtaatcccagcactttgggaggctgaggtgagaggatcacttgagggcaggagttcaagaccagcctgggcaacaaagcgagaatcaaattctacaaaacatttaaaaatgcaccgagcagccgggcacagtggctcacgcctgtaatcccagcactttgggaggccgaggcaggtggagcacgaggtcaggagatcgagaccatcctggctaagaccatgaaacctcgtctctactaaaaatacaaaaaatcagctgggcgtggtggcaggcacctgtagtcccagctactcgagaggctgaggcaggagaatggcatgaacctgggaggcggagcttgcactgagccaagatcgcgccactgcactccagcctgggcgacagagcagagactgtctcaaaaaaaaaaaatgcaccgagcatagtggcacatgcctgtagtcccagctactcaggaggctgaggcagaggatcccttgggctgggaagtttgaggttagagggagccaagatctgcactccaacctgggcgacaaagcacaaccctgcctcaaaattaaatacataaataaattaagcacatttatttattttactgttttattttattattatatatattttaagagacggggctctaccatgttgccaggcgtgtcttgaacccctaaattcaagtgatctgccagccttggcctcccaaagtgctgggattgcagacatgagccactgcgcaaggcctatttgtgtatttatttattttagagacaaaatctctctgtctcccaggctggagtgcagtggctcaatcacagctcactgcagcctcaacctccctgggctcaggtgatcctcccacctcggcctcccgagtagctgtagctgctatgcatttattatgtgtgcgcctatttgtccagccatcctcacacccagtttgtgccaagcctgagacacaagctatctggagctcacatggcatggaggttaaaagcacagactggccgggtgcagtagctcacccctgtaatcccagcactttgggaggctaatgcaggcagatcacaaggtcaggagttcgagaccagcctgaccaacatggtgaaagcccgtcactactaaaaatacaaaaattagccgggcgtggtggtgcgtgcctgtaatcccagctactcaggaggctgaggcaggagaatcactcaaacctggggggcggaggttgcagcgagccgagattgattgcgccactgcactccagccttggcaacagagccagactccgtctcaaaaacaaaaagagcacagaccatccgggcccaaaagaagcacccggcctgctatgtgtctttgctgggtggcttggggcaaacaaccaccctgtgcctcagtttacttttcagtgaaatggggatcaccatggtgtccccttcatgggatccctgtgaggaactaactaagagaaataaggtgcttagaagagtcagctctggctctgccattttgtttatttttatttatttttaatttctattttattttatgtttttcagactgagtctcactctgttgcccaggctggagtgcagtggtgcgatctcggctcactgcaacctccaactcccgggttcaagcgattctcctgcctcagcctcccaagtagagacagggtttcaccatgtcggccaggctggtctcgaactcctgaactcaagtgatccacccgcctcagcctcccaaagtgctgggattacaggcgtcagccagggcgccccgccctggctctgccattttgtaactcagtgagtcacttcatctctctgcttcagtttccctatcgcccatggcgctgcatggcttacatgagataatattcgcagtgcacttagatcagtgcctggcacacggtaagtgctgactacatgtattaacagtatcgtaagtgccgggcgcggtggctcacacctgcaatcccagcattttgggaggctgaagcgggtggatcaggaggtcaggagtttgagaccagcctgaccaacatggtgaaaccccgtctctactaaaaatacaaaaattagccgggcgtggtggcgcgcgcctgtaatcccagctactcaggaggctgactcaggagaatcgcttgaacccaggaggcagaggttgcagtgagccgagatcgcgccactgccctccagcctgggcgacagagcgagactccgtctcaaagaaaaaaaaaaaaaaaggatcataactaagactcgaatgcggagggataacagcctctgctacttgaaacctagtccttctggggaggaaagcccaggtgtgtggcaggtggaagggagggcgagcctaggtggtcctcttgctagggcaagaagcccccaagcacctgcccccagctgagcagctccgcgcctcctggccctggacgaacttgggcccagactggcgctccgtggcaccccctcccccggcctcccgcttcgcgccctcatcccgccccccggcgcggcctcaccagctccccctgggcagcccaaagaatgcgaagaggtaggtgggggtagggaggagggcgagccgctgggagagacaaagggcccgagtctgagcgagagacacaaagacgcgaggaggctggggagataggggaagtgggacaaggacgcggggagtgaccaggtccggaggccggactggagcccagccccacccagcccggccgggccagcgcagcgcgggggccggtctctgctgccccctggcgggtggctgcggtgagaaggcggcgcggagcaggtgttgggaggggaggaccagggcgcgcagggaggtagggagggaaggaagcagagaacagagcagggacagagagacagcgagagagactcgcacgcagagacaagagacgccgagagggagacacagagaaagagacagggacagagagacacagatagagacagagagagacacacggagagacagagacagagaagcacagagatagagaggcacagagatagagacagagaaacacagagacagagaggcacacagagacagagaggcacagagacaggccgatagagacagagatacacagaaatagagacagagacagagaggcacacagatagagacagagagacacagagacagagtcaaaggatggaaagagacatggggaccaagtgacccagaaacagtgacagacaggccgggcttggtggctcacgcctgtaatcccagcatcttgggaggccgagccgggaggatcgcttgaggccagcctcagcaacatagtgagaccccgccgcccccccgccccgtctcttttattgaaataaagaaacagtgactgacaaaggaagaccagaaacagagcgacaccgaagcatgaggacggaaagacccagagaggcagaaatacagggacagagaggaagacccaaagagagtgagagagacacaaagacacgtaagagagacagagaaatccagaaagaaacgagtgcagcgacacctagagttcggggcagagattagaaacgcacgagggtacgagaaacaggctcagggcgatgggctcgacctgcggggaggtcgcacaaccgggacgtgctgggggcagaaccgtaaagccccacgtgcctcaggcaactgtgatgagaggacccgggcaggcaggaaagggcaggattcgaactgtgggtgggacagaggccaggacggactgagctaagagaccgagagaactccggctagggcgaggggcggggctggtggaggcggggctggtgggggcggagtcggccggaagggccgaaaggggcgtggcaagaccttggcgaggcggccggtaggcagggggcggggcgtgggaactactcgggagcagagggggcgtggctagaccttagggggcgtggtttaacgccgggagcgaaggagacagaattctttggcaggggcgaccttagaatcctggggaggagcgagaatggaatcccggggaggaacaggggtggaatccggggggcggggtcagaacgccaggagggggcggggccggagccagggtcggcttgactcgggggagcagcgggtggatcctgtgacgtcagcgggttcgaaccgccggagctgagcgagaggccgggggtgccgagccgggcggggagagctgggccgggagagcagaacagggaggctagagcgcagcgggaaccggcccggagccggagccggagccccacaggcacctactaaaccgcccagccgatcggcccccacagagtggcccgcgggcctccggccgggcccagtcccctcccgggccctccatggcccgggccgctgccctcctgccgtcgagatcgccgccgacgccgctgctgtggccgctgctgctgctgctgctcctggaaaccggtgagacgagcggacggccccctgccctcgcgcggaccccctccaaccttaccttccgagctggggaagccgagcaccttccccgcccacccccggctccccgagccccctctcgcgtgcccccttcctggctggccccacagactccgaccccctacacgtccgattctctcgaggagactctgacccctcctttctgcatctctctcaccaccacccccatccttcttaatccaattgcccatcctacgcctgcttgtctgtccccctccccatttctcggattcccgcgccgaaagggttaaatcccaggaaggcctggtgccccctccccaccccgcgccgagtagttcacccggatctgggtctctgtctcctctacccctctcaggaatgtggggaatgttccccccacctaccgcagtaaggtctcgaggaagaggcgagaccacctccctcccctatttttccttcttcccggcttgggcgtctgaggcccggagagaactgaggacaagcggacctgattcgggtcccttggagggctaaggataagagttctggcgacttagggggaagggcctgagctcggagctccaaccccgaacctcagggagttgggggttctgactccgtggactccagaaaaattaggggccgggggctccgtcttcagggtccctggtagaatggaggctaggcgctaagtctaactgggatctaggtaaaactgggggcgagagaggatcaaacttgtagcttctggatttaattgtgggcagggggcttcgttttcagggttcccggcagaaccgggggacaggagactc

SEQ ID NO: 8008 - DNA, 6000 bp, Homo sapiens
gttggtgcttaatgcattgagatgtgttcaggattccatgggggaggtcaggggtgaaaaggcccaaggtcacaaggttagaatttaaagtcacttgggggctgggcacggtggctcacgcctataatcccagcactttgggaggccaaggcaggaggatcacttggggtcaggagttcgagaccagcctgtgcaacatggtgaaaccccgtctctactcaaaacacaaaaaattagttgggtgtggtggtgcgagcctgtaatcttagctacccggggcgctgaggaggaagaatcgcctgaacccaggaggccgaggttacagtgagctaagatcacaccactgcactccagcctgggcaacagagcaagattccgtctcaaaaaaataaataaaaccaaataaataaaatcacctgggccgggcatggtggctctggtctataatcccagtactttgggaggccaaggtagctggaccccttgagcctaggagctcgagaccagcgtgggcaacatgggctacccagcaacattttgcgtctacaaaaatactgaatttacctggatgtggtggcaaatgcctgtaggctgaggtgggcggattgcttaagcccaggtggttggggctgtgccactacactccagcctgggcatcagggtgagaccctatctcaaaaaaaaaaaaaaagaggaaaagtcattaggtcaatgaaaattgattatctggtcaggcatggtggctcacacctgtaatcccagcactttgggaggctgagacgggcagatcacctgacgtcaggagttccagaccaccctggctaacaaggtgaaaccccttctctactaaaaacaaaaataagccaggcatgggtgacatgctcctgtaatcccagctattcaggaggctgaagcaggagaatcgcttggacccaggaggcagaagttgcaatgagctgagaccacgccactgcactccagcctaggcaacagagcaagactccgtctcaaaaaagaaaaaggccgggtgcggttgctcacgcctgtaatcccagcactttgggaggccaaggcaggtggatcacctgaggtcaggagttccaagaccagcctggccaacatggtgaaaccctgtctctactaaaaattacaaaaattagctgggcgtggtggcgggcgcctgtaatcccagctacttgggaggctgaggcaggagaatcgcttggacccgggaggcagaggttgcagtgagcccagattgcaccattgcacaacagcctgggagacaagagcaaaactccgtctcaacaacaaaaaaaaacagaatgaaagaaaattgattatctacatttgctggatactgtgcctgaagctgggacaagacaaatcaagtcactcccctcagtggtctactggaggtcaggggtcagacactgaggttgcgctcaaggttcaaaggactgtttagagcccaaggttaagtatttgaggtcaagactgaggtgaaaggttcatggggaaagatttgcagagatcgagtgtcaaaagtgagtcccaggattaacagggtgagttgcacgagctgggctttgggttaaggaagggctgaatgaatgtcccagtgcaatatggcctcaggggacaaggagtgaggtggcatcttgttggcatggggagagagcggtcaggattttggggtcaagagcagattggtaatctgtgtcgtgcgtaggaagtgatcttgagttcctgtcctctctctacctccaggaaatgcctcgataccatgagctgcccaccttggaagaacggtcaggacccttgcaccctggagccacaagcctggggtcccccatcccggtgcctccagggccacctgctgtggaagacgtttccctggatctagaggatgaggagggggaggaggaggaagagtatctggacaagatcaaccccatctatgatgctctgtcctatagcagcccctctgattcctaccagggcaaaggctttgtcatgtcccgggccatgtatgtgtgagctgccatgcgcctggcgtctcacatctcacctgttgatcccttagctttcttgccaaggatctagtgccccctgacctctggccaggccactgtcagttaacacatatgcattccatttgtgatgtctaccttggtggctccactatgacccctaacccatgagcccagagaaattcaccgtgataatggaatcctggcaaccttatctcatgaggcaggaggtggggaaggtgcttctgcacaacctctgatcccaaggactcctctcccagactgtgaccttagaccatacctctcaccccccaatgcctcgactcccccaaaatcacaaagaagaccctagacctataatttgtcttcaggtagtaaattcccaataggtctgctggagtgggcgctgagggctccctgctgctcagacctgagccctccaggcagcagggtcccacttaccccctccccaccctgttccccaaaggtgggaaagaggggattccccagcccaaggcagggttttcccagcaccctcctgtaagcagaagtctcagggtccagacccttccctgagcccccacccccaccccaattcctgcctaccaagcaagcagccccagcctagggtcagacagggtgagcctcatacagactgtgccttgatggccccagccttgggagaagaatttactgttaacctggaagactactgaatcattttacccttgcccagtggaataggacctaaacatcccccttccggggaaagtgggtcatctgaattgggggtagcaattgatactgttttgtaaactacatttcctacaaaatatgaatttatactttgaccaggtcttgccttttctgtgggatgtgaaggggatggggtgagacatgaaggggaatgaggaaggagtctaagggcttgagagaatcagtgaactggggtcaagagagttaaagacaaaaacaaagggaccaaagatacaaaataagaattgagagagtaatgagcaaaaatgtatcaatcaaaaacaaaattttttttttttttgaggcggagtctcgctctgtcgcccaggctggagtgcagtggcatgatctcggctcactgcaagctccaccttctgagttaacgccattcctctgcctcagcctcccgagtagctgggactacaggcgcccaccaccacgcccggcttattttttgtatttttagtagagacggggtttcaccgcgttagccaagatggtctcgatctcctgacctcgtgatccacccgtctcggcctcccaaagtgctgggattacaggcgtgagccactgcgcccagccctaaaaacagaatgttgagtaatggaatggggaggggtccagggcatgctgtttaatgaacattcataattgcaacagcagtatgatgaatgggacaaagataaaaatagcaattggccagatgcagtggctcattcctgtaattccagcacttcgggaaactgaggcgggaagctcgactgagtccaggagttaagagaccagcctgggaaacacagtgagaccccgcctctacgaaagttagccgggcgtggtggcacgcacctgtagttcagctactctggaggctgaggtaggaggatcgattgaggccagaagttcaaggctgcagtaagctatgatggcgccactgcactccagcctgagtgacagagtccaaccttgtctttaaaaaaataaaaattaaaaaagcagtaacgaaagtataagaggctcaagtttaatgaataaacggcaagtaaaagtagactaaaggcaaaatcatgaataatgttgtaataggagcccaaggcatgacggataataaacctgaatgaatgggccagaggcagagtgatgaataatggaaaaatagggaccgggggcaagggaggtaacggacaggagttcatggatccaaaacatgatggctaattagagaagggccggaagaacgacgaaagtgagcaggcaggctggagctaaaagtagtctgggcaatgaagctcaaatgaatggggcagaggcatgatgggtaatgggagaggaatgaatgggccaaagatagaagccgcagtgacgcgaggaacaagaggcatgatgggtaacgaaaggggtgggtctaaggcaactgtttcgctaagaggtgatgagggcattgtgggtaacgaggagcagcgcagggttcgcagaacagattagaattctcccgaggcactctgggaagggccagcacttccggttttaggtcggctactccgaaccagaggtggggtgggggcccggctgccgcggtgcctggtgggacgcgaggcctgaccttgctgcctagccgcctctgccgcgcaacccacctttacctgtccttcgaccctggaacgttagccaatgagagtaccaagctgatacgccaccaaggtcgaccccgtacacgctggagccaatcaaaatgctgcaagggtcaaagccgaccaattatcacagcaacctcgccgcggggcggaatcaaaagagggcctcctccaggagagaggcggggcgatgcctcagcgggcgtggcaaaatgctcagcacagaccaatggcgggttagcaccggaacccgcggcgacgcgagccaataggcgcaggcgctgcgagccaatgggaagggtgggaggggcgccgtggctaccctgcgagtgagaaccaatacaaaaggacatttcagggaaagtgggcgggactttatgcacaagtccaatgggaagaccgagtcttgacgctggtgggcgggcctcagggcacactaaaccaatgggctaggtggggcggggcgacggtggtggcggcggcggcagcgggttcggttgcgcgtggcgcacggggtgggagcggagcccaggccgggagcaggcgccgccgccagtgagaaccggggccggagccgggtgcggatttgctggggctgagtcgggggcgcgcgggccctgacctctgccctctgacctctcccctagcaggcgaccatggggaacgtgttggctgccagctcgccgcccgcagggccgccaccgccgcctgcgccggccctcgtggggctgccgccacctccgccctcgccgccgggcttcacgctgccgccgctgggaggcagcctgggcgccggcaccagtacgagtcgaagttcggaacggacccccggggctgcaaccgccagcgcctcaggggccgccgaggatggggcctgcggctgcctgcccaacccgggcacattcgaggagtgccaccggaagtgcaagggtgaggggcgaggggcccccgctgggctgcgatggcctggatctcgggggaagggggaggacactggggactctgggatttggcgcgcaccattggaattatttaacagcactaggaggtgatgttgggatcgaatggtggaacgttggacttggggcttagaatgatggaatcaaatgctggaaacgggatggaatgtcatagcagtagagaaaagcctttagggacctgaggagccccgggatcagccaagccagacttctcttgtgatcgggaaggcaactgaggcccaaggtcacggtgtcagcaaggtgtcagcgaggttccttgggtatgggacccaaagcctccggatcccagcctggagcaattagagtagtagtagtggtggagatttatggagttctgttctggtgttcattatacgttaactcattagatccttgggacaattctgtgtggtgagggtcccatctttcagatgatgagtttgacctaaagttgctcagcttggtggcagtgagatttgagcaagcaaaggccctggccctgtctaactaggctgtactgcctctttacaggtggaatcctttgtgagatgttctgctgtgggtctctggagagagctgggggtggtagggaaggaagag

SEQ ID NO: 8009 - DNA, 6000 bp, Homo sapiens
caggctgaagtgcagtggtgagatcttggcttactgtagccttgaccttttgggctcaagagatcctcccatctcagcctcccaagtagttgggactagggatgcccactgccacacctggctaattttttgtatttttagtagagacggggtttcgtcaagttgcctaggctagtctccaattcctgggctcaagcgatctgcccaccttgcccttccaaagtgttgggattacgggtgtgaaccaccgcaccaggcctgggctgacactttaaacgtgccattgcaatcagtgtataatggtcccgtggcagagggagaatggtgcccaagtcagtacttcttggctgggacccaagaagacaaacctctagggccggcgtggtggctcacgcctgtaatcccagcactttggttggctgaggtgggcagatcatctgaggtcaggagttcaagaccagcctggccaacatggtgaaaccttgtctctaataaaaacacaaaaattagctaggggtggcccgcgcctgtaatcccagttacctggaggctgaggcaggagaattgcttgtaccctggaggcggagatagtgccactgcactccagcctgggcagcagagtgagactccgtctctaaaaaaaaaaaagaaaaacttattaaaaaaaaattgcaagcaaaaagcacagaaggcagaaggtgcaaataagcagaggctccatggtctgaaggaggccagtgctgggaccatgaatgaagggggctgggggccaagattcctgtatcctgagggagtccagggtggtactgctccccaagtcccatgggtggggctattggtctctggggatccactgcttgtatttctcctaatctgcttggcattaacctcctgccaggctttcaacacccttggggcagttttcccaggtcctgaggctgggcagctgagtccagtaaaaaacaggggccctggagagggactgtgggcaatgcccccgagtccccggggcctgggaagaacagaggctgccaagtgcagggggtggtggggaggggaagaccctggagtaacaatccctgctgtgtccacttggttcccacggactcaagccaagccaaagcactgcccggaccagttcggcttccaaccaatcctggtgctggcctcagactcctcctttctttctcagaaccccattcccctcagggcccccagagtccaggcccctagattcttcttcccctagaactcaggagtctgggaccccccagtcccttctcctcaggacctagaaggttggatccccagccccctttctcccttagaacctgaaatcacagcccttgatcagtattttgcgccccctagtggagagaagagtgggtctgtcctgtgacttacatacagcaggaatggcagaattttttacttattatgatttttaatttctttagagacagggtctcactctgtcacccaggctggagtgcagtaatgtgatcacagctaattgcaacctcgaacgaactcctgggctccggcatccctcccacctcagcctcagagtagctggaccacaggtggatgccaccacaccacctaattttgttaatttttagtagagctaggatctcgctatgtcaccaaggctggtcttaaactcctaggctcaagcgatccttctgcctcagcctcccagagtgctaggattacaggcatgagccacgaagcctggacggaatggcagaatttatttggtcactccacagagcataggaaggctctgcagggaacctgcctccacaggagccctgtccaaggtcacacttctcatgagaagcttagacctcatcatgctccaacacattggcccttgcagtgtatgagacttggagagcagattgcagcagtttgtatttatagctgagagcgcagttggggttgcagtgaggctggagaaagtttcaaagcccctcacttgcctgggctttccatggtcctctacctaaatttgtacaagtcattttgtactttttttttttcaagacagagtctcccttttcttgcccaggctggagtgcgatggcatgatctcggctcaccacaacctccgcttcccaggttcaagcgattctcctgccttggcctcccaagtagctgggattacaggcatgtaccaccatgcccagctaattttgtacttttagtagagatggggtttctccattttggtcaggctggtctcgaactcccgacctcaggtgatccaccagcctctgcctcccaaagtgctgggattacagtgtgagccaccacacccagccaattttgtactttttaaaagaggccaggccaggcgcggtggctcatgcctgtactcccagcactttgggagacagaggcaggcggatcacgaggtcaggagatcaagaccatcctggctaacacggtgaaaccccgtctctactaaaaatacaaaaaattagctgggcgtggtggtgggcgcctgtagtcccagctactccggaggctgagacaggagaatggtgtgaacccaggaggcggagcttgcattgagctgagatcatgccactgcactccagcctgggtgacagagcaagactccatctcaaaaaaaaaaaaaaaaagaggcccacaaaacacataagcttcagaccccacaaagtctctcctcaatccctgtcttagtctattcacttcatccctggacttaaaagactgggcctacacattcaaagaatcgttattaacaccattattgtctgtaacagtgaggatgaggcactgagttttctttttcttttctttcttcttttttggaggtggagtcttgctctgttgcccaggccggaattcagtggcatgatcttggctcactgcaacctctgcctcccgggttcaagcaattctcctgcctcagcctcccgagtagctggagttacagacgtccgccaccatgcccggctaatttttgtatttttagtagagacggggtttcacaatgttggccaggctggtcttgaactcccgacctcaggtgatccgcctgcctcggcctcccaaagtgctgggattacaggcgtgagccaccgcgcctggctgaggagcgaagttttctaaggttccttcttgtcctgtgttagccctcagagaggtaagtcactcaccttctgcacctagagagcctcatccccagggcaatcatccccagggcagtgctggagatacagcagtgaccacaacagtcccaggtcagcctgcccagttggggagacacacccatccctgacagtgatgacacaaagtgagcagggatggggtggaggagctgagggggcaagggaggataggaaaagggctcagagagagtttcctagagcgagagctactgttacagggctgagacctagaggaaagtggaggaaaccgataataaaatgataattatatattcagaatatcccaatgcaaagcttactctttttccaggtaatatataaggttcataatcacagcgctccaaatattgaccacttaagcatgaggcccagggcctgatgttttccattcgccatctaactacgtcttcccaataacacagcggggcaaaacgggaagacgaagaacgagtacgattatatccctggtttataaaaggggagaaactgaggctcaaacatagatgtcacttgtcaccagcctggccaacacggtgaaactccgtctctacttacaaaaaaaaaaaaaaaatgggaggctgacgcaggagaattgcttgaatccgggaggcagaggttgcagtgagccgagatcgcgccactgcactccagcctgggtgacagagcgagactccgtctcaaaaaaaaaaaaaaaattagccaggagtggtggcgtgctcctgtaatcccagctactcgggaggccgaggatgcagtgagccgaggttgcagtgagccgagatcgcgccattgcactccagcctgggggagagtgaggctccgtctaaaaaagaaaaaaaaagagagagagagacgtcacttgtccaggatatcttatccagtcagtagcaccacaagggttagaaccctggccagacatccacccaatttcacgggtgaacagttaacagcctctgagagtcttgtcctctctgggcctccgtaacaccctctccaaactaagggtctctcagcagatggccgggtttagagctgtacgaagacacacagctaatgaaaaattgtggaattctcagagcccgtgaagcctagcccacggatgcgaggtttggaccactgagggaacgcgcatgcgtgctaggcagggcagtccgaaggcttgggggtgtatcatagggtctcatcggaggtttgttggccgtaagacccctggaattggaactctaaaaacacagaaaggatatgagctcaggagacttgaacgaaagagttgtcttaggaagaggggtcagaagacaagggtgctgggcaaaaggctagttcttcgaatcagaatacggtggccagaaaggttcctctgacgaaagaggggcgtggttcgaagccgtacagtggccggtaaagctcaagaaacatggaacgaaaaggacgcgaagaatcggcagggagaagcggacaggatgtcccgaaaggctcatataaccgaaaaggcgggttaatgtgaagggacggaagggacagaacttgcgggaggcacatgctggccgagaaagtcctggagttcggagcatacagtgtttttattaggtggaaacaaacgggctgggagaaagacgagtacggtggccaggttggtccttccatagccggaagtggccttcctgagaggcgtggctgcggcactcttgccggatagggtggcccggcggggctaggaaagcgtgaaatctcgcgcgattgcgctgcgaagtcggggacggggcggggctggcggcgggggcggggacccggagcgggaagatggcggcggcgcaggaggcggacggggcccgcagcgccgtggtggcggccgggggaggcagctccggtcaggtacggaggccgagaggggactgagggggttcttccccagccggggggcctcccacggggcgtgtcctacctcttgtcacggaatcccgtgcactgggggctccttggccagagggaccttgaatacccggcccaggcagggccggaccgcccgggaggccggacggtgccgggaacagggccctgttgcgggtcggttcccctgcacgctcgagccgggcggccaccaggctcattgctcgatccggggagacagtggctcggaggggcgcaggcttgtaccttggcgcgctgggttctcaactccgcgattccatgctctgaggccgttcctagagtggtctggcgttcaggtctcgttgtagtgtttgaggtgtgcgcagtgattaattgggagttttctagctgtggggaagtcagtattagcagggcacggccgacagacccattttacagacgggaattcaaggaacagtgagactaaggcgcttctagaaggtcatcctggttaggtttgtaactttatgtagaagttacaagacactgctgacacagggactggtatggttgtggttttaatgtaaaatagttctatgggttaattagtcctggtgcggatgacttctgccccactgctgtcttaacacactgcagagcataccatttcaggcagctaccgttcaggcatttggggaatagatggagagacatgaaggtgctgtcgacccacccactgggatgtcactgacatgtgggaggcagctcaggggaaaggagtgcgggttgagaggggagaatgaagctgactctctgtgtgaccttgggcaagttcctttccctctttaggcctttatctctcccgtgttaaatgcagaggttggacaggagggccagccatatccctgctgtcaggggacgaagagag

SEQ ID NO: 8010 - DNA, 6000 bp, Homo sapiens; identical to SEQ ID NO: 832

SEQ ID NO: 8011 - DNA, 6000 bp, Homo sapiens
gattcgcatgttataaaggcagctccagctaaaacatggagaactgactggagggagttctggagggagactagagggagggagcaggagagcggcagagctggacacagagacccccatcacagatgagggcagtcccagaaatcccaggacagaacggtagtggcttggactaggccggggcagtggacacagtagtggtctatctgtgggggcaggaggtggagttgggcatcccaaccagacctgtcactggctgggttcccccttcatccctctgctgcctcatcgagctgtggtctccctcctcctaatgaggatgtgagggtctcagctgcccactctgctttgctgtccctttcccagtgcctctggaaagagaaccagaaagacatggttggagcatctcagggaggtggaaacccaccaaaaacgggaagcgtcagtggccagtctctccctcgctgcaaacgccagcagcccccacgggctgtctggtctgcgagggccaaggtaggcctgagggtcggtcggggatctggaagtgccgctcaccatatccacccactgccactccctctagccagagccgcagagcatgcgctcccaaaaccttctgatacctggcagctactgcctctccgcccctccagctattcccagcaaggcgacatctaaaggcttcggaggagtcccagcaattcagtcctcccaggagctgatgcctctctgaattcgctgcttcctgtcccagctagctgggaagagtccccgtttcgtgccatctagccctgcatctcctaagggcctccttcccaagcttcagcagctgctggcaggaatgggcccccaggaagctgaagtgggcaggggcagctccgcacattctctgctggcaccgcactcactgcaggtccctgtcgctgctcctatacaaatctccagttcagatccctcattaaaaggtccctcccatcctcaaaaagcttcccctctcagagttgccacagaacaggggcagagccacacaatcaactgtgcatgaacatctacagctctgcggtcccctgcacaaacaagcttcctctgccagcctggaagtttcggatgggcagaaaccacgttacttacttctcagaatcccccacctagcaaatgcctgctcattatcagactgcagctccgccaccttcctgctccaaacttatggtgactactggcaggacctccctgggggctgccttctctgccattcaacacacaggtaccaagcagggtcgcacggcaggtcttctgctaggagcagctgtattaagctcttcagagaaaagttattcagagtccatcaggaaaatctgacactgcctagctcttaagggatctcacaggggaagtcacaccgtctgttagcactaagtgttcaagtaaaggtgtgtaaaagaggtgccgctgatgggagagtaaactggtgggtcaatgtggcagagtcattcactgtttctttttttatttttattttttttgagatggcatctcgctctgtcaccaaggctggagtgcagtggtgtgatctcggctcactgcaacttctgcttcccgggtacaagcgattctcctgcctcagcctcccgagtagctgggactacaggcgcccaccaccacgcccgactaatttctgtatttttagtagaggtggggtttcaccatatcggccacgctggtcttgaactccagaccttgtgatccacctgccttggcctctcaaagtgctgggattacaggcgcgagccaccgcgcccagcccaatcactgtttcataaacacatccattctactattccactcatctgttctgcttcattcttgcacaggaataaggggttctcactgcagccatgtctgatgggggaaaaactagaaaaaatctaaaagtccaccaaccagggtcaaactcaatcagctatggtgcaaacatcccgtgggacgctatgcagctatcaaaaagaaagagttctctgtgctgatatgaaaggaaaaccaaaacagattattatgtcacaaaatgatacatacagcagtagttcatctattacataagcacaataactcttctctctcaggagagaagagcaggaaagggacgaagagaaggaactttcctttttcacttacatatatatgtgtatacacacactcacacacacacacacacccctctgagatgtctgaatttttactaacttaacagaataaaagaaaacaaaagtacaaagtgacagtgctggtaccatgccagacacaagttcctctcaaactccaagaagggtcagtaagtgaggggataaacatcttttctctcatcagcctccaggatgagaagatggtgtggtgggtgctgtgcggtgcactggtgcaaagtcccagaggccaagattcagtccaagctctgctatgactgcttgggtgaccctggggaggccactatgcttgcctgaaccaattttctcaactgtactgggtagcagagaggtacagaacatgggcttaaaagtctaccgacggtcgggcatggtggcttatgcctgtaatcccagcactttgggaggccgaggcaggtggatctcttgaggccaggagttcgaaaccagcctgaccaacgtggcaaaaccccatctctactaaaaatacaaaaatcagccaggcgtggtggtggtgcacacctgtaatcccagctacttgcgaggctgaggcaggagaatcgcttgaacctgggaggcagtggttgcaatgagccaagatcatgccactgcactccaccctgggtgacagagtgagactctgtctcaaaaaaataaaaataaaaataaataaataaataaataaataaacaaaaggtccaccacagaccagcccttctgctcatctgctgggatcctagataaatcaccctctcaaaacctccatttcctctcctgattttttttaaaggtagggggaatatcctttatcctcccagaatgctgcaagaattaaatgacagctcgtatctacagtacttgatacagcgccccagacatggtatgtgctcactaaattgcagctggtaccgttattgctgagtgaggtaatgacactgcctctgcctacatcacagggcattgtgaagatctgatgagatgtatgctgggaaagagcttcggaagtagagagtgggacagaagtgagagcagttacataaggattctgctcccatcccagccccaagcctcagccaccacaagtgagggcagggggagagttactggagggtctttactcatcctatgaacaaaatgcttttttttgagacaggatctcactcttttgcccaggctggagtgcagtggtgcaatcatggctcaccgcagcctcaacctccggggtttaagcaatcctcccacctcagcctcctgagtagctgggactacaggcgcatgtcaccacacccggctaatttttgtacttttttgtagagatgaggtcttgctatgttggccaggctggcctcgaactcctgggctcaagggattctcccacctcaacctccccaagtgttgggattacaggcgtgagccaccgcaccccatccctaccgacacaattctcatcagctatttatttgggtaccagcttcctactagatagcaaacggcaaatcggaaggggaaaggtgggctgctacaagcaggtaatgacaatttctgctaataataacccagtccaagaatcttcagacttccagcgggccattcctgatcccttcaaatccggacatctccatggtcctccagtcactgccaatggacctgacgctccacgaggtcacaaaccctagcccaactcctcagactcttccattcaacatccctgtcccaagctaccccaaaaaccacggggtcttttcccaagacttccacaaacatatccccttccccccaaccccagtctacccccgttccgagatgcctcctcatgttgccttcgggctctacaaaattctcccccctaaagcatcaccccagggtaacccctaactcgtcctcattggcaccatcccaggaccctcacctccatactggacatgcccaacaccccacactccagttcagggctctctacctacatcctacaacacacgtgccatctcagtgccatcgcgcccactcctgcacacccccaaagtggaacttccactcttaagctctcccatccaggctcctagggtacattccctgctctgtccacacttccactccaaagaacccttccctgcactgtgcagccacacatgcccgggatccccaaagtttctcctcagaggggaaggcacacaccttcatcctggaccccttgaaaccctcctcccacccctcgggtccttacacagccctccttccgtgcccaccgtccagtcgccccgaaacacaccgatcccaggttcccgacttcctctccctaaatcctcccggttccccatctggacccgctctttcccagcgggtcccaagttccccccttggacgctcccacctccaacctgcacctggctagggccatggtcggggtcggggtcgggagtccctcggcgcccggcaagcttctgcttactcccacaggagaccactcaggtctcccagacccctccagctcctctccacaccctttcccgagttctcttagcctcccctccagggctcgagtcgcctctctcaggagccccgcggccagcgtgctcagtcccagtcccagtcccactcccagctggttgtggtccctccgcccctttctctcggccggtcccggtgatccctcccacccccggtccctccactcccacctcgggccgtcccggtcccgtcccaccccggagtgccctcaggacacccctcggacggcccctcactcgccctccgggaccgtcgcggtcccctcccgcccccccgccggccgtcccggcggccattgctccaagatggcggcggcggcggcagcgggtgaggccgggccgggccgggccgggttgggggtcgggggtcccgggacagcgctcacctgtaactcggcgcgctcggcctcccagcgggctttctcggcttcgaagcgcgcccactcgtgctggataaagtgcaggatccccggcaggctcaggggctccgggcccgccgtgggcccggggctgcctccgccgccgcctcccttacctgccgggcccggcccgggggcaggggcggagaccggggccgccccagtggggccagggcccgcgcctgagccgagcggacggcaggaggaggcggcggcggcgaccgcggcggccgctcgctcctccatcatggaggccccggggccggcctgcgcgcccgctgtgcctcgcgcgcctgcgcggccgcgccaacacccccccccctcccccgccgcaaccaccgcgcgcgcgcccggcgggggacagtaggaaggggggccggcggcgagcgcgagcctcgcccacccgggtctacaccgaagggtagcgtgcccgcgcgggggccggcgggtgggagatcgcgccccgaggagggcgagggagacccaggccccgcgcgacggtccccctcgctggagtgagactgaggaaggggccgctttctgcccccctcctcccacttcgccccagagaaagagccttaccccttccacacccaaacaccactctcctggacaattacttttactctgagagaaagggcgaccagcagtggccccatcctctctgattgccggccaggttggttgtcatggtaacccttccccagcggtgggggcgaggtggtggggagcagccttcccctcgcttccacctttgtggttatggagccccaaacctcttaggactctgcaccaggagaaggttgctaaggtaacctaagtgtccgtggtggtccttctgctcctatcctcattgattactatggcaacctcccc

SEQ ID NO: 8012 - DNA, 6000 bp, Homo sapiens
ctgggtcttgcgtctaggctccgattctggcgcgggtttggcaggggacaggcctcctgggctctcaggatatctgaggccaggctgtttggtcgcaggagagggggaaaccccggcctgctgtagtgggggttgggcagggtcgggggagtcctgggccctacctgccgacgggcctgacctgttcttggtgctccaagttcagtgttgtggtctggttactggggagataagggaccaatgaggactgaggacagcggccagggagggactgaggccgcgggagaaactatgggaggaggggcggagaaggatgcgaggcgtagacctgcagggttcccacggactgagaactgatgggcaaggccaggcgcggtggctcacgcctgcaatcccagcattttgggaggccgaggcgggcgcatcacttgaggtcacgagttcgagaccaacctggccaacatggtgaaaccccgtctctactaaaagtacaaaaaattagccggacatggcggctcgtgcctgtaatcccagctactcaggaggctggggcaggagaatcgcttgaacccgggaggcggaggttgcagtgagccgagatcccgccactgcactccagcctgggcgacagagcgagactccgtctcaaaaaacaaacaaacaaacaaacaaaactgatgggcggcgaggtcctgaaaggggcggagccgggagggcctgtggagcggtgctgcggagccctgagaggtgcacggctgtgaggcctgagaggggcgtgccgtagggagctgtgatgggcggggctgagacctgtgaggagagtgagtgggaagaacttcgaggggcggggcttcggggccggcgaggggaggggcacggacaccagtacaggacggggcttcgcagacagcgagcggaggggcttccccgtaaggggcgggcttcgagggtcgcgtttggaaggccttacgaggggcccggtggaagggcggtgaagggcgggctaatcgggaggcgctcaggccttgaaggcctgcgggaggtcgaaatggtcctggggaggtcgaggctgaggtctcactagtaccgcgggcctggaagcggcgggagttgaaagagcctgcggtgacctgtatggaagccctcgaagccaggccgaggtcctacaagacggagcccgagaggtgccggtcttaagctgactgtgaccacgttaaattaaggattcataggaaggaaggcggtgtcgaagccgggagttgcgcggagaaggagcgctcaacacagcctcagcggttcactacgcaagcgcgaccaacggcttcccgggaagcagccaaaaacgcttggccgcctaccacgtccgcgcgctggagggcggaagtgggtgagacctcgggcactccataccgccccccggtttctggccacgccccctctggttacacccactcgctctgtaaggcacgccccctccgcggcggcggctgctgcccacgtgggcctccccgggcgggcgggcagtgggcgcctctccctgcaggctgggtgtgcccgaagcctgcggtttcctgtgggaggaagcggcctgcgtacgctcagctcagctcataatctcggaggcccaggatggggagatcccgccgccaccctcagatcctttgattcttccccttctacatagccatagtgcggggacccccctaatatccccagggtacccaagcctggcgccgatcccactcagggaacttgattctgagtcctagactcgtgtttttcacctccccggctcaagtttccatcttcctagcccctggctccccctagtcctctcaagaaagtggagccctcttttcctgctccccaagaggaacgtatgtctccccagcccctaatttttccttcagtgacccagactttgcaacttccttagggatctgagtgcggaccccagtttctgtctctcaggcacttaagtttgagactacttattctcccccagggaccctcattttggattcccaactttagccttgagacccaatggacccaagaatttgccccttccccaactcctagagatcctgaatcagggtcccccagtactgactccactcagagccccaatgcctgatatgactagcactaccctaagaactgccctataatgtatttactattatctctatttttcagatgaagagactgaggcatagagaagttattagtaacttgccaaaaattacacagccattgagtaaaacagcttggattttgagtccaaccagtgtggctctagagtctgtgctatactggtattccagcttccaggtcttggggtacccagccaagcactgaactgtccatccctcaccccctcagggagcccgaatcaccaacagctatcccaaacccagctctggcccatcagatacccagacatcccatcatccagttcccttccctggatccaggatttgaattcccctgctctcaatttatcagagttctgggcacctggtcccctcccaagagactcgtgtacatagtagtcatcaccccgaccctaatttaatatccccaaaattaataataatagttaacagtaaacctttggggccaggcacagtgtcttacgcctgtaatcccatcattttgggaggccaaggcaggcagatcactggaggtcaggagttcgaggccagcctggccaacatggagaaacccccgtctctactaaaaatacaaaaattggctgggcgtggtggcgggcacctgtaatcccagctactcaggaggctgaggcaggagaatcgcttgaaccgggaggtggaggttgcagtgagctgagatcatgccactgcactccagcctggatgacagagcaagactccatctcaaaaaaaaaataaaaatctttggtactacactctgttaaaacctaatggctttccactgcacttagaatgaaatccaagcccctcccctagtcttcaagggcaccctttgatttcccttctcaccactccctctgtctccctgtgctccagccacactggcccttctgtctgctccctaaacaacctgagcttgttctcaaaagctttaagagcttttgcacttcctctccccccgacgcccccccaccactccccaaccccagcgttcaaatgactcctgtcttcagctcaaatgttacctcctccaagaggccttccctgattttcctgtttcaagtagtcttccctgcactctgtcattatctccatcactctgtttgatttattattgtatttatttttcttttcttcttttatttttttttttctttaagatggagtcttgctctgtcacccaggatggagtgcagtagcgtgatttcagcttactgcaacctccgcctcccgggttcaagcaattctcctgtctcagcctcctgagtagctgggttacaggcgcccactaccatgcctggctaatttttgtatttttagtagagacagggtttcaccatgttggccaggctggtcttgaactctcgacctcaggtgatcctccagccttggcctcccaaagtgctgagattacaggcatgagccaccacgtccagcctattgtatttatttttcaagtcacttatccttatctgagatttatcttcatcattgatgttttctcttgtctgtcttcctctactagaatacaagctccataataccagcagggctcatgtctgttttcattattaactcccagatcagagtacatgttcaataaatgtttgatgaaggaaggaacaggttaggtgtgtgagtgtgccagtattaccttattcattcagcataagtatcagaattattattatcagtattagtattttgtcagcattattatactctcaacatagactaagatactggagcccaggtgggtgaaataattggctcaaggtcactgaaccaggaaatgatggcgctgggattcttagcttccgcttcctccccgcttccagagtttcacaaggtttttttttttgtttgtttgttttttgttttgttttgttttttttttgcgacagaatctcactttgtcccccaggttggaaggcagtggtgcaaactcaactcactgcagcctccacctctcgcgttcaagcgattctcatggctcagcctcccaagtagctgggattacagtcgcccgccaccacgcccggctaatttttgtatttttgatagagacgggtttccaccatgttggccaggctggtctcgaactcctgacctcagatgatctgcccgtctcggcctcccaaagtgctgggattacaggcgtgagccacaacgccctgccgagtttcacaaatttcatctcccatcctctgaccccccaccacggggccaacttcaccagcccaatctcaagtccatgccacagaaatctggcctcttttcccagactcctatccagctccaagctccatcagggaaagcagacatccggccccagggcaagacctcaaaactcaagggtcctgagaatcgggccctcccacccctgacgcttgccccccccaagaaccccattccaagagtttctcatctcaaccctgggagggagccccagatgatgtctgtctggagggattgggtgggggcccaaagaaagaggaaccggagtgcctgggccctcccactggcagccgacctcagctgggtgcggtgagggtgggtttataaaagggtcagtatatattgagaggaggagagaaagagaaacgggagcaagagagaaggaggcccagacagtgagggcaggagggagagaagagacgcagaaggagagcgagcgagagagaaagggttctggattggaggggagagcaagggagggaggaaggcggtgagagaggcgggggcctcgggagggtgaaaggagggaggagaagggcggggcacggaggcccgagcgagggacaagactccgactccagctctgacttttttcgcggctctcggtaagtttccagtccgttattcagggctgggacttcttaatttacttgggaatgtagcagtttgggaaggacacccccaggctgggagagacgtccctgactcttggaaatccttttaatttaataagtgatctcttagcacttgaggtggggatatgggaaggggtggggcccggcaaagttttggggtcccagcagagccctccactggaaaacttcctgcagtttttccctcagcggtgtccactgtcctctggggtccctgagatcagggcattgcatgagaacaccccaaatctgggagacctctaggtcccctgttcctgggcaccaaagagtcctgggaggctaactccttcttgggcctctcttccccccagcgcgaatcctatccatttcctccagaagatgtccaacagtcaccagtctggcagcagggtggggtgaggacctcgtggacatagccaggggctggggtttccctggtgcttagagatgggggggggtggggatgagtcaccagatgactcaccaggtccccctcctcccctcaacccaggagaggagtggtgtgagtcaagaatgcctgttgctgggggcagctcctcaatcctgatgtcggggtgcagggtggggtctcaacttgaattttcactatctggcctgtatgtaacccagagtcagggttctggggagagaggagccacattgctagtcctcctcattcaaggaacccaagagtccatctttggccctctccacccctccagccaatggggatctcaggaatccaggccccagcggtctcctccctgagagacccaggagtctgcacccatgcccttcctccatcaggagacatctcacctgcctttatgccaaatttttttttttttttgagacggagtctttctctgtcacccaggctggagtgcaatggcatgatcttggctcattgcaacctttgcctcctggattcc

SEQ ID NO: 8013 - DNA, 6000 bp, Homo sapiens
ctttttctttttttttttttttttttgagacaagtctcgctctgtagcccaggctggagtgcaagtggctcgatcttggctcactgcaagctctacctcccgggttcacaccattcttctgcctaagcctcctgagtaggtgggactacaggcgcccaccaccacgcctggctactttttgtagttttagtagagacggggtttcaccatgttagccaggatggtctcgatctcctgacttcataatctgcccacctcggcctcccaaagtgctgggattacaggcatgagccactgtgcccggcctacaattttttttctttttgagacggagtctcgctctgtcgcccaggctggagtgcagtggcgtgatctcagctcactgaaagctctgcctcccgggttcacgccattctcctgcctcagcctcccgagtagctgggactacaggtgcccgccaccatgcccagctaatttaaaaaaattttttttaaatttttagtagagatgggggtttcaccatgttagccacgacggtctcgatctcttgacctcatgatccgcccacctcagcctcccaaagtgctgggtgggattataggcgtgagccaccgtgcccggcctttttttcgttttgttttttgagatggagtctcaccctgtcacccaggctggagtgcaatggcacgatattggctcagtgcaacctctgcctcccaggttcaagcaattctgcttcagcctcccgagtagctgggattacaggcacagccaccatgcccggctaattttttgtatctagtagagacaggatttcaccagggttggccaggctgttctcaaactcctgacctcatgatcagcccgccaccctctcaaagtgctgggattacaggtgtgagccactgcacctaatctaatcttttataactgtcaatctaatcttataactgtatgttagcctttgtatgcaaaatgctgtcattctgctcacgatctccattttttgttgttgttgttgttggttttttgtttgttttgtttgtttgtttgttttagacagagtcttgctcttttgcccaggctggagtgcagtggtgcgatctcggaacactgaaacctccaccccaccccgcctctgcctcccaggttcaagcaattcttctgcctcagcctcccaggtagctgagattacaggtgctcaccaccacacagccagctaatttttgtatttttttttttttagtagagacagggcttcactatgttgaccaggctggtctcaaactcgtgacctcaaacgatctacctgccttggcctcccaaagtgctgggattacaggcattagccactgcgtttgacctctccatttttacctgtataaatgagttccacttttccccatactggaagcactgatcaccattcttcggtgtccttgtgtccctggacagccaccctcacacacttgtgtttaaaaaaacttttcttatttttttcttgagatggagtctcgttctgtcacccaggctggagtgcagtggcgtgatctcagctcactgcaacctccacctcccaggttcaagcaattctcatgcctcagcttcccgagtagctgggactacaggtgtgcaccaccacacccaggtaatttttgtatttttagtagagactgggttacagcatgttagccaggctggtctcgaactcccggtctcaagcaatctgcctgcctcagcttcccaaagtgctgagattacaggcgtgaacaactgtgcccagatttattttttaatttttcagaggcagggtctttctctgtcactcaggctggagtgcagcgtcaggatcatagctgacgctggacctcctgggctcctcttgcctcagcctctcaagtagctgggactacagacatgtgccaccatgtctggctaattttctttattttttgtagagagacaaggtcttgctatgttgcccaggctggtctttaacttctggcttcaagctatgctcctgcctcagcctcctgagtagctgagattacaggtgcatgcctccatgcctggccaccacggccaatttcaagctaccaatatgagatcattgaacatgcaattggaaagaaatgcacagtattacattgttctatagcaagcctattacacagacataataaatgtaaataggccaggcaagatggttcatacctgtaatcccagcactttgggaggctgaggcaggaggatcgctttgagctcaggagttcgaggccagcctgggtaacatagtgagaccccatctctacaaaaaaacacaaaattaactgagtgtggtgacgggcacctgtagtcccagctactcaggaggccaaggcaggagactcatttgagcccaggaggcggaggttgcagtgagcacatacattgattggcacacagattggcagatactaacatacagtgtgtttttttctccagagaactggctggtaagtgtttaccatagtaagaagacttactatagaacaatgtattactgtgcgtttctttccaattccatgttcaatgatctcttattggtagcttgaaattggccgtggtggccaagcatgggggcgtgcaccagtaagggaaagctgaaatggaaaacagagggtttagggcaacagtcctgaattccggagtgctgtccccctgggggagttatgggaatctgtgggggttgtttttagttgtcacagtggaggtcctaggatgctaccacagcgtttacgcggctggggtcagcgacaataaaagttacgcaatgaaggtttgtcctgcattctcaggactttgttttatttttgagacagagtcttgctctgtcacccaggctggagtgcagtggtaccatctcggctcactgcaacctctgcctcccaggttcaaggaattctcctcccctagcctcctgagtagctgggattacaggcgtgcaccaccatgcccagctaattttgtatttttagtagagatggagtttcactaaaaaaaaatgttggctaggctggtctcaaactcctgacctcaggtgatcctcctgcctcggcctcccaaagtgctgggattgcaggcatgagccactgcgcccaggtcattcccatgactttggaacatctgtgggacattcatggagttggaaagtctaagcctctgagccccaaatctgttttgcgttttttttttttttttttttttgagagggagtcttgctctgtcgcccaggctggagtgcagtggtgtgacctcggctcactgcaagctccgcccccggggttcacgccattctcctgcctcagcctcccaagtagctgggactacaggcacccaccaccacgcccggctaattttttttttatatatatttttagtagagacggggtttcactgtattagccaggatggtctcaatctcctgacctcgtgatccgcccgactcagcctcccaaagtgctgggattacaggcgtgagccaccacacctggcctgttttgcatattttatgacagctcacctccccacttccccgccccaccctgtttcttttttccttgtcgctgaatcacagggaaacaggtcgtttgtcctgtggacgggctcacattctggactgggctgattgctgcctcatggtgtcgtttcactgggaactttgtcctcctgttttctgcaaactggtggttagagtgggaagcttgatctgatttttttgtttgtttgtttgaagggagctccgtagctggtaggtagcctcctgctgcttagctgaagctggggagtggctgctggtttctctttcctcctgttaggactgctgggagctctggtggtgcctgcctcttctctcagtaaaattcctcatccatcttttttttttttgagacagagttttgctcttgtttcccaggctggagtgcaatggtgtaatctcagtttactgcaacctccgcctcccaagttcaagcgattctcctgcctcagcctcccaagtagctgggattacaggtgcatgccaccacgccccactgatttttgcatttttagtagagacagggtttcaccatgttggccagactggtctcaaactcctgacctcaggtgatccacctgcctcggcctcccaaagtgctgggattacaggcatgagccactgtgctgggccatggctaatttctgtattcttataaggacggggtttcaccttgttggccaggctggtctctgactcctgacctcagttgatccgcctgcctcggcctcccaaagtgctagaattacaggtgtgagtcaccacaccgggcccatttgtatttaaaaatttttttgaaataggcagggcgaggtggctcacgtctgtaatcccagcactttgggaagctgaggcaggagaatcccttgaacttgtgaggcggcggttgcagtgagctgagatcacgccattgcactccagcctgggcaacaagagcaaaactctctcaaaaagtaatactactaataattaattaataaataaatataagactctgaggggactcagagtcagcgagagcctggcctagcaggactctgtcccccgcctccatgctgccttcctggaggccttcctggctgcctggaggagcggagcagagtgggggcccctttctgttggggcatcacaacagttccccaaggaagaccctcggggacccggatgggggatgcgaccttgtcctgcctctctcccccacccttatggccaggcttggggtgcctggtgcaggtggaggagctaagggtagataacaagatggactttgtggccggcaatggggagggaggaggggctacgggctcacctccctcccgcagcccagccacacctgctctggaaagccctgtagctcctgggcggggtttgccagtcaccgatgctggaagggtttctttggccctgagtgaagagagacccagagggaacactgaggtgcctgcccaaccactctgtcccggtttccttcagcaggaccaggtgagagaaggtgagggggctcctctcccaccctacaacacgcacacctctgcacacacgcccaggcggagagcagggatttgggacgtggacctgtgtgccctcgtgggtccctggtgccctctgggaggcacccccaactcaggacctccaggagaggagggtccctccctcggcagccaggacccccctccccagccagccgccctccttagctccctccccacttccttccaggtggatctgtttctagagctccaaccaccagctccctccccttctccaccccgggccaccaggtccttccttgtctccttcccctcagcagtttctatgaaccaccctggcagtaatggtgcagatggctcgcgcacagctggtggtgacccgactttcctgcctccaccctggggctcctcagaggcttcatggaacccaaactgctggtctcacctccgagccctgccgtcgcccagggagggcggctccgtccctcctgcactccctaatcccgctctgaatcaccgcttctgttctgggtcggagaataaaggtggggtttccaagtgatggccctacgttattgtctgaagctcccttctcctccccagggtggaagtgataatgccgggaatccgggaatcccggggaggtgcaggaagacagcgagctcgaggcagtggggtgcgactgagccggatgtgctgagctgcccggggcacggggcggttggggtagagaaaggctttcagagctgggggacaggacggggccccgggtgagcggagagctgggttatttcacgggaacagctggtgacaaagccggaggggtgtgcggggccggcgagagactgggattgtgtcttaagaggcatagggagccctgaaggggctgcgagctgggaaggggcagggccggcgctgggtgtaggggacaga

SEQ ID NO: 8014 - DNA, 6000 bp, Homo sapiens; identical to SEQ ID NO: 2054

SEQ ID NO: 8015 - DNA, 6000 bp, Homo sapiens
aaaactgaccctggaagaaatgacttaggaataaaagaacttcatacctctagttactatatttcatagatatcccagatactgcaactataagacttctagtattggctacaagaagcccattttggactaacatggcacagactggttacataaaggctggacaataggcaaaaacttagaaaaggcgccagaaagtggccagctttgatgaggcttgagggggtgtgatccgttaagagaacacacaggtgtgtttcgcacttacccttgccttttccttgaggatgttttgccatttagcatgaggaagtcaggcgggactgacttccactgggccaagttcacagaggttcagccaggcagctgggacttgacgaaacaggagaggagggcactgacctcccaaatctacgtgcaccctcccttagaggcatctgccaactcaagctgctcactatctgcaagacccccccccccaagaaactcatcagaatgcagtaactgggaggctaaggaactggtggcctggagactgcagcagccatgctgttctaggggagacaggttggggttcaaggcccaccatggattggctctgcttgagatggccagggtgcctcaatgtcagagtaacgccataacagaagaaatcagactaagaggctgggcatggtggctcatgcttgtaatcccagcacttcgggaagcagaggtgggtggattacttgaggtcaggagttcaagactagcctggccaacatggcaaaaccctgtctctaccaaaaatacaaaaattaccctgaggccaggtgcggtggctcatgcctgtaatcccagctctttgggaggctgaggtgggcagaccacctgaggtcaggagtttgagaccatcctggccaacatggcaaaacccaatctctactaaaaaatacaaagcattagccaggcatggtagtgagcacctgtaatcccaggtactcgggaggctgaggcagaattgcttgaacctgggaggtggaggttgcagtgagccgagatggtgccattgcactccagcccgggcaacagagtgagactccatctcaaaaagaataaataaataatcaatcaggctaagaaagcctaaaaccagactttttcaggatttaggcagtctgctagtcagaagaaaactctggaagaagataacgttccgagtctccacatgtactatttttagtacccattactcagcatctactcaatagttaccagccttgctagaaaggacttaatttgctgaaaaccaagagggaaacaaaatagacaatagaaagagacccaggcaggggtgattcagatgttggagttatcataactatgatatattcacaaaataaggaaaagatggagaatgttgagatatctggaatctagctacttgagaggcagaggtaggaggattctttaagccaaggagtttgagattcagtgagctatgatcacaccactgcactccagcctgggtgacaggaagaccctgcctcaaaaaaaaaaaaaaaatctggaatctaacaaaaagttaaatggcaattctagaactagaaaacacaagtgaaattaagaattaagtaggtggtggccaggcatggtggctctgtaaactcaacactttgggaagccaaggtgggaggatcacttgagcccaggagatggagaccagcctgggcaacatcgcaaaagcctggtctctacaaaaaatacaaaaattagccaaacgtggtggcgtgcgcctatggtcccagataggaggctgaggtggaaggattacctgagcccagggaggtaaaggctgcagtgagccatgattgcacaactgctcttcagcctgggcaacaaagtgagaccctgtaacgacaacaacaacaaaacacacacacacacacacacacacacacacatatatatgtatatatagagagagaaatagcatgttacttagacacagaagcagctctcagactaaacatctgtaagttccctctcacagtgagtagagttaggagaggtagaggctggtgcttttcactattattagcctgtctgtgttatttgattttgtttttaatcccataaagacattactttttgctaaagagagagctacagtgaaggagacagccagacaaacctgctctagtcctcccacttggaacaagcacttttctggactccatatcgccacccagcagaaccagaagagcagccaactttctccaaagtcttgtccacatctcctcggcctctctagagcatgataccactgaccacttcctttttttattttttatttatttatttaattttccaagatggagtttcgctcttatttcccaggctggagtgtaatggcacgatctcggctcactacaacctccacctcctgggttcaagctattctcctgcctcagcctcccaaatagctgggattacaggcacccgccaccacgcccagctaattttttgtatttttaggagagatggggtttcatgaagttggccaggctggtctcaaactcctgacctcaggtgatccgcccgcctcagcctcccaaaatgcttacaggcgtgaccaccacacctggcctcactttttttgtttgtttgtttgtttgagacggagtttcgctgtttttcccaaagctggaatgcaatggcatgatctccgctcaccgcaacctccgcctcttgggttcaagcagttctcctgcctcagcctccccagtagttgggattacaggcatgcaccaccatgcctggctacttttgtatttttagtacagacagggtttctccatgtggtcaggctggtctcctgacctcaggcgatccacccgcctcggccccccaaagtgctgggattccaggcgtgagccaccatgcccagccacacttctttttaaaaacactcgcagccagacacagcggttcgtgcctgtaaactcagcactttgggaggccaaggcagggggattgtttgagcccaggagttcaagaccagcctgagcaacaaagacccctccatctaaaacaaacaaaaaaagaagataaaatttaaaaacccctcttctcatggtttctcccacctgggtttctgcctacatttcaggccattctctgctgtcctcctgacttttaagtgttagagaggtctggggaccagttctaggccgtcttaatattcgcttgcccctgacattcttatccactccggtggttttatttaccacctatgccccaatattcaaacatgcctgcagaccaggttgctcttttgagccctagacctagatcgatagtttctccccatggattctgcataggctcctcaaattcaaaatatccagtatcggccaggcaaggtggctcgcgcctgtaatcccagcactttgggaggctgaggcaggtggatcacttgaggtcaggagttcgagaccagcctggccatcatggtgaaaccccatctctatgaaaaatacaaaaatttggcaggtgtggaggtgcacacctgtactctcagctactcaggaggctgaggcaggagaattgcttgcacccgggaggcagaggttgcaatgagccgagatcacgccactgcactcgagactgggcaacagagggaagactgtgtctcaaaaacaaaatatccagtatccctctttcagtgtagaccatcttaaaaatggcaccaaagcaccttaatactgtcttctcctgcacctcccaatccccttatatagccaagcaccaaggcttgtctagacatttcccacatctgcccacccatcttctgtgctttggccctggtgctagctgccacctggatggctgtggtagcctcgtaagttgccccgctgcttctcctcttgttcttgtccaaaccagtctccacagtggctacagtgattttttttttttcaatagatacgaggtctcactatattgcctatgctggtcttgaactcctgggctcaagtagtcttgctgcagcctcccaaagcgctaggattacaggtgtgagccaccgtgcccggccccagtgatcttaaaatacaaatttgaggcccaacctgggcgacagagcgaggctccgtctcaaaaataataataataataatataataataatacaaatttgagtgtcatatttttctcttaggagtttgcatgaagccccaaatcctcaaggcgcatatgccaacgcaggagcccaggcataaactatcctgccgaccttttcacctcatcatcaaccaatcctaactctgcttccagccacgtgggctctttctgggtggtgggggtgacccaagctccacctcttgttcatcttacctcccaggactgtatgtcaatgtccctcctctaggatttccttcgttttctagatcatcacctccccactctcagctctcatcacagccgtagttggtcgtctacctcccctatagactggaagcttcgttcgggccgtgggcttggctgtcctgctcaccacggtgtccatgacttgggctcagatgtttcacaagagtttgttgaatgaatgtggggaaaggatggacaggggatagacgggtgtggagggcaggcagacacggatcctgaaaggtacacacagaccgaacctgcagtgggaggggtcgccaacaggaccgactggccggggcggagggcagggcgcggctggcgcgcggcaggtggtcggagcagtcgggcgagggagagctgggcgctctccaggctgcgcctccgcagggggcgcccgtggcccggggcgtggcctcgcgcagccccgccctcctcgccggcgccagggcaggcgggcggctggcagctgtggcgccgacatggctgcgctggtggagccgctggggctggagcggggtaagcgtgcgccagggggccctgcccacccgggccgcggcctacatacccagcccccggtccccgcccttcccgggtcaggccagtgcgggtgggccagcggacccggagggggtgggcggggcgggcgccggggccgggcggtcgctaggtgtgggaggctccctgggcgcgggccgggacgctgggcgcccgccttacaacccggcctgtggaggggtcccggggccgcagggccgctggtggcagtctctcctgcgccaccctggactctgcggggtgtccgactaggcttcggccgtcctccccggactgtgcgctcggcctcactccgccgctctccttgcttctctgcgtctcggggtctctgacactcggggtttctgcgccccgcccccgccccgcagacgtgtcccgggcggttgagctcctcgagcggctccagcgcagcggggagctgccgccgcagaagctgcaggccctccagcgagttctgcagagccgcttctgctccgctatccgagaggtgaggggcgcgcggcgcaggggcgcgagctggtggccgtcgtcctcctcctcctcctcctgcttgtcccgagcccggagactacgcctcccggcagctcccgaggcggcccgccttggggtgccaacgcttcagctcaggggttcttcgggagttgtagttttctcggccttctgttgcgggggcggggcggatccttgcgtggtagcgggagagggtctagaggcctgaactcctgcgtctagggctggaggagctggcgactccctgatgccgctgcctcctcacccaggtgtatgagcagctttatgacacgctggacatcaccggcagcgccgagatccgagcccatgccacagccaaggtgggccccgcaccccattgctcctggtgtctatttaactgcctagtcgaactcaatatctccttcatgccagtcatttctgtttcctccctcatgatttttgctaaatctatgtgccaccttactattagtaaataatcgcacatttttaacttaaatgtcatactaaggcatctttagc

SEQ ID NO: 8016 - DNA, 6000 bp, Homo sapiens
ccagccagtgaagaaggaaggaggaaaagcaagagggaatttgccagtaaaggaggaggggatcaggtgaattcaatgggtagaattgctgttctcaaacgttagtgcacatcagtcaccaggaaggcttgttaaaacacagactgccaggccaggtgcagtggcttgcctgtaatcccaggactttgggaggccaaggtgggcagatcacctgaggtcaggagttcaagaccagcctggccaacatggtgaaaccctgtctctactaaaaatacaaaaattagctgggcatgatggtgggtgtctgtaatcccagctactcaggaggctgaggcgggagaatcgcttgaacccgggaagcagaggttgcagtgagccgaggttgtgccattgcactccagcctgggcaatagagtgagacaaaaaaaaaacacaaaaaaaaaaacagattgccaggcccgcccccagagtttctgattgagcaggtatattcgcttcccgagactgctgtataaattactacaaacttggtggcttaaagcaacaaaaatatattatctcacagttctggatgccaaaagtccgaaattaaggtgtcagcacgccacttccttcaaaggctcagaggacaatccttccttgactcttcagtttctggtagctcctggtgttccacttttttttcccctgtagggtcttgctctgtcatccaggctggagtgcagtggtgcaatcacggctcactgcaacttcgatctcccaggctcaagcagtcctcccacctcagcctcctgagtagctgggactgtaggtacataccacaaagcccagctaatttttttgttaatttttgtagacagggtctcactatgttgcccaggctggtctcgaactcctgggctcatgtgatcctcctgcctcagcctcccaaagtgctggaattacaggcatgagccacctcacctggcccataataatgttttgatatatatagtgtatgcagtaacaggtattctatttgtagttgttaggatgtttaaggttagctgatttaacaaacaaccgtaaaatcttagtagcttaatacaacaggttgttacttacataaagtccaaaatgctttatgtaagtccaaggataattctcagcttcctgcagccagtgagtgaagggagaaagagtaaggattatggaggacatttcaggctgagtctagaaatgggctgtgtcccttctgcacccattccattggcccaagaccagtcacatggcctcaacttcactgcaaggagacctgggaaatgaagtcctcctgtgtgcctaggaaagaagaaaccaagttggtgagcatcaaagctgcagtgagccgtgattgcaccactgcactctgccacctacccttcgacttctggttaatcatgtactcatctctgaggagggatcagtgggtgggaaggagggattggtgtattagtctcctatggctgaaatagcaaattaccacagacttactacttagaacaacagaaatgtattctcacatggttctgtaggccagaagtccaaaatcaaggtgtcaccagggccacactccctccagaggctctgagagaaaatcagttctttgcatcttccatctcctggtggctccaggagttccttggcttgtggctgtagaactccaatttctgtgtctaccatcacatggtgctctcctcttctgtgtcttctcctctgtgtgtttcttagaaggacacttgtcagccgggtgcggtggctcacgcctgtaatcccagaactttgggaagctgaagtgggtggatcacgaggtcaggaattcaagaccagcctggccaagatggtgaaaccccatctctactaaaaatactaaaatcagctgggtgtgctggcaggcgcctgcctgtaatcacatttactcgggaggctgaggcagagaattgcttgaacctgggaggcggaggttgcagtgagccgagatcacaccacagcactccagcctgggtgacagagcgaggctctgtctcaaaaacaaaaacaaaaaacagacacttgtcatcagatttaggggtcacacagataatgcagtatcttgagatcctgaatgtaattatacccgcaaaacccttttttccaaataaggtcaccacaagttctggggattaggacatagacatatctttttggagaacgccatgcaacccactataatcagctataattatttttgtagaaaatgatgggaacctgacttaggatggtggccttggaaagaagtggctgggtttgcaatgtactttaatggtagagcagagaggcgttggtggtggttagaaacagaagctgaggggctgggcgcagtggcttacacctgtaatgtcagcactttgggaggccaaggcagttggatcacttgaggtcaggagttcaacaccagcctggccaacatggtgaaaccctgtctgtactaaaaatacaaaaattagtcaggtatggtggtgcatgcctgtaatcccagctactctggaggctgagacaggagaattgcttgaacgcaggaggcagaggttgcagtgagccataatcgtgccactgcactccagcctggtcaacagagtgagactccatctcaaaacaaacaaacaacaacaacaacaaaaacctgggtgtggtggctcatgcctgtaatcccagcacttggggaggccgaggtgagcggatcacttgaggtcaggagttcgaggtcagcctggccaacatggtgaaaccccgtctctaccaaaaatacaaaaattagccgggcgtagtgggtcatgcctgtaatcccagctacttgggagaatgaggcaggagaatcgcttgaacccaggaggcggaggttgcagtcagctgattgcaccactgtactccagcctgggcgaagagtgagactctgtctcaacaaccaccaaaaaaataaaagctgagggatgaggcaggtggtgactcagcgtttggatacagaactgtgtggctcaggactgggtttcaaaaagacccctctggggctatgtgggggacagactggagggagaaactagaagccagggagaagcctaaagtcagggtccaggtaggagagcaggagcccagagcctgcctgagccctcaggacagagaagaggggtggagtggagactcagcaggcaggagggatctggctaagagactgatgcgctgttggggaagaggggacaagatggagctttgacctcatgactagatagatggtggggctgcctcagatgaggaaaccaggtgagagaatttggggacatcagaggaaactgcagaggccactgggtgtgcacctgcaaccaggcactgcagacccagatctgactgtcaggatcccaggctcagtgcctcctcctctggggcctccgctcctcgggccccactgcagaggcaggaagtaccgcctgatgctcagcttccgctgggggtgttggcacggcccagcgccctccccactcccagggaccttcccacctcgagcctgtagcactttcacttccccaggtacccagcccctgcccccagcacctgggtgctccctggtccagaacaggctgcagactctgagaggcacaaaaacaagtggggaagggggagacagagaaaagaagacaggctgggcacagtggctcacgcccataatcccagcactttaggaggccaaggcaggaggatcacttgagcccagaaatttgagaccagcctaggcaacacagtgagactcccatctctacaaaaaatgaagaaaattagccaggcatggtggtgtgcacctgtagtcccagctacttgggaggctgaggtgcaaggattgctcgagcctgggaaggttggggctgcagtgagctatgatcgcactactgcattccagcctgggcgaccctgtctcaaaaacaaaaacaaaagagagatgaagagagaaaggaggaaggacccaaagaaggggccagaagcagagagaggccaggcacagtggctcacgcctgtaatcccaacactttgggaggccaaggcaggagggtcgcttgagtccaggagttccagaccagcctgggcaacctagtgagaccctatctctgtttttttttaattaaatataaaaaatacaacactcccactccatagcaagaccccatttctacaaaaaatacaaaaattagccaggcatggtagtgtgcacctgtaatcccagctactcagaaggcagaggtgggaggatagcttgagcccaggctacagtgagctgttttccccaccgtactccagcctgggtgaaaagtgagaccctgtctcaaaaagaaacaaatatataaataaaataaagaaacacagagagagggaggatagagaccccaggaggcaggaggacagagacccagaggagggagagactctgctgagataaggggacagagatggggagtagcaggaaggtggggacaaagacccagagaggaggaacaagagacccagggcaggaaatgggagacacagctggatgcagagatgggagagcttagcaggccatgaggtcagagtgtctgtgaggtcagctgctgtccagggtcagccctgaggtccccatgcccagaggtgggttccagtagatcaggggtccctttagatcccccagcgcctgagacatggagacctgggagggactgccccatgagtccttggtgcccacaaattccaaggcccctcaggtaccagagcatgtgtcccagtggagcaggtgagggagacagggacagagagagagacagaaagccaccttacatgaagcgggagtgggtggagccccacccctggaacttcctcttttggggttcttcctttctctctcagctctccgtctctctttctctctcagcctctttctttctccctgtctcccccactgtcagcacctcttctgtgtggtgagtggaccgcttaccccactaggtgaagatgtcagcccaggagagctgcctcagcctcatcaagtacttcctcttcgttttcaacctcttcttcttcgtgagttgcctcatggctacccagccggggcccagcccctgccgctaacccagccctcatcttcccctgtggcccacccccgtatccgcatctcctctccccaggtcctcggcagcctgatcttctgcttcggcatctggatcctcattgacaagaccagcttcgtgtcctttgtgggtgaggggggctggggcaggtgggagggcctcccccaacccaagcaacttcctggggtctcccttgtctcagggagacctacggtgccctactctgcaggcaggctacaggctcccatccactgctcaccggaggcttcttggagcctgagtcttcttccggcaaatggggttgtgcatacaaacaacaatgatcatgagagccatttctcaagcacttcctatctgtcgggacttgtggctggtcagatgcccccacaaaccttcccctcgcttgaggttcagagaggggaagccccttgatggatgtcatacagcaaggacgtaaaagagccaaaataacattaataataggaaaataataatgaagtatgaccctaaataataatgaaatataaccctaaacgctcatatttaagaagtctttgccctgtgttgaggactgggttgaacacatgtcctcatgtgtctctcaaaatgaccctaggggccgggcgcggtggctcacacctgtaattccagcactttgggaagccgaggcaggtggatcacttgaggtcaggagttcgagaatagcctggccaacatggtgaaaccctgtctctactcaaaaatacaaaacgttagccaggcatggtggcacatgcctgtagtcgcagctactagggaggctgaggcaggagaatcacttgaacctgggaggcagaggttgcagtgagccgagatc

SEQ ID NO: 8017 - DNA, 6000 bp, Homo sapiens
ccctaaacataatcacaggactcctttggagagggaggcaggcgggttggtgtcggagagagaagacgtgaggaccgacatatgggtcagagaggggagaggatgccgtgctgctggccttgaagatggaggactgggccatgagccaaggaatgctggtagcttctagaagctgggaaaggcaaaaacaccgattcttccctggagcctccagaaagaacacaaaattgttgggtgcggtggttcacgcctgtaatcccaacactttgggaggccgaggcgggtggatcacgaggtcaggagttcgagaccagcctggccaatatggtgaaacgccgtctctactaaaaatacaaaaattagccgggtgtggtggcgggtgcctgtaatcccagctactcaggaggctgaggcaggagaatctcttgaacccgggaggcggaggttgcagtgagccgagttcgcaccagtgcactccaagctgggcaacagagccagactccatctaaaaaaaaaaaaaaaaaggaacacaaaacctgtgagtatcataggtggtccaaggagctttacgaatgtcctggtaatgttacagcagggccctgggggtggggacgtgagagctaaggctgggttatagaggaccccacagtgatggtagtcagacttccaggaaaagcatagcaggctcctgagggacactgtaacagggcattgaggattctgtcagggtccaaggaaccttaaaatggggcccaggggctgctggaatagtgtcctgaagacattacatgatcccaaggaaactagaggggacagctaaggacagggcagttgcctcagggtattttggggaagagctgagggtgctgtaattaggattcttaagaaattaaagcaggtggccaggcgcagtggctcacacctgtaattcccagcactttgggaggccgagtcgggcggatcacgaggtcaggagatcgagaccatcctggctaacacggtgaaaccctgtctctactaaaaatataaaaattagccaggcgtggtggcaggctcacgtagtcccagttactcgggaggctgaggcaggagaatggcgtgaacctgggaggcgcagcttgcagtgagccgagactgcaccactgccctccagcctgggcgacagagcaagactctgtctcaaaaaataaaaaaaagaaaagaaaagaagaaaagaagaagttaaagcaggttctttctgtctcttaggagtggaccttgggatgggtgtcactggatctcccttctagtaggacacagggagaatcaggtaggacacagtaggacacaggcagaatgagaaaaatgaagacattctggacaaggagaacagagatttacctggttaattttatgtgtcaatttggctgagccacagtgagtgaagagatattcggtcaacattattctggatgtctctatgagggtgttttaggatgagatttacatatatatttgtgagacagggtcttgctgctgcccaggctggagtgcagtggcgccatcacggctcactgcagcctccaactcttgggctcaaggggtcccccagcttcagcctcttgagtagctgggaccacaagtgcgcaccaccacacccggctaatattttaattttttgtagagataagctctctctgttactcaggctggtccttgaactcaagcgatcctcctgccttggcctaccaaagtgctgggattacaggcatgagccactgtgcccagctgagatttatgtttagattgttaggctttgagtaaaggaggttccccttcctgaattgagggaggctcatccaaccacttgaaaccctgaatagaagaaaagtctcggctgggtgcggtggctcacgcctataatcccagcactttggaaggctgaggcgggcagatcacgaggtcaagagatcgaggccatcctggccaacatggtgaaatccccgtctctactaaaaatacaaaaattaaccgggtgtggtggcaggtgcctgtaatcccagctacttgggaggctgaggcaggagaatcgcttgaacccgggaggcggaggttgcagtgagccaagatcgggccattgcgctccagcctgatggcagagcgagactgcgtctcaaaaaaaaaaaaaagaagaaaagtctgcccagagggagagggagtcctgctaggcaattgtgtctcccacctgctggctcccccattagactttggggtttctttctttctttctttcttttttttgagatggagtcttgctctgtcgcccaggctggagggcagtggcgggatctcagctcactgcaagctccgcctcccgggttcacgccattctcttgcctcagcctcctgagtaactgggactacaggcgcctgccaccatgcctcgctaatttttttatatttttagtagggatggggtttcaccatgacctcgtgatctgcccgccttggcctcccaaagtgctgggattacaggcttgagccaccgcgtccaacatttttgaaattttttttaaaaatagagacagggtctccctatgttggccaggttggtctcaaactcctggactcaagcgatcctcccaacttggcctcccaaagtgctgggatgacaggcatgcaccaccacacctggcccccgcatcagactctgaaccagctgaacgtccactaatcctggaagccaattcctcaaatgaatctctttctgtgtatgcatatacacattctgtggattctgtttctctagagaacctgaactacctgaccagcagttccactcccagatgtatgctcaatagagctgaaaacaggccaggcatgggtgtcttgcacctgtcatcccagtgctttgggaggccaaggtgggaggctgtcttgagcccagcagtttgagaccagcctgggaaacatagcaagacactatctctgcaaaaatacaaaaattagctgggcctggtggcaagtgtgtgtaattccagctccttgagaggctaaggcaggtggagtgcttgagcttgggaggttgaggctgcagtgagccatgatcgctccacggcattctagcttgagtgacagagccagaccctgtcaaaaaaaaggaaaggaaggaaggaaggaaggaaggaaggaaggaaggaaggaaggaaggaaggaggcaaggaaggaaggaggcaaggaaggaaggaaggaaggaggcaaggaaggaaggaaggaaagacttcatattatatgattcaatttctttgaaatgtgcagaataggcaaatctatcaagacagaaagcagatgaatggttgccaggggtctgggagcagcggctgtttaacggggacagaccttctgtttggggtgataaaaaagctctggaactcggatagaggtgacagttgcacagcactgtaaatgtgttaaatgacagtaagggtaaatattttgaatattttaccacaatgaaataagtgtatgggaagctttgtagcaggagtgtgggcgggggctggtgcctggaggggccttcgagtgaggcagcattgtatggggaccatgtggtcactgaagtcctagcagaaggatgtggtttttttttttttttgagacggagtctcgctctgttgccagtctggagtgcagtggtgcaatctcggctcactgcgacctccacctcccgggttcaagcaattctcctgtctcagcctcccgagtagctgggaccacaggcccaccaccacgctcagctaatttttgtattattagtagagacgggggtgtcaccatattggccaggctggtctcgaactcctgacctcgtgatccgcccgccttggcctcccaaagtgctgggattacaggcgtgagtcactgcgcccggcccgcagaaggatattaaagagcacctgcaggaattttttaaggggatgccgggggaagggcttgaaggaggaactaaggaggcttccagaagattttgattaacagcgagcgctagggaaggccacggggatacagaggggtaggaggaggatccagagacctccaagttgtggactccggaggcatcgagttcctttcccagttttgtcaagaattccctgagcggcagacaccctcaaagtaaaaaacgggaaccacagagaaggaaaaagaagaaccacaagcgttttgagaaacaaacaggctgggcctagggcctggggtgtgccctgcaactggggggtggggctggatgttcttggagtcagggagcagcagcctcccacaggatgtgagagaggaactggggtctccagtcacgggagccaggagccggccagggccgcaggcaggaagggagcgaggctgaagggaacgtgagccgaccagggcccgactgagggaggaggggctgggggcctggaaccctgggtctgagggaggagtggctgggggtctcgacactgggtctgagggaggaggggtgggggcctggattcctgggtctgagagaggagggactgggggtctggacgctgggtctgagggaggagggaggaggggccgggggggcctggactcctgggtccgagggaggaggggttgggggcccggactcctgggtccgagggtagagcggttgggggcccggactcctgggtccgagggtagagcggttgggggcccggactcctgggtccgagggaagagcggttgggggcctggactccggggtctgagggaggaggggctggggcctgaggggggcggaaggggcgtggcggagctcggggccgggactctcagcctatcaagtgtctgtaattaattaaccaactgagatccagttcaggggtgaaagttcttcaggtacgaggagggcattgttgtcagtctggaccgagcccgcagagcccctcctcggcgtcctggtcccggccgtgcccgcggtgtcccgggaggaaggggcgggccgggggtcgggaggagtcacgtgccccctcccgccccaggtcgtcctctcagcatgggggtcccgcggcctcagccctgggcgctggggctcctgctctttctccttcctgggagcctgggcgcaggtgagggccgctccgggccagggccctgctgcaggcgggcggcgggaggcggccccaggcaggcaggggcgaagccagcgggacccgagttccccgcgagcccctggcgctgccttctccgctcaattaactttctcaacgtctcctgctgggcctgaggctgggaaccacctgtcgcctcttgtgtctgtttccctctctctctctgggtctctgtccccctctctttctgggtctcttgtctctctctctctgggtctctgtccccccccccccgggtttctgtcccctctctctgaatctgtccccctccctccataatagattcttctccctccctgggtatctgtcccactgcagtctagttccccgcccgtgtgctcccttcagctctgtttctgtctgcagaaagccacctctccctcctgtaccaccttaccgcggtgtcctcgcctgccccggggactcctgccttctgggtgtccggctggctgggcccgcagcagtacctgagctacaatagcctgcggggcgaggcggagccctgtggagcttgggtctgggaaaaccaggtgtcctggtattgggagaaagagaccacagatctgaggatcaaggagaagctctttctggaagctttcaaagctttggggggaaaaggtgagattccggtctggaggggcaaggggccgggtccatgctccggggccccgcttacctgtgtttgggcgccccaggtccctacactctgcagggcctgctgggctgtgaactgggccctgacaacacctcggtgcccaccgccaagttcgccctgaacggcgaggagttcatgaatttcgacctcaagcagggcacctggggtggggactggcccgaggccctggct

SEQ ID NO: 8018 - DNA, 6000 bp, Homo sapiens
ctgcaagtgaagcggaatgactacgtgcacgccctggtggcctacttcaacatcgagttcacacgctgccacaagaggaccggcttctccaccagtgaggcggggcccacagggctgggggccgttcccgagccagggcggaggcgcacccacgtagtggagggggtgacagaaacgggcagaaggaaccatggggacacgcgtgttccagtgtgagctctgccatgtagcagtcacgtggccttgggcaagtgacctgagtgtgcagtgcctcagtttcctcatccacaaaaggctgacacggtccctgtctccaaagctcaatgacagggaggtgactcgcggatagcagtcccatcagctgtcatgggggtgggcattccgacagagggaacgcaagggtggggttggggggggcagcaggccgaggccggctgacccgcccgcgcccccaggccccgagtccccgtacacgcactggaagcagacggtgttctacatggaggactacctgaccgtgaagacgggcgaggagatcttcggcaccatcggcatgcggcccaacgccaagaacaacgtgaggctccgggcagctgggtgggagggtggcagctagggcggggagtgtagattggggggggagtggtgggggaggaatggtggcagcgggggtaggggatgggggcagccggggtgggggatgggggcagctggcgggggcgagcacctctgcctattcccgggtccccaagcccctcagccccatgcctgtctacacagcaggattgcttgagcattcaccggaagttatgggcctggggacccaggctgaaaccctgccctcctggtgcttccactctagacaagggggtcagtgacatggtgatgccagttggaggtgacctctgtcaggctgggagcagggcagacaggtgttggtgtaggtgggctccagggcaagaggcagcccccagtagagtgcacggggttttctagcccagctgggaggcatgagaggagaaaggcagctttttgttttctgctcccctttctttttcctcctgagcacttggcaggagctgccatcacctgagatcagggggcttccgggggagctgggggggcttctcggagacagggtctgggcagagatccagtgtggtgggtctgagcaggcaggaggatggaaggcttggagcctggagtcgccgggagtggtctgggttggaaaagtgggtcccggccgatgggtgcgagggtgggtggcactcagggtagtcatggaatgtggaccctgggacacccacgagcctgtgacagcagcagttgtcaactgggcagttttactgccccctccgctccccgcccccccccaggacgtttgccaccgtctgtggaaacatttgtggttgtcactccggagaaggggtggtcctggcatctggtaggtaggggccagggggctggtaaatgtcctgcagccacaggaccaccccctacaaagactcatgcagcccccgggaccacggcactagctgggaaacggatactggagagggaggaggagtcctcgggcgttggtgactttgtctcatcttcatgtgctggagggtatggggggaggagaggaagtggagacagcaggctggaccattgtgtttcactggaacgtttgcctgaggaggaagtgggcttgggagaggttttcttttttatgaaagaagcaatcactgcattgctgatgggaatcatcctgatggagaaatccaagggcaagggacagcagctgggctctactcctgagtgagtctagtgggcttgggggtgtccatgtggtgctgtcccttggcagggtcagggcagctgctagggtgggaccagcagttggggtctgcagcgtggagatgggcaggaagctggagcccggctcatcgtcgcatagcctgcctgcacccgccccccgccaccacctcctggtgggttccgccctcatgccccacctctccctgcagcgggacctggacttcaccatcgacctggacttcaagggccagctgtgcgagctgtcctgctccaccgactaccggatgcgctgaggcccggctctcccgccctgcacgagcccaggggctgagcgttcctaggcggtttcggggctcccccttcctctccctccctcccgcagaagggggttttaggggcctgggctggggggatggggagggcacatcgtgactgtgtttttcataacttatgtttttatatggttgcatttacgccaataaatcctcagctggggtctggctttgtttcctgggggcaaaggaggtttggggttcctttcgcaggtactgcagtgccagcctcagcagtggggggaccggccttggcacctgctggtggctgccattctgtggatctgcgtctcccgtcccccgtctctaggcctcttgctccccttccttggttccttctcggggtccctgtcctccacagctgtctctcagggtctttgtccaactcttttcatccctctcctgggtctgcgcccctcccctctgcggtacccgtgtcctgcctagtaggggatgggggtggctttccagcacagccagccctcaagtttcccagaacagtctccccacctccccccaacactcgacattgttcctctctggctgttttttcctgttcgggtcccttcaaggcccaactgtgcccagccctctgcagctggggacactgagtgggttgggggtgtatgtttgcaaggatagaatttctcatgggggagtggccctgcttcctcccctagaatggcttggggcttagggctggggacttgccctccatggaggtcagtgggagttgcagctgtaaggtggcagggcctacccatcttacagaggtgaagacgaggtccctctgcctctgctgcagacatggcgtctgcacccacccttccaccctcagggcctggccacggggtcctgggtcccccacaatactgtgcactcgacctggttgacccaggacaccctcctcgttgaacagccctggctacacctgcttcagtgcaactggagccctcaccggcgagtgcctgacacctcggccttttctcttccggaggggcgctcctcagtgtgtttggggtctccctcgctccacgccctccagggggccgcatgtgcacttgccctgcattgcctggcccccgaggttccagggtcccaactgtctactaaccggcttcccgacagggtgagggtgaggtcgcatctacaaccagagccagcgcttccccgccgccaccccttttcttggaatcccgctgcttagctacctgcgggtgtcattggccccgccccatttccccacgctttgaagggggcgagtctccacagacctcctagggggatagacagcagctggtgtgaccccacacacccagtgaggtctctggagccgcggtgcgggaagcggggacccgggtttgaatcctgcccctctggtgtggtgcggcctcttcccacagacttttggcctcagtgttccccgcctgggaagtggggactggccctggtacctggctccagagctgcacccagaggcgatcagcccggtgcgggaacggggcggggtggccgcaactacgggccacggatcctgacccgccctgcccacgatgactatccacatcctcatcctgctgttgctcctcgccttctccgcccaaggggacctggacactgcagccaggtgagaaacccgggtggcagcagggacagggcgggagggagaccgtaaagggcgagcgccctctcccggccgcggaacgggcaggtgatctgtaagcctccccgctggtcttggagtgcttgggtgcccacctccatcacgctccatctctcaattcggtttgaacccggttttctcccacgctccctctccaggcgaggccagcaccaggtcccccagcaccgcgggcacgtctgctacctgggcgtatgccggacccaccgcctggcggagatcatatactggattcgctgtctccaccaaggagccctcggggaaggccagccacgagccccaggacccctacagctatgggcgccgccggtggcgcgaggcggaagcccggctcggttcccaggattccggcctgcagcgagggggctagcgcagtgcccagctcgctgggtgacctcgggcacggctcgtcccctcctcggcttcagtttgcctatctgtatgttggagcttctactccacatttcttctcccctaactccagcccctgaaaccgtcttccccagtccctccccgggctgcgactaggttggacctagaagcacacgggaccaggctgggcgaagaacactgacgcccagagccgaataaacaagagttccgtgtttcagtctctgcttctctgtacctatttcgacctctcagtcgaggctgggtctctaatatacctttctctattagccatgctgcttctccctcacggaagtcccactgtctaccttgaatccaacccgctgtggcgcctttcttgccaactcaatccatgcaccttccgtgggtggttttggcgggccgtcctgacccccaaacatccctcctccctccctggcgtgaaagggctgagatttgctccggcaccctacgcgcctgacgttataatgcacctggggtgggctgcgacctcccagctgagccttgttcctcgaagagacaggagactaagagacaatgagctgagtgaggagcccaggaacccgggttccgaacagctgcgtagaatgcgagcggccaaatggtggagaatctggccgggtaaaaggagacggaggactggggatcgaacggatgtaggggattggacgccgtggctcgaagggggcggggatagaacgcggggattggaaggaggcggggataaaacccgggacctgaatacccggctagggacacgagagagaggaatcggggtttctgggtgacggtgatctcggggtgggcaggactccaaaggcccgtcgacccggtggtggactccttgcactgggattggacatatgcaagcgggagatttggggccggcgctcaaaatcggggggcgggggtggactcgggtttggaccccaggatccgatcagcggacccttgattcaacgtggtaagtactggaccccaggggctcgggctccggcggggcctggagtcctgtgtctagggttgggcgtgcaagcctctccatcacttgtcctcgacgctcgcctccgctcacagcctcagcatcccaggctgcgaggcatgcgcagtgggtgcttccttccccattccctccagcacgggcggggggaggggacgctgagcggatgaatttatagacaccatccccctcgccttggcatgaaaagcggcaatggggtggacagcgtcaatgtctaacaggtgtttgtttcatatgggtctaaaactaatgcttttctcaagaccccgcaactcagcctggaccagtttccctcctccacccacccccgaatcttgagaatcctgtactggggggagggcactgcccccgcaccatgttcttgggagagcaggtaaaggggttaacgcgagctatccctctggcctctctatgcgttcccagaggtcccgaattgacgtccttccctcaaaacctccgggtctacaaaccaggaccctcaagacccttcaggtgcttagagaaggatgagctaggttatgtagtcctgggtcggcgcaaaaaggcagctgaaagcgtgagatcccgggtctgagggaggaggggctggggcctgggcttctgggtctgagggaggaggggctgggggcctggactcctggatctgagagaggaggggctggggcctgggcttctgggtctgagggaggaggggctgggggcctggactcctggatctgagagaggagggactggggcctggactcctgggt

SEQ ID NO: 8019 - DNA, 6000 bp, Homo sapiens
ggcatgtgctctgcgctgttttctaccccaagtattactgggcaggatccggcctagctcatggttactgccaacaggatgaagccactcctggaaggaacactccagtggctacaaacaaccccaaacaattgcaggagaagaaccagggccagttcacctcgttggtcatccccagacctacagctgctccctgaacctcagagatgccaatgaggcggatacagggacgtacttctttcaggtggagagaggttattacatgaaatacagttacggaaatgagaagttgttcttgcatgtgacaagtagaggaaagtcccagaaaaggagctctttctcctcattcggggtcatgggaagcattcaggggccctggggtggggctctggcacagggagtgcccccactcccagaaacaggaatcagcccctttctcttttctagtgctgacccagccacctgagatccatgtccagaagagctgcaatcaggtgaccctggaaatctgacttgcaccgtatcatgggccggtgagaagggaaccccaccaaatttcttctggataagagaagccaccaattttacagtctccaagacccctcttcccgaccagtcctcagttctcagccttatcccacagccatgtgaccatggcagcaacctcacctgtcaggtgaagttcctccgagctggtgtgaccatggggagaaccatccagctcaatgtctcttatgagtggtggatcaggacccccatgcccagggccctgagaacaatgggtgtcaggagggaagggaggtcagaatcaggaattcttttttttttttttttttaagacagagtctcgctatgtcacccaggcttgagtgcagtggcgcaatctctgctcactgcagcctccgccttccaggctcaagcgatcctcctgcctcagcctcccaagtagcagagactacaggtggcaccaccatgtccagctaatttttaaattttgggcagagatgggttctcactgtgtcacccagtttggtgttgaactcttaggctcaagtgatcctcctgcctcggcctcccaaagtgttgggattacaggcgtgcaccactgtgcctggccagagtatgagtttttttgttttttgttttgagatggagtctcgctctgtcacccaggctggaatgcagtgacatgatctcggctcactgtaacctatgcctcccgagttcaggtgattcttatgcctcggcctctggagtagctgggattacaggcacctgccaccatgcccggctcacccttgcctggctcagctttgagctctgtcttgatgcctctcctactttctgccccttgatcctcctcttatgcatggcgtctctcttcccccatttaccccattcaggatgcagcacttcctccaaatgtcacccttttcatccactgtactcatgagccagtgggtgctgtaacttcccttcctgaacaatgtctcccgtcatgccctccttgcttagtcccctgtcctccatcagcatgaccaggccctttgctgtcttttttttttttttttttttgaagatgaagtttcgctcttgtcgtccaggctggagtgcggtggcaggatctcggctcactgcaacctccgcctccttggttcaagtgattctcctgcctcagccttctgagtagctgggattacaggagcatgccaccatgcctggctaatttttgtacttttagtagaaacaacttttcaccatgttggtcagggtggtctcgaactccttgacctcaggtgatccaaccgccttggcctcccaaagtgctggggttacagatctgagccgccgcacccagcctctttgctgtcttgatcattgttccatgcccctccccagcctcccatcttcccttcatgctgtgcccctgatagcacaagcccagaaagaccttcctgtacccagtaccagccccaccccttcctggcccagagtcccctgtgactcctcggcaccctcagtctaagctcctcagctggtcatgccccaacacctccatgtccccttggaagaccccagatatatgtgcaggtctcttcatctgccagactgtttcagagcctttgcacatccctcgtccttcacttgtgatgcctgtctgtcttgcgtcaatatgacccactcccccttccaatctcagttcagcctccttccctccagggtctgtcagctagcgtggactccgggatttgtgtacataagagcatgagccgggccaggcttggtggctcacgcttgtaatgccagcactttgggaggctgaggtgggcagatcacgaggtcaggagttcaagaccagcctgaccaacatggtgaaatcccgtctctactaaaaatacaaaaattaacctggcgtggcggcacatgcctgtaatcccagctactcaggaggctgaggcaggagaatcgcttgaacgtgggaggcggagcttgcagtgagctgagatcacggcactgtactctagcctgggtgacagagcaagactccatctcaaaaaaaaaaaaaaaaagcatgagtcaaacagtcatgtgtcttctgtctcattccgaatgggaggtaagggagaaaccgacctctcagcaccactcttcctgctttctctgtttttttcgtccagccccaaagaccctgaacaatggtacaccactgcctgtcctggagggagagtccctgtggtctgtgtggctgacagcaccccacctcccaaccccgcccggctgagctggtcctgagagggaagaacactgaattcctcccagctctcagcacccgggggcctggagctgcctcagataggggctgggacggaggagcattgacctgttgggctcaccacccactgcgatttcagcacatttccctgagcctctgtgcagagtgagttgcaggacagctgctgaggcaggcagcctagtcgggtgtttgggctgtcagaggggtggaggcctgggaacagaatctcacacgcttctaccctttcccaggaagcccctctggctacagatgtgtgagtgaaaagcaggagggcttctggcccctggttctcacctgatcagggggccatcctgggcactggcttccccccaacccccatggcctcacctggagctactactccaggtgagcaggcctgctcttttctagggaagccgaaggattgttccccgagttccaggtggggctgagctgtcctgtcccgcctgagttagaattgaagtggccgatgctaatctgaggcccgtgttggctctgcaggtgtggagggccccaggggagcagtgctgagaggcctgactgagcccctcctgctcaagacagaactcagatgtggacacccagccctgcagaacagatgcaggacaacactgtcagccatggctcagcccttctgaccattgcagttgagatgctgcaacttcccagggagcgactgggcaaacatgggggcctgaggtattcacggcaacgtgcacagatgataaaactacctagaaaagcatggagaccattagcgttaaagtgaggctggggctgcttcaggaggaagtggggtgtggctgacaggaagtggggtaacaaagaggaggtgttgcggcatccccagtgttctgtttctctaagcatgttcatatgtgtaaaccgctgagattttttcttggggggaagacatttttatctatatggcttatatttctcccaaaaatatttctagaaaactgacatcggtctaaggaggctccaccacacaggatactcccagttcctcccagcccagccacacagttacaaaaaatcttctgctgaattcaggtgcatgtttcttctcccatgaaatcctgcccatcgcggagggtgcatgccccggggctggtgtcctcactccacatctcctgttcaccgggacccctgggagcagagcttgcagaagcaaagccccagggccagctgatccctcatgttctggagtaaccagggaagtgtggctgagcgagacatcggtggtgaagaaacccttcgtggtgcagtgaggaaaggagaaatatcttcccttttgaaatctgccccttttcttccgaatttcctcccttccaagccccacagtacaacagtcacagcctcagtttcccagacctcctgcgagccaggctcccctctgtgtccttggcgtgtatcaacacatagaatcctcacctccacagccccatgtccctctgctcagtcctcctgagattgaacccctgacctacgggagagtgaccccatcctgcctgtgccccccaactgaagctcctgccgtggacagctcagacgtcaggagcctccatgtctcccctccgcacagtgaccccttggggacagtgtccagctctgctgtgttgacctcgttgtgcagaaagggggtgcccacctcgtgcttgcttgggggggatgagaggctgcctgctcaccccacctgcacccccatctctcatggccccaagtcccacctctgagctacgcagatatccacagcctctgactcaggggtctggccagatgggactcattttcaccctgcagaaaatgtcacctaaggggaagggcattgagagggaggcaggaggtggggtgggccctgcatggggtgggaatctgggtgagtctgtctcccgctctggcctcagggacccaggagtgaacatggggtggtggacggtggatctcccagggctgacccgggcctgacagtgtctgggtgtaaagttcctcctctgaggaggtcactgttccgacctcgcccctgtcttcctgtagggcctcctctaagtcttgagcccgcagttcctgagagaagaaccctgaggaacagacgttccctcgcggccctggcacctctaaccccagacatgctgctgctgctgctgcccctgctctgggggagggagagggcggaaggacagacaagtaaactgctgacgatgcagagttccgtgacggtgcaggaaggcctgtgtgtccatgtgccctgctccttctcctacccctcgcatggctggatttaccctggcccagtagttcatggctactggttccgggaaggggccaatacagaccaggatgctccagtggccacaaacaacccagctcgggcagtgtgggaggagactcgggaccgattccacctccttggggacccacataccaagaattgcaccctgagcatcagagatgccagaagaagtgatgcggggagatacttctttcgtatggagaaaggaagtataaaatggaattataaacatcaccggctctctgtgaatgtgacaggtaaggcacaggctccaggaaaggccacagggaaaggtcatgggggcggcagggaaaggctgggatggagcccctgccccaggagagggcttagggtgaagcgagttggctcagggcaggagctggaccagagcctgagctccccccagggctgcaccatggatcctctgacctgatcctgagtccccctctcttcaccagccttgacccacaggcccaacatcctcatcccaggcaccctggagtccggctgcccccagaatctgacctgctctgtgccctgggcctgtgagcaggggacaccccctatgatctcctggatagggacctccgtgtcccccctggacccctccaccacccgctcctcggtgctcaccctcatcccacagccccaggaccatggcaccagcctcacctgtcaggtgaccttccctggggccagcgtgaccacgaacaagaccgtccatctcaacgtgtcctgtgagtgctgggccgggacgcctgggtccctgatggggtgagcgtcaagcctggacactgggtgctgggtcccggaatctgggctggtggtggggtcaggaggacactggctctgccttccctgtttatgcggctcctggggacagacaggg

SEQ ID NO: 8020 - DNA, 6000 bp, Homo sapiens
ctgtaaacttcacttccccaaaaatgtctgccatcatgcccttcctcctccctccattccctgtctcctcccctctatctgcatggccaggcccttttcggtcttgacgattgctccatttcccacccaacatcccggtctgcagcctctcgcctccatgctgtggccctcgcagcacaagccctgaaaaattttcctgcatccagagctgacactgcctcttccctgctcagggccctctctggttccctggaaccctcagtccaagctgttcagctgatcatgtcccagcacctccaatttccccctggaagaccccacacatatttgcagggcccttcatctgcccggctgtctcatggcctgtgctttttcccctccacctgaggtgcccttagccacctgttaatatgaccaactcccccactagtctcagctcagcctctttccctgcggggtctttcagctttttgaactcctggatttgcattcgtgagtatgtgtcacacagtcaggtgtctcctctttctgtttttgtggggttgtgggagagacagcctctcagctccaccctccccgctctcactgttttcctcactcaaccctgaagaccctgagcaatggcacctcgcttcctgtcctggagggtcagtccctgggcctggtctgtgtgactgacagcaactcccccgcctcactgagctggtctcaggagggaagaacactgaatctctcccagctctcagcaactgggatcctggagctgccccagaaagggactggaggtgaaggcgacctcacctgtgaggctcagcacccactgggctcccagcacatttccctgagcctctctgtgcagagggagctgctggacgggtgctggggcaggcagcctggtcaggtgttgggctgtgagaggggcctagacctaggaacaaaacctcaccctcttctccccactcccaggaagtccctctgggtgcagatgtgcgagtgaagatcaggagggctcccagcccctggttctcacctaatcaaggggcgctcatgggcactggtttttccttcacccgtggcctcacctggggctactactccaggtgagcagggctgctcttttctagggaagccgagggattggcccccgagttccagatggggctgagctgtcctgtcccgcctgagttagaattgaagtggccgatgctaatctgaggccggtgttggctctacaggtgtggaggcccccaggggagcagggctgagaggcctgactgagcccctcctgctcaagacagaactcagatgaggacacccagccctgcgggacagatgcaggacatcactgtcagccatggctcagcccttctgaccactgagatgctgcaacttcccctcctgggagggagcgattgggcaaacacttaccctttgctggaaatctcaaggcacagcacgggtgctcacaatctgaatacagaacgaatgaatgaatgaatgaatgaatgaatgaaatgtctttccttatctcatgtgagagacttgacagttctttcactctccaagtaacatcagcttcccctgtcccagcccagtctgtcctgggcagacaagattaattaagtggctcctgggcagacattggtgcaggagacagggcccaggagacctgtgtgatttgggcaattcgctttctatctctgtccattcatgctgctacaacaaaataccataaactggccagtttataaacaacagaaattcatttctcacagttctggaggctgagaagtccaagaccaaggtgccagcaggtttggtgtctggagacagtttgcttcctcatagatggtgccttttccttatgttctcatgtggtggaagggctgtgcaaattcccctgggtctctcagatgaggggactaatcccattagactaatcccagagtcctcatagcctaatcgcctcccaaatcattataccttctaatactatcacatggggattcaaatttcaacaaatgaattttgaggtgacatattcagaccatagcacttgtcactgtggaccttgatgtcttcctctccgaactgtggaagtgggagtagagggcttgtcagctcccctgggtcatatgtggttcacaagttcctcctttctacagattctgtggcttccttaagtctctccttcccatttttttttctgattttaattgcaaactggggactgtgggaaagagatgggccatggtctagcccttctgaggcaggaggagcatagaccaatggggcaggagcatagcaaagagaattaaaagttggataaagggcagaataagtaaaagcagagagcagaagcaaggtgaggggacgggtgagcaagaagcaagaggcagaagttgagcagccaaaacaaaaagtaagatagagaagtgagcaaggacacccgtggccagcaggatctggaccaaaccagtaaggggcagttcttcagagctatgcatgtgcattagagagaaaaagtatccttaacatgaccctgtatgataatcagctcattaaagttcatgcatatggactgcatattatccatgtacttaaaattatgggatgggtcaaagtaactaagcaacatacttaaccatcaaaaaggcaggcactggccaggcgcggtggctcacgcctgtaatcccagcactttgggaggccaaggtgggcggatcacttgaggtcaggaattcaggaccagcctggccaacctggtgaaaccccatctctactaaaaatacaaaaattagccaggcatggtggcgggcgcctgtagtcccagctaccagggaggcagaggcagaagaatcgcttcaacccaaaaggttgaggttgcagtgagccaagattgtgccactgcactcaagcttgggtgacttcgtccccacctcaccaccaccccttccccccgaaaaaaggcagacactggatagagatttggcagccttgggaagcgaagaaaaacaaaaaaacaaacaaacaaacataaaaagacccaaagtaatgctgatctcacctcatagagatcagttcgctctccctctccaagagtgtgatactgtgcttaataaactgctgcttcttgctttgctgtctgtgtgtgtctcatccaattctttgtttaagacaccaagagcctggaactgcatggcaccatccggtaacacttctgcccactgagatactgcaaatatccttatggggagagagtggctgggcaaggaggaggcgcccaggaggcagattggtctgcaggatgagatactagctgcaaatgcagggattggaggtgagggcggggagtggcttcggacgcccaaacccagcatcttcctctctcaatcgttacagccaaatgatctctaggttatggacaattaggggacagtgtgggctgagcagatcaatgcagttgtatggaagaaaacagactgggattttctatgtatacaacatcttcaggaaaacctacgtgaagttagaattttcaaggcagcatgtgccgatgataaaactacatagaacagcaggaagactattatcattaaagtgaggctaggggctccttcaggagggagcgggggcatggccaataggaaaggggaatgtaagggtgaatgaattaataaaatctctttcttcatttcaagggacagacttgacagttcttttgtgttctagttcttcaagggtgcttattttgtgtgaatcactgagttggtttttaggggacacttttatgtacatgtcttgtgtttctccccgctcaaaaaaaactgtttcaagaaaagctggcctggatctaagggggctgcagcttgcaggatttttcccacttcctcccagcccagtcacacagtttaaaataatcttctgttgaagtcaggtgcgtgtttcttctctcagaaaatcgcgcccatcactgagggtggacgccccggggctggtgtctttgctccacgtctcctgttcacctgaacccctaggagcagttcctgcaggagcaaagccccagggccagcagacccctcacactctgcactaaccaggcctcatgagatagcagtggtgaagggaaatgtccttgtgctcagagagctgtgaggatgggaatagtgtctgctcttttcatattgatcctttcccttatgactttcctgtctaccaagccccacaatacaacaatcacagcctcagcttccccggcctcctgcaggctgggctcccctccgtgtccttggcgtgtatcaacaggcgcaatcctcaccttcacagccccatgtccgtctgctcggtcctcctgagactgaacccccgacctaggggagagtgaccccaccctgcctgtgccccccactgaagctcctgtcatggggagctcaaacgtcaggagactcagtgtctccccaccacacagtgactccttggggacagtgtccggctctgctgtgttgacctcattgtgcagaaagggggtgcccacctcgtggctgctgagggagggatgagaggctgcctgttcaccccacctgcacccctgtctctcatggccccgagtcccacttctgagctacgcagacatccacagcctgtgactcaggggtctgggcagatgggagttattttcaccctgcagaaaatatcacctaaagggaaaggcattgagagggaggcaggaggtggggtgggccctgcatggggtgggaatctgggtgagtctgtctcccgctctggcctcagggacccaggagtgaatgtcgggtggtggacggtggatctcccagggctgacccagccctgacagtgtctgtgtgtgaagttcttcttctaaggaggtcactgttttgacctcaccaccgacttcctgtagggcctcttctaagtcttgagcccgcagttcctgagagaagaaccctgaggaacagacgttccctcgcggccctggcacctccaaccccagatatgctgctgctgctgctgctgcccctgctctgggggagggagagggtggaaggacagaagagtaaccggaaggattactcgctgacgatgcagagttccgtgaccgtgcaagagggcatgtgtgtccatgtgcgctgctccttctcctacccagtggacagccagactgactctgacccagttcatggctactggttccgggcagggaatgatataagctggaaggctccagtggccacaaacaacccagcttgggcagtgcaggaggaaactcgggaccgattccacctccttggggacccacagaccaaaaattgcaccctgagcatcagagatgccagaatgagtgatgcggggagatacttctttcgtatggagaaaggaaatataaaatggaattataaatatgaccagctctctgtgaacgtgacaggtaaggcacgggctccaagagaggccaaaggcaaatgtgatgagggctttagggcacggctgagacgggacacatgtcctgggagggggccgggggtgatggactcaggagaggagctggaccagagcctgagcttccccaggaccgcaccttggatgcccctcctgatcctgcaggcccctcccctcaccagccctgacccacaggcctgacatcctcatcctgcctctgacgctggcattgtggcatgtggggccttatgactccttgttttggggcctgtcctaggcatggccggggtttagcaccatcccaggcctctccccaccagatgccagaagcacccactccacccatgcagtgagacaataacaattatctccacacattgttaaacgtcctggggggttaagtcctccccagttgagagccttaggtctacacaaccccgtgactctctcaggccaggccagggaggaagcacttcctggcgcaaaccaagggcagcagaggcacctgagcctggacagggagactcagcacacggcccctcc

SEQ ID NO: 8021 - DNA, 6000 bp, Homo sapiens
tcctggacttctatttgttgagagatttttttctattgctggttcaatctcactacttgttattggtctgttcagcatttctatttcttcctgattcaatcttggcagaatcttatggttctaggaatttatgcatttcctccaggaaaagttcctctccatgttttgaaacaaaagatattattctctcacagttctggaggctagaaatttgaaatcagtaaggccaggcagaaatgaaggtgttggttggactacaacactccagagacttgagaggatccatacctcgcttcttccacattattgtggctggtgtcattccttgaattttggctggactgctcctacttctgtctctggggccacatggcctcgcctccttctgtgtatatcacatctccctctgcttttctcttatcaggactcttgtaggactcttgtgattagatgtaagggttgactgcataatccaggatttccactggtcaagatcattaatttaattaaagttgtaagaatacctataaagtaacaatacaggctcaagaaactaagacccagttttctttgggggtcattattcagattactgagccgctgtgtgatcttctgccccctaggaggcccccatctgccctccagaccttgccttctctttctattactttctctgttctttccgtcctgacacactagtgggccaactcatgtaacgcgtatttatgggaatggggtctattataccataaaagacactgataagacagccaaaagataagttacagggtgataacacctgaatataggtatctgatgaatgacttgtatccagaatatatcaaggactctcaaaacaaaaacataagtaaaccacaacagcaacaacaacaacaaaaggcccaattttgtgtaaatgaaaaagcagccactcaacaataacaaaaaataaacaacacttaaaaatggacagagggtgtgaatcacatttctcaaaaaaatatagtactcaaggccctcaccagaagcaaatgccagcaccacatttcttgcacagcctgcagaactgtgagccaaaatatatctgttttcttcataaattactcagtctcagatattcctctatagcaagccaagaatgaactaacacaatattttaaaaaggtagccaaaggttttatcagccacctcaccagaaaagaaaaacagatggcaaacaggctcatgaaaacatactaaagatcatttgtccttaggtaattataaatcaggagaataagcattcttaggtagcattacatacctgagaacataactagaaaacaaaacaaaaataaaaagaaatgtttaaatattctgataatatcaaatgttaacaaggatgtgaaacaatcagaattcacacataactcctggtgggaatacaaaatggcacatcaactttggagaacagtttgacaatttcttataaatttaaactgaacacttaccataggaccaggcacctgactcctaagtatttacccaagagcaataaaaacttacagttacacacagaaacctgcatgccaatatttataacaacattatttcatagtcacccaaacctgaaaacaatctgaatgctcctcaaatggtaaatgcatacaaaatggggggtccataaaaacagtgagttacgagtcagcaattaaagggaacaaactatagattcatacactcaaccacatgattgaacctcagaggcactgcaccaagtaaatgaagccagactttggaggcaacattttgtatgattccatttatacgacattctgtgaaaaggcaatacagtagggatggaaaacatatcagcattttttcatggactaagtgtggagggagggttgactacccagagacaggaggaaggaacgtttggttaatgacactcttcagtgtcttcacagtggttgtgggtatataattatatacaactctcaaaccatatcaaaattgcatatgataaagagttaattcaactgtatctaactttaaataaattaaaaaatttaaaacactggatgccactatgctctcactagaattgttcaaatataaagcaggacagtatcatacgtcgacaagggtgtggagctactggaattctggcacatggctaggaggagtggtaaaaagtcaaaaccattttggacaacagtttggcaattcctactaaggttaaacttacaagtagtcattagtctgactatttatcttcctgtgtataccaattagtataaaaccatgtatgtaaaaagacttgtacctgaatacctgtagggagaaaactggaaaatccttgtctatcaataggtgagaaataaaacattatagtatacacataaatggaatactacttaacaatatcacattttgaaatacagacacaaacaacgtggttcagtttcaaaaaatattatgctgggtcataggatacagacacaaattaacacatctctaggagattttcaaatagactaactcacaatgaaagaggacatatcagtggttgcccagcatagaaggtgggaagaaaagcccttggcatactagaaatgctgtatatctgcagtgtggtgagtatacaggctgtacatactcgtcaaatctcatgcaaatgtgaacttcaagtaggtgtgctttatttcatgtaaattatacctaattaaattcattaaagaaacacagtaagactcacatattcatatttgatcttctggtccatgaacatagtatgactttattgttaaaactaaatgtggctgggcacagtgcctcatgcccatagtcaaagcactttggaggtcgaggtgggaggattgcttgaacccaggagttcaagatcagcctgggggaacatagcaagaccccatctctcctaaacataaaaacaaaaagttactccggcctggtagtatgagcctgtgatcccagctactagagaggatgacgtgggagagtcacttgagtctgggaggtcaaggctgcagtgaactgtggtcaggccggtgcactccagcctgggcaacaaagcaagaccctgtcttaaaaaaaaaagcactaaatgtattgaattttctattacgtgccacatgctaaatatttaaataacttacaacagatattatttactggagacttaatttgttgtatatcaaatgaggatgcagctacctctctattagtaaggatgaatgaagagttatctagatactattgtgtgtagagatttgacaaaggtatggtggcaagtactaatatgtcccagggatcaacggtttgctggatgcatactacacagagtgatatggaaaaccatgtagctggacctaaagtttaattttctctgtacactccactcatgttgtctggaaatattatgtctttgggccatatttaactgtgagaagcagatttttacatgaaagaaaatgttgatccatatgatgagcctctaaaaaaacttgcttctgcccacactgaaccaaatggcagcatgaatggaaaagaagttttttctgcactggttcatagaacatgtgttctcccttttgtttcacaggaagatgctgcatggttcttgttttggagatgtcattgacactgtgcaaatcagtgtactaggtgccaggggaaaattctatagtcatatttcttttaaaatttccaatatgctaccatgatacatggcaaattcccaacttttcacagctctaaagccagacagcatgtgtgtgtgtggtgaggacatgaggctatggatggggagtatcttaagggcaggaatcaggtcagtggcatctcttctcaagccccacctatacacaaaggctcactgtaagaattaaagaaagaggaaagaaacacgaatggtggctcaccagtcaagacagattttagagaaaacaaacctgagaggagtttctggccgagttaagtcagaggcacactctcttacagactaagagtttttaaggatttagggtgggagagtttatcagagacttggactgcttctgagtctctttgttgtgcttatctgggagagagaggtgtgtgtctgtacccatacatctttctgcagctacaggcatacccactgagtctgcttttagcttccctatcttagtgcacctgaagggaaaggaatttgcttattaaggcccactgttttactagggccattgtatgagggtgaagtttggcagtaactcaagagactctccccctacctccctctgtgcccgagctgtcttatctgtgtttcactgtctgctctttctggttgcttgtagttagcagagaagtgatttccttgaaatgcatgaggctagaaaggaaattggaacttaaagaggcagtgtttctccgagatgacggtgctcctgctctgtcactcactatatctttagtgaatgaatgaataaatgaatggctgccaccttcactttacctaggactcttctttgtttctctgccccagacactcacacggaccctatagaatcctatatcctgctggactaaacaccccatggatctaggtgaggctgcgactcgggccaggccagcagtgatcagccctggtgtaaacagttgtgcacagaaaagcacctcagagtggaaggactttagacatggggttcgcatgtctcagatggccctgaaggtactgatccaggctctggtgctcctggaaggcaagactcagattctgctccatctcctcccatctctgggcgggtctctggcatctctggcccatgagggtcaatctgtgtggaggggacaagctctgagcatgtgtgggtctgaggttcctcttccatgcagggctgaggtctcctgctcctccccagcttcctgtccggccctgtagtccttcccctccactcccttcctcttttctgctcacacaggaagccctggaagctgcttcctcagacatgccgctgctgctactgctgcccctgctgtgggcaggtgagtggctgtggggagaggggttgtcgggctgggccgagctgaccctcgtttccccacaggggccctggctatggatccaaatttctggctgcaagtgcaggagtcagtgacggtacaggagggtttgtgcgtcctcgtgccctgcactttcttccatcccataccctactacgacaagaactccccagttcatggttactggttccgggaaggagccattatatccagggactctccagtggccacaaacaagctagatcaagaagtacaggaggagactcagggcagattccgcctccttggggatcccagtaggaacaactgctccctgagcatcgtagacgccaggaggagggataatggttcatacttctttcggatggagagaggaagtaccaaatacagttacaaatctccccagctctctgtgcatgtgacaggtgaggcacaggcttcagaagtggccgcaagggaagttcatgggtactgcagggcagggctgggatgggaccctggtactgggaggggtttaggggtaaagcctgtcgtgcttagcgggggagcttgaccagaggttgatcttctctcaggccctcacctggaccctccctcctgattctgcatcccctctttctcctcactagacttgacccacaggcccaaaatcctcatccctggcactctagaacccggccactccaaaaacctgacctgctctgtgtcctgggcctgtgagcagggaacacccccgatcttctcctggttgtcagctgcccccacctccctgggccccaggactactcactcctcggtgctcataatcaccccacggccccaggaccacggcaccaacctgacctgtcaggtgaagttcgctggagctggtgtgactacggagagaaccatccagctcaacgtcacctgtaagtgctgggccaggatgctggggtccctgagggtgtaggggagaca

SEQ ID NO: 8022 - DNA, 6000 bp, Homo sapiens
cttcagatcaaaactcagtgccgggccgggcgtggtggctcacgcctgtaatcccagcactttgggaagccaaggtgggcagatcacttgaggtcaggagttcaagaccagcctggccaatgtggtgaaaccctgtctctactaaacatatgaaaattagccggggtgatggcatgtacctgtaatcccagctactcaggagactgaggcaggagaatcgcttgaacctgtgaggcagaggttgcagcgagccgaaatcgtgctactgcactccaacctgggcgacaaggtgagactccatctcaaaaacaaacaaaccaacaaacaaaaaacacaaaaacaaacaaacaaacaaacaaacccaaaactcagtcctggccaataccttgattacagcctcacagagaacctggctaaactgtgctaagctccatagaaactgtgagataataaatgcacacatatatatgcatatatatgatatgtgtgtgtgtgtattttaaatccaacgaaatattctttgagtaggaacattgactatcaaaaagagaagaattgtaacagcaatagtaaggttatgagaagaatgtctttagagatgaaaaagaggaaaagaattgacggctgggcacggtggctcacgcctgtaatcccagcactttgggaggccgaggcaggtggatcacctgaggtcaggagtttgagaccagcctggctaacagagtgaaaccccatctctactaaaaatacaaaattagccggacgtggtggcccatgcctgtagtcccagctattcgggaggctgaggcaggagaattgcttgaacccaggaggcagaggttgcagtgagcagagatcgcaccactgcaccccagcctgggtgacagagtgagactccatcttaaaacataaataaataaataaaaagaaaagaattgacctgagatgaaaaaaacaacttatttgtttttagaggacagtcctagaaatgtagccaggtggctggacgcggtggctcatgcctgtaatcccagcactttgggaggccgaggcaggtgggtcacctgaggtggggagtttgagaccagcctgaccaacatggtgaaaaccccgcctctactaaaaatacaaaaaaatttagctgcgtgtggtggtgggtgcctgtaatcccagctactggggagactgaggcaggagaatcgcttgaacctgggaggcagaagttgcaatgagccaagaccacctctttgcactccagcctggatgacaagagcgagactccgtctcaaaaaaaagaaaagaaaaaacacacacattggtgtcagacgtgttgcgagtggaaaccacttcgtaatctttatcccaagtgaactctccccctaaaacctctattacagggaatgctatgatgccatgtggtagatcagatgaccactctgaggatctggatcagcctccttccctggcatcctcagggcttgctccataggttcaggagcaaagtggccgaggtggactacaccacctacgtcactgatgaatgcccacctagctggcagtagcaagtgctgatcccccagtgtggtacagtttcctaggaagaccaaaaagccaaatacctgggcccgtgaggattacactggagccctttcatcctgggctgggcagggagtttttcctccctcgagtaaacaactctgggcttgttatttgcttttcttgccctttgcacttctgccaacagcagcatctgtgtatgcactgaatggccctattcaccctcatgttaacccgcacagtattgcttctgatcaaggagctccatatattaggaagtcagtggggggcagtccatgtaccccattaccccaaagcagccagcctcatggaacagcacggcctgtttgagactgggttacagggccagtttggagtcatcatctttggggtcggggtgctgttacaggatgggtaaccactctgaaccaggggtacatgccagatgatcccagattacaaagacctgtgaactcaagagtgccatttctttcttttatttttctctctcttttttttttgagacggagttttgctcttgttacccaggctgaagtgcaatggcatgatctcagctcactgcaacctctgcctcctgggttcaagcgattctcctgcctcagcctcccaagtagctgggattacaggcacatgccaccccgcccggctaattttttgtatttttagtagagacggggtttcaccatgttggccaggctgatctcgaactcctgacctcaggtgatccacccacctcggcctccctcccaaagtgctggaattacagacatgagttgctgcatcggccaagagtgccatttcttaggaccacacccgatgactcactcttcaaatttttatttgttttgttgttattttttgttttgagacagagtttcgctcagtcacccaggctggagtgcagtggcaatcttggctcactgcaacctccacctcccgggttcaagccattctcctgcctcagcctctggagtagctgggattacaggcggcgccacaacgcctgattaatttttttgtatttttaatagagacggggtttcatcatgttggccacgctggtcttgaattcccgacctcaggtgatctgcctgccttggcctcccaaagtgctaggattacagaggtgagccaccgtgaccggccttcactcttcaaatgtttgcttcctgttcctgctaccctgaaccctgctgttgaggggttctagtgtctacaagggaaccgctgccaccacgaggaataacacagtaagttgtgtaagtggagaccacctctgggccgtttggggtaccttgagtgtgtcactatggggttaggcagtgactaatttaggcaggaaggggaaagatttgctgctacacttggggccaaggaggcctgtgaatagaacctagaggcgtcccaggggagtctccaactaacaccatgtcccgactccctatctgtccacagccctccctccttggacaaggacaaggcctgatctgggtgcactgagacctccctcccctatgcagggcccagagtgacaaagagggtctgtgtccccttccctttgcagaagcacatcaagcccgcacacaggctctaccttcctctacccaaccccctctccactcctgcagacccccgccttcctgcaggtccccctccggcccctccctgctccgtagggcacgtagacccggatccccagctcccggaccccttccgactgctcccttcgccactcgcgcggcttccactcctggactcggcctccacccctgggcttggcctcaaagcctcctcagttgtcggccctggaaggtgcccagcggcggcagcgccagacgcgccccgttagctcagcgtcgctgagcatccgcagccgccaccaggccccgcccagcggccgcagccagccaggccgcgcccgggacgactgcagagcgcggtgagtgaacgcggccagagggagggactcaggcgtcccaggtccccgccctgcccctccccgggggcccgacatcccgaccctcagctccctctttttcttttggctccggcagtccgttttagggccgcagagccgccttttaaaaacacaccctgcatcccttccctgccctggggcttcgggcccaccagccccttggatcccttcccctcttgcaggatccgtgaatccagagccccaagccccagccccagccccatcctcattaaaattctgagtccctccctccatccaggagtcaggaatgtaggccaaaaatatcgctgccttccagacccaggcggctaggcttgcaacacctgctcggaaaacccgagtctgagctttaatggttctattatgatgatcatgatgatttatttttaatagagcagagtctccttatgttgcccaggctggtctcgaactcctgggctcaagggatcctccctcctcagcctcccgaaatgctgggattacaggcgtgagccaccgcgcccaggcctgattgttcttttgagccaagaatctgggcctcagcctaggcatcctgtggagcccaggaatccgggcccccaactgctaccgcgctagctcccaggaattttgcccccaacacaccccacccctatccactgtgatatctgagacctgcgtccagcccgagtcccttaccctgcggcgcccggtgccagtgggtactaggggagcattttgccgccccttcaagtccttaaatacaggaatctagcctctgtttcttggggagacccatcagtcagggatcgtagcccagaaccacctaaagcccaggaatactgctctcaattctgctctccctcagggctccaagagacagagatcctagcccccccattgaactgaggggcctggtcccccaatccgctgcgacccaggtgtctaaggtttcatccggcaaggaaggggtgggggcggaacagaccaggaaggagggggtaggaagggagcggaagaaaggagtgaggtgagacgggggcggggacctgagctggggggctctgcactaaacaaaccctaaacatgcggggtttctatggtaacggtcttccctggcctacccgggagactcctctagggctgtgtcgaggagggcagcccccaggagtctccacgccgccagctgttgtgtcttcctgttttgtcaccacggcaaccgtgacctcagccctccaccctgctcactggggtggggcgggagctccacgctacttttactctggggggcgtggtctgctcttggccccgcctcggggcggggctgggatagcccagactcggggaagtccctgtccaccgccctagccggagctgcgccccgccccggccccgcccccgtcccgcccgcgctggctccccagccctccaaccccacccagccctcagacccttccagctgccgctgtcgtctttgcttcagccgcagtcgccactggctgcctgaggtgaggttgtggggaccccagagggcataagcaacagtctagggtctttatggccagagagaggaatgggctgggtctcagaatgtctgggtccctagaaagactggggctgggccaggattcttggggttctgcagaggagagggctgaggacctggactgtggaggtcatacgtctggaagagtggggaaggggacctggactccggggtctgagggaggaggggctgggggtctggactcccgggtccgaggcaggaggggctggggggtctggactcctgggtccgagggaggaggggctgagggcctggactcctgggtctgagggaggaggagctgggcctggactcctgagtctgagggaggaggggctgggtctgcgggagtagagagatggggactcgtaggtgccctagttggaggctggaatctggtacgtggaggtcctttaggaggggaagcgcttagggttaggtgtcctgggtttgggaatgagaatggaaggaattcagaattactgacccctccccatccaggggacagacagaatcggaactttgggctcctgaaaggccgagggaggggggtgttaagatccagccccgtgcttccgaagtgcagaaggagctgggaaaggaggagaagacagggctgcgtcccgcacctctgggtgccgagagccgaagctggggttccggggcccgattctcagcgtgagcgatgggtgtggcgtctggagtggacgagggaggacactgaggggctgggtgtggcccggagagtcgggtgcgctgcgaggaatcccggaggggtgtttcctcaccctccagggtctggctgcgcattcctgagctctgatctcgggcgatggctggaggccctaagggcggggtggacccctcccctcccctcccctcggcgcgcccccctcccctgcgcgcccccctccgcggc

SEQ ID NO: 8023 - DNA, 6000 bp, Homo sapiens
gacagagacagggagagaaaatatcacagagggcaccaacgtggacagtgcacagcgagagaggggcacggagatcactgagagtgccaggtggcgacccccgcgcagagacccagcgcgtccgtgttcaccagagcagccacgcaagctcacatgcacccccaggctcagacaccggggagaagtccttcccaagcggggagatcacagtctggcctcttcttgagagacctagagacctgatcagaggaagagacccccacgccagagcaaccaaaaacagccagaacccgagagcctaggaatcggcgacggaggcacacggcaggcagacgcgccttctgggcctctttcccttgacccacttgagagtctggggagtgccggggaccgtgcagatggactacatttccccgcaggcctcgcggcagacccttcccccaagtgcggctccttgccgccagggctgatgggaaatgtagtctccggtcagggccagaccagtggagcggtgtgccttgtctgtgtgtttggaggggactgagccccaaagcttcgcagtcttccttgcggacccgggcacgtcttcttccctgcagtctcctgggtttccatgacccggtccgggtggatgctggggctgcccctctctccctcatcaccgccgcgacacccccatccagtgcccgcaggccccagcccccgctccgaccctcggcgggcggcctgcccctttaagagtggccccgctgacatcacggcggggggggggggtggcccggctcctggctccgcggcggctgcaggacccgactccgctctgcgcccgcccgctgctgtagggaccccggcccgggacgccccctcccgcttcctgcagccgtccagaccccaggctccgccccaggcctggctagagccccagtcctcgtcaggggacccccaggattgtccctgctgtctctccttctcagagtctctctctgtctctctctgtctctctgtctctctctctctgcctctgtctctgtctcttctccaagctcaaggtctctgggtctcagcatctctcagccccaggcctctgggcgtccccctgtctctttctgtctcttcctggtctctgacctctccacttcccaggcctcagaatctctgcgcctaggtggtgaggggtggtcttaaactctgtctctctccctctttgtctctctctgtctctgtgtctccttcagtctccagacctgagtccctggatttctcggcctcaaggtctcggcgtgactttctctctctgccctgtctctctttgtgcctctgcccctctcgggctctctgcctctgtttctattctctctccctctctgcctcccccatcctcaaggcccatctccctccctcgctgcatccttccccccttccctccccgcccctcccctcctccgcagtagccaatgagcggccgccggttcctgctcccggctccgtccgccgagtgaggccgcggccgcggggggtggggggtgggaggccgggagggggccgggacgccgggctccggggcgggggcggggggcgcgggcaccggcgaccccggtggcggcggcggcggccgggggaagcctcggggccggtcatgcggctgcggggcccgcggcccggagcgtccgcccagccctgagcgaggtgagcgctagcggagggtcctgggaggaagaaggggcgcccctcgaggtggctgcgagccgggtttggggcaacaagggacccgagtggctccaggggtggtgagatcctggcggtcgggacgcccgaattcgagcggctatgggggatgcagggacacctgggcctggcgatcccggaggacggggtccgagggtcccggagtgggaaactgcactcctcgcgtccgagtcgcagcgagcgtgggctggggagggcagaggccgggtccctgaggaaggcgaggtacggggcgagggcggaggacccaggcccggccagagcaggatgtgggtctggaaaggggtcccagaaagggggagttacggtctcccgagagatggaggagagatggagtttgggcttaagacttgcagaaggggaccccggagattcaaatgcctgaatccgggaaagggtgggagaaagagggagaagaggaggcttcaggcctggggggagggtcccaaaggaggaaaggctggaggaataaggagatctgggcgggccagtgagagggaggaggaattggagcaaggttgggttttaaaacggggtgcgagaatgtggagaagggacgaggtcccagctgagagtcagaggggcgaaagggggaagctgagatcggctacctgggatggaggcagccagggtggccagggtgatggtgcccgtttccgagcccacagggctgcgaggggaccaggcagctcgcggtcaaacccctgagccgccaggcgggggatgggaggaaaagctggccagagcgttccctgactccggatctcggaggcctccaagaggttgggggggaaggaggggggatctggaggctgggagtgcggggtggagcggggaggagtgagggttgtctcagactccagagtctttattcaggtggagcagagttgcaaggttagaagaattctggtgaaggaaagtggagttttatgtcttgattagtttgtaggggagaatgttgaggggtctcaaccttcatagttaaaaagatcccgggtattcagggatgtagaggtctctggttgataaaggctaagggtcccaagttgagacccccaaatcacgggattgcgtggcttggggaaaaatcttgcaggggtcgggggagaatcgtgggtaaggaatttcaagtccttgagatctgggttgaggagctccctcgctggaatttctaggttcctaagtggaattggggaggccacagagatgaactgggatctcctgtttggagtctaatgttatgaaatcgggactccatgctggatgttgaagaagatctgtgattggaagtcccagcatgggaaaccggggtccagaacctctggtaggaagtttcagatcgtgtgttaggggagggggttttgggactcctgcttgagattttagagttcagggcactgaatcctagttggaaggatgagagaccgttgtttgactggggtgctctgatgaggatgctggattggtggtggtggtggggtccagctcattcatgatttttttttttgagatggagtctcactctgtcacccaggctgaagtgcaatggtgctatctcggctcactgcaaccttgcctctcaggttcaagctattctcctgcctcagcctcctgagtatctgggattataggtgtgagccaccgtgcccggctaatttttgtatttttagcagagacaaggtttcaccatgttggccaggctggtctcaaactcctgacctcaagtgatccacccacctcagcctcccaaagtgctgggattccaggtgtgagccacctcacccagtctcagctcctgattttgatgttctggaatctgtaatcgagattctggttctatgtctctgggttccaatgttctgggactcagcagactgtgaagatgttccaggattccaggtccaggagcctgcctagatctgggagggtggaattagggttctggagctaggttctggagtgaggaggaattggagcaagattgggttttaagacggggtgcaagaatgtggagaagggacgaggtcccagctgagagtcagaggggcgaaagggggaagctgagatcggctacctgggatggaggcagccagggtggccagggtgatggtgcccgtttccgaacccacagggctgcgagaggaccaggcagctcgcggtcaaacccctgagccgccaggcggaggatgggaggatgtcatgtgtgatgtcatcttaaattggggtatcaaatgaggtcaaggcacaggatcagagttagaaggtcatgggtcaagttcttggtgttagaattgggtgttaggctcaagatacaaatcttgagtgtaaacttcagtgggggcctctgctcaaagtcttagatagggctgaggtcaagggtgtgaagccctggtatggggttagagatccttggttagtgacccactttgggaatttctggatgtagttcagagacagggtgcaagaaaatgtatcagggcatcagattagggcatggagttaagactgggtagcctgggttagagtttctggccagctcaagttgtagagcatccagggttcaagcccaatgccctgtgctctgggatctaggtcctggctcagagttgaggttattgatccttgttggagtctggtgttcacaaccgggggcttcgatcgtcacacagagacagggctgcaggatgccaggtcctagagctgaaatcattgatctgcctaatagtttctgagtcactgatccacactcaaggttagggactctggtggcatctgatttctaaattagggtctcaggtcagcaggtgaggttaggttttggcagggggacctggttctggggttaagaagctcaaattagaatttctgctcggagtcacagtatttgggacccaggtccaaacacggttggagccaagattcaatctctgggcctgggctgaaagttgtgattagaaatctaattctggggttggggatctggatctggagctagaccacaggcagcaggtttggggagcccagccctgaggctgaggctcaacagttggtgtctctggtcagactctagggttggggtcatgggtcaggccacggaggtcagatctgagatttcgatttgggagtcagtgtctctggctagggcccagcatcccgggttgctgcatggggtcaagcactctggtcggtcccatggagctctgcactgtagcttcccttccacaggccccgcagggcgccccctgcctctgaggatgagtcactgcagcagccgcgccctgaccctgctgagcagcgtgtttggtgcgtgtggcctgctcctggtaggcatcgcggtcagcactgactactggctgtacatggaagaaggcacagtgctaccgcagaaccagaccaccgaggtcaagatggccctgcacgccggcctctggcgagtctgcttctttgcaggtacagccctcacccgtcttccactcaacagtttctgccttgcctggggtctgagagtcttagccatagtcccatcccttgagttccagaaatccagaaacggatcctgattctctcctggaagttcaaatttctacgtggagccccagtgactagccctttattcctggatctaggagccccaatgctccaggcccctaacccctaaggaattctggagccttcctttaaagtttgtagtctaggtttagaacttgtcccctgcacaatttcagtgctgaatgggcaagattaaaaaaaaaaaaatgcatgggacgggcgcggtggctcatgcctgtaatcccagcactttgggaggccaaggcaggagtatcccttgagctcaggagtttgagaccagcctggccgacatggtgaaaccccgtctctactaaaaatacaaaaattagctgtatgtggtggtgcacccctgtaatcccagctacttgggaggctgaggcaggagaatcacttgaacacgggaggtggaggttgcagtgagctgaaatcacaccactgccactgcgctccagcctaggagacagagtgagactccatctcactctccctagctctgactgctggcatgcacctgtagttccagttattcaggaggctgaggtgggaagattgcttgtgtccaggagttcgaggctgcagtgagctatgacggtgctgctgtactccaacctgggtgacagagcaaaacccagtctcttaaaaaaaaaaaaaaaaaaaaaaagaaaatctatacctcccagggac

SEQ ID NO: 8024 - DNA, 6000 bp, Homo sapiens
acgtggtaagttcaatattgttttatctggggtggtggggggggaatctttgccctcgccacttggaggaggagcggtgggaagaccccgggaagttgcgctttcccttggattttgggaaaggggagcattcctggggtccttttgaaaaggccctcccctcatttccggccgccgctgccagccttggctgggcgcctggatcctgttgctatgacgacaggaagaggcggtggcggcggcaagcgatgctgaagagagatggaggctagtgggggtgggggtggtggcattggaatgggggagggggcagggatccggggctggggacgcgggagggggcgggggcaggggtatccttcatctctgacctcctcggggcttctcagcctcacccctctcccgttattttttctgggcttccttcgggtgcatccccagtctctgtgtctgcctctgtttctctggatctctctctcttcctgtctcagtccctctccgtctgtctctctctgggtctccctcttttcctgcacttgcctttctttccccaggtaccttctgccatccaggcccttctaccctccatttctttcatttactatcttgctcccccgctccctctccgcatcttcttctctctttaaagcttccttctctctagcaagaccttgcccccatccccaatttctctccctacccgctctccatttcattccctctcccccctctctcccccatcctctcagtctctctctttctgtctgtctctccccatctgtccctcctccctcctctctggatgactctctccctctctcttctttccttctgtttcccagatcctgaccccccccacacacacacttaccccagccctcccccaccccctcccccccagcccctgcgtttctctctttgagtctctgtccctgtccccttctctctctggatatttctctgtgtgtatctctccaacttccttctgcttccagccgctgcctcccccaaatttctccctcccccatttctgtttcgcggtctctgggtctctctctttccgtttctcctcgtctctctctgtctctctccctccctctctggatctctctcttctcctccggcttccttctgccactcgaccctgcccccctctttcccttcccccatccatctcctctccgaggctccccatccctcagcagctcccctccccctccctccctactccctccctctcgtcctccagctccgcactttacccagcgacacgagaaccaaattgtctcctcaccttttttttttaatatatatatcccgaccctcactcccttggggcccaggctcagagctgccccccagccccagcctgacctcagcacccccattccccatacgcctcctcatctccactccccgaaccaggtcggacgcctgggtccctcactgctgggggagggggaagcagcgagaattgggagccaaaaggtttttctggggggggtgccaacagggggggctcgacgtcccctcctccgtgcatcggagagttgacctatcattaacagaggtgagacagatctttttattaatcggaggtgggtggaggtagaattaatgttctgtgatccccccccccgaattctggagaaaagagctggtccccttcctaaggagaaaggagagtgaccccctcatatccggaagctttagaattgggggtccccagctctcttctccctggcagctgctgaacgatggactaagagtccctaaaaccagattgtgccccaaattgacaaaatgaaaagatcttcgaatctttttttttttttttggacggaaggagaatttccctcctttccctcctcttcccttcccctcttatcccaggttgttaggggcctggggtcacaggcttaccccactgagagcagatatctgttaagacagggtaggtggccctgctggtggtgaggggcaccaattcggggagaagaggccaagagatcaagaagagaggaaactcagcatgcggacagaaaagagaggaaggggccggcgcccaggccgggaggctgggggttgccctgtccagcgggctgctgaactgtggcctgaggaagggctgtgtgtgggcagacgggagttgaggtgggggagggaacacaacgtgtggggcactaggcccagttgccatggagacaccccccatagacaacctttttccacagcccctcctcggagcagccccagtctgaggccagctgatggggggcagtggagacgggcaagcaatcaggaggccaaggtcaccctgtactgggacctaggttctggtttttgttttgtttttttttaatcccctcttcgtctaaggtttccaggctcttaactatagtgggtttgggggaagaagttgaagaagcagtgtggaagcaagtaaggagtacatcccccagaggacagttggggtgggggagacaggcagggctgggggcatggtggtcgggggagaatgtggaagagagaaatgaaggagccacggggcagcgggtgcaggctgggaaagtattcctaattgaaaagagagttgtagtcttgcggatcacatttttcagagggacacagtctactgggggggctctttctgcatgtggaagaagatgaggggctacagtgtgtgttcctgtacaggtgaagtcgtagaggggagtactggggggcgttcccaagaagggaagcctgtgggggcctgcggaggggattttccggggcagaggagaacctgggagctatagcggtggagcaagaggaagtgagtcaagggaattctatatgatgagagagaagttggggaggatgcttcctggtacattgaagagagagtgggcttcaaagtgagttagggggatctcaagttgggggaaacagtgtgctgaagatcccgtgtgatgatgaagggctacgaggaggggatttggaggcagtgggagctgctgtgagtgcagaggggcgggtgggtggtacagtgtgccccctgctatgggagtacagggcagagattggaatggtcctgagtggagagacatttggggtctggaggaagccattcttgcgagtagaaaatgccgtggaactcacggaggaaatttttcttaatggaggagaaaacgatggttatgatatgagttcgtttaagttgtgggggggggggtggcggggtgggaagattcagaaaactcttctaaagcaaaagagagggtgggggttttcctggagtaaaggcatagtatggggtggggagtgagtggcttgtggggagacagtgggggctgtgacagggaatgggctggagatggcggggggggggcagcttgcaaaccagtgggtctgatgttgggtgcattagaattccccagggagcttttaaaaacttacatgcgcaggccacactgcagaccaaccatgtcggactttctcaggtgggactcaaacatccgaatttttaaggtcctcgggtgatttccaggtgtgttggaggctgcccgaggcaggaagggggcttccagggagaggaggctgactgagggtggctggtgattccgagttgcacaaactgtgagggtcagctgggattttctttttctttttcttcttcttttaatttttcctttttagttgaagagaggttgagagatttattttttcctaaggagaggaaactgtgggggaccatttggagtgatggaatgacaaaagccagaccggagggggctcgcggaggttactcccacggaagtggtgctactcgggcttcttaagttgtggagacgctcagggaaaagttgggctgacagggaagggttctagcgggtggagaggtggggcttgcaggggaagagtggggagagctggtgggcgccgcatggtgatggggcgggggtcgctaaggaaggaagaacgcgacgggggctcctggggaggaggcggcggcgtggggcttggcatcatggcggggggtggcttcccatgcgatgaggatcgtggagccccctggggcggaggcggcgcgggctaggggcgagggctgtgagtgtgagcggtggtggggactcctccgagtggggttagtgggatggtgggacgactttcttgggcagaagacaggagtggagagagatttcatcttatttattaattattagcggtggtggggactcctccgagtggggttagtgggatggtgggacgactttcttgggcagaagacaggagtggagagagatttcatcttatttattaattattagcggtggtggggactcctccgagtggggttagtgggatggtgggacgactttcttgggcagaagacaggagtggagagagatttcatcttatttattaattattagcggtggtggggactcctccgagtggggttagtgggatggtgggatgactttcttgggcagaagacaagagtggagagagatttcatcttatttattaattattattattattattattattattattatttttgagaaagagaagcagtggagccccgagtggaaggagtttctggagctgaggcagggattttgggggggggggggcggggactgggggaggtacctgtgccttcttctcctctaatgcgagatctcgctccttgccctccaccagccgccgaccatggccgcgctctgaccccctccccggccgcagcctcctcctcgccgcccccctccccagccccgccggccccgggccccccgcttctgcctgcgctgtgaacccccccccagccgccggcacggccccgcccccgctgccccggtggtggcccacggccccccggctgcccgtggtcaaactggagtcgctgaagcgctggaacgaagagcggggcctctggtgcgagaagggggtgcaggtgctgctgacgacggtgggcgccttcgccgccttcggcctcatgaccatcgccatcagcactgactactggctctacacgcgcgccctcatctgcaacaccaccaacctcacggccggcggcgacgacgggaccccccaccgcgggggcggcggcgcctcggagaagaaggaccccggcggcctcacgcactcgggcctctggaggatctgctgcctggaaggtagggtgcgggcggccctccccgcagcccccgccgctcccctccgagagaccctgagcctcccggggctgcctgtccctgatcctggggcccccttgggcacccctcctcctctgccagaggggcttctgcgccttcccactcgcgcccctgacctcctctcccctccttcccactcctccctgcgtcctggcaccctgcggaattcctcggcatgctccctctgcagcccctctgcctctccgctgaacccccttatcctatctttccctagtccgtgtctcctgcgctgccccatcacacccctgcatcttccctctctccagtacctggggctcctcctgtttcatttcttccactctgccctgtgccttttctctttttttttttttttttgacaaggtctcactctgtcgcccaggctggagtacggtggcacaatcacagctcactgcagcctcgaatccctaggctcaagccatcctcccacctctgcctcctgagtagctgggaccacaggcatgagccactgtgcccagctaattttttttattatttgtagagatgaggtctcctgttgcccaggctggtctcgagctcctgagctcaagagatcctcctgccttggcctccaaagtgctgggatgaagggcatgagccactgcacccagcagcctctttctccctctttcccgtcagttcatcttgaccctgctcctccgctccacctgccccttcatttcctctccctcgtgccccgtgacatcttctctctcccgacatttcccccccagtcctctgaagtcccctgcctctcccgccccctttcacg

SEQ ID NO: 8025 - DNA, 6000 bp, Homo sapiens
tgaaattcctggcttcaaatgatccacctgcctcggcctcccaaaatgctgggattacaggagtgagccactgcgcccggcctcatatttttatttaaacaagaacagcagaattacattgctgtgctgagcatacgtagacttcaggagtcaaaggggaaggaaggaggtagcgggctgttgccttcctctggttgctggaggcctggaccaaggtggagttagtgggatggaggaagtggaagaaggcatgggattttggaggctagagcctgcattggtggtgaactggatgtcatagaggagggaaggaaaaggaaccaggaagagaagaactctctgaattgggcacgcacatctctgatgggcaccgatgaggattgttaccaggaacgaggagactgggatcaggaaagtggctttgggagggaggaaccaaggcttctcttttggatgtgtcaagatagatctgccttcgagaaatccgagttgtggtatcaaatagccagttggatatgtgagactggagtttgggggaaagagaggccgtggctcaaaaacgtaagttttggaaacgtcaacataaagccacaggattgggtgacgtggcctagcaggggggtggggacagagaagcgaccctggccagagccttggggacatctacatctgggggagaaggggatgtagcaaaacgagcttaggagtgatctcgaggtaggctgaaaccaggagggttacagagggcaaatgcacctttgtgtttcaagaaggagaggagacagccagctgtgccaagggctgctgagacttggacaaggatgcagagagcagagtgaccattaggtctgatgacatggacagggttggtgatcttgataagataagatgtcagttcagtgcagtggtggggacagaagccctgctggagtggaggggagagagaatttggggggaagacagaaggaaagggaattcaggcaagtgtgtgtgtgtgtgtgtgtgtgtgtgtgtgtgtaactgacacaaaggccaggtgcgatggctcacgtgtgtaatcccagcactttgggaggccgaagtgggtggatcacttgaggtcaggagttcgagaccagcctggccaatatggtgaaaccccgtctctactaaaaatacagaaattagacaggtgcggtggtgcacacctgtaatcccagctacttgagaggctgaagcaggagaatctcttgggcccaggaggcagaggttgcagtgagccaagatcacaccactgcactctagcctgggtgacagagcaagactctgtctcaaaaaagaaaaaaggtaaaaaaaaaaaaaaatgaccctgaaaggaagtagggagacatgcagatagggagatgggaggcagaaaattgcatcctgcaattagctgtcacagcaggcaggagcaagagagatggggaagcccagggccaggaggggaagatgaattcagggggcagggaagagaggatgctgtcagctaggctctggcagatcccctagccagggatgctctgcccagctcctgtctcttgctgctgtcagcgccgggcacactctgggattccccctgtagaccctgtcaagacctattgaggtgaaggggaagaacacgttttcatcattcattttcagaaataaacattcactcagttcttggaaatactttctggccaggcttgggggctcatgcctgtaatcccagcactctgggaggccaagacaggaggattgcttgaggcttggcgtttgagaccagcctgggcaatatagtaagaccccgtctctacaaaaatgaaaaatgagctgtggcgtggtggctcacgcctgtagtcctagatactcgggaggctgaggcgggaggattgcttgagtccaggagtttaaggttgcagtgagctatgattgcaccattgcacttcaggctgggccacagagcaagaccctgtctcagaaaacagaaagaaagaaagtcaaagaaataaagtcaaagacaagaaggtgatacagagaagacagaaaaggaggaggagagagactgacaggtacacaaatcagagaagtcccagagataacaaaaacacaaccacagagatagggagacgtaagccggagaaagacccagagattcgcatagaaagcaacgtggagactcagaagcaagcacagcatcaaggaatgatcaataaaaagaaaaaaaaatatttcctgaggacttccaagtacaaggccctgcaatctcaggccacttctgtcccatctctgccttcagagggggggacaggtagtccagacaattagaatacagagggggctgtgttctgacggggccacgcgggcattgaggaaacgcagcaggcccctcccctagctggggcggggatgtctgtgtgccatcatctcactccatctggtcattcctttgcccattcatccatccattcattcaagtcaccccatgcacattttccaagactgcctgtgacctggccctgtgccgggtagagctgaggatgccaaggtgaattcctcctgtgcctggccccggccccagtctgctggaagaaccagacacagacaatcacactgcggggaaacacgtgctccatcggaaaagtccagagcagggggtgggcagagaggcccagcgtgcaccagagcctcgctcaggtcagcgccaggcctgcctggagcagccaactgtgggagaagaaggagttggtgaaaggtgggtcccacctgggccgtccacagaagggctgaggggtagggggtgaggggttgaagatcaggccctgccgccatgccacacggctgtcctctgtccctgctcctgggggagctgaaactgcatggaaggtcccccaggggtgccccgtctaataaactcgatgaagaggagtgctgctttcattctgtgcccctgacagccggccctgccctgaggcctgcgctttctccaacatggaaatcaggccttccatccttcaagacccagggttctggccccagtctcctccctgaggcccaggactctgggtctgccaacgccttgaccaggagtccaggctccccggccctcctcctccctcagacccaggagtccaggcccagcccctcctccctcagatccaggagtccaggccccctgccccctcctccctcagacccaggagtccaggcccaggccttcctccctcagacccaggagcccaggcccccagcccctcctccctcagacccaggagcccaggcccccagcccctcctccctcagacccaggagcccaggcccccagcccctcctccctcagacccaggagtccaggcccccagcccctcctccttcagacccaggagttcaggccccagtccctcctccctcagacccagaagtccaggcccccagcccctcctccctcagactcaggagcccaggcccccagcccctcctccctcagacccaggagtccaggccccagcccctcctccctcagacccaggagtccagacccccagcccctcctccctcagacccaggagcccaggcccccaacccctcctccctcagacccaggagtccaggcccccagcccctcctccctcagacccaggagtccaggcccccagcccctcctccttcagacccaggagttcaggccccagtccctcctccctcagacccagaagtccaggccccagtccctcctccctcagactcaggagcccaggcccagcccctcctccctcagacccaggagtccagaccccagcccctcctccctcagacccaggagttcaggcccccagcccctcctccctcagactcaggagcccaggacctaggagaccaggttcctctcctctcagatccaagattctgggtacccaggccttcttcctctaccactcagaagtggggtaccgaggcttcttctcccttagggacccaagactcctggcctcaggccctcctccctgagacccggggccctgcctcccgcccctcctccctggtaaccccagtcagacttgctgccccgcccgtctcctgctgcccgggagactgcggagctgggactctcggcgccgctcttgccccttagtgaaatgaaagtcccatcaggctcggccccttcctccccgggcggcctccctccccccttcctcgtccccttaaaacacccgggatccctatggcaacaggcgccgggcgacaggtgcgggtgttatttacgggtcaagcccgaaatagccccgagggtggagggtggagggtggggggtgggcgggtggggacgaggccgggcgcgggcggaggccaggccggtggcggtggcgggcacagccggacgcttcggaggcagcgcggagctggggtcggcgcggggccgaggcaggagagcgagaggggcccctgctcgggagtcgggggtgggagccccgagggggggccctggcctggggctgagcctggcgcgaacccgaccgggaaggccctgggagcccgggggagggagacggactgatcccgaaggggcgcagcgtctcttgcgggtcgcggttggcctttgaaccctggggggactcagtcctggttttccgagccgcagtgcggaccacagccccatagtgtgagccccaggagggcccccggtcccatctgccccagccctcggggaggccccgtagcctcccgcctctggactccactctgtcttccggccaccggccccttttccaggctcagtagagacctcggatcttttctgaatggcaggggagacccctatccccttttcctgaattccagcgaggcccagtcctcttctgagccccagccagggctctgttcttctccttctgtggatgccggggtcctactgcctctcttgagacccggattgaattccgacctccccttgggagcttcccgggaccccaggtcttccttttccgaatcccagagggtccccaagtcctctgttctcaaactctgagcccaagggaaccccggccacatctcctccaaacacacacaggacctcaggtcccttcctgggtaccccaaactcttagccctagtggggtgctcagatctctcaggaaaaccagtttcccttttgttaaccccccagcggggaccccaaagcagccccttggagctgcagggagcttcagcgggcaccagttctcattcctctggagctcttggggggactccctcctgggaagccgaattctatctctaaacctcagggtgggggccttgtttttcctctgggccccgtcttctttgccaagttcttgagggcaacctagaccctcctctgaaccccagaggcttccccagccctggggatcatttttctcttctgaaccccagaagcaatctcgactttcgcatttgagattccagacaggactcggctctccctctttcatacccaggggaaactgagtccctcacccccttcaagaccccaggccgctcctcgctcccgcccctcgaggcccttcgccggctctgcctcctcccccttcccgaccccaccggccataagatgatgtggtccaacttcttcctgcaagaggagaaccggcggcggggggccgcgggccggcggcgggcgcacgggcagggcaggtcggggctgacgcccgagcgcgaggggaaggtgaagctggcgctgctgctggccgccgtgggcgccacgctggcggtgctgtccgtgggcaccgagttctgggtggagctcaacacctacaaggccaacggcagcgccgtgtgcgaagcggcccacctggggctgtggaaggcgtgcaccaagcggctgtggcaggcggacgtgcccgtggacagggacacctgcggccccgcggagctgcccggaggtgagcagccgccgccccgagcgcagggcttgcgtcccacggacagggagggagaggggcccgtgtccgaggagaaaac

SEQ ID NO: 8026 - DNA, 6000 bp, Homo sapiens
gagattagaatttccagttcaagcaccactacataaatatctgaggtttctatgtgtgccctgaaagagactcttatcatctgtagctgtaggggtgagattgctgaaaatcaaaccgagaatctcatccttgaagtggctgtattacaattcaagcggagtccccagcctcacagggtatctactgttcaagtaatgccattggtcaggaatgggtgagatcttgaaagatggaatgaggatgtatattaagaccctgatacagctgaggatatcaagcccctaactttgaatgagtcttctttgccaatagaagcatcctctctatctgcaagggaggagattaaccctgtactgtctgaggaaacaatactggcctcccctgaggcagttgccatgcaaggctatgctgattctccttaggatacatcctgaccaaccctctttgcttctagacctataactagattcaagtctcgcaggccctgaaaagtgtgttacaaagtgtggctcatgagaagttgtgctacactccaaagtaatttatttatttttctaatttatccatacagaagtctgaggaacacgtgtcagagtggatattaagggtttaggataatggtgaaaagaacataaagttgagtcggaccgaatttatatatataagctcactaaacagagattgcacatttaatgttgcatcttggagaaccggaaatgattctaccagtttgtctggttgattggctgaaacatggagcaaaagctggcctgcagtaaataaactcaaaatgccagacatgccttggtttgctgcagaggaattaacttaaaggcttaggaagactgtaatgttaccatgcatgtatcaaacctagtaacccacattggaagcatcagaagatgtatctttcaacaatattgcaaagggagctctggcatccttgaggagctctgtgatttctcttctctggaagctggaacctacagtggaactgctgaattttaaaaaatctaaatgtaatgggagtaatttggcccctacctcttggcccccagagagacaggggccaagtagaggaactcagccaccaaaggcaaggtgggtttggttaccatgatggacagcaaagtcaaaccagcgatcggaatagtcccgcagacttatggtgttggctagttgatcacggcattctaacaagggagatagataggaaacctactaaattctcacttgatctgtataagcagaaaatttctatgtcaagtgaacaaaagtcaacccaaatcataaaagcagagagccacagtctctcaatcaatggctagcactgagtcagttcatagagccagaatcccctgaattaaagggatcccaggcagggttcccgtgagggcactgtccctggtacactaccaagaatatatactcttaatctttctcctggactttggttaaagggacctgcagccttttacaatggcaatggagccttggggaaaataatcagataatttgggcattactggaaatggggtatgaactgacattaattccaggagacccgaaacgtcactgtggccctccagtcagagtagtggctgctagaggcaaggtgattggtggagtttgagctcacgtgttccatagtgaatccagtgtatccctaaacccaccctgtggctgtatccccagttccagagggcaacattggaatagacatattcaacaactatcacaacccccacagtggttccctcacttgttgagtgagggttattagagtgggcccagtgggagccactagaactgcctcttcccagctaaactgtaaaccaaaagcagtcttgcattcctggaggaattccatatattgggacttgaagcgtgcagagacagtgattcccacaaccttgccattcacctctcctattttacctccacagaagacgcagggatcttggataatgatattagattattgtaagcttaatcagatccaattgaagatgttgtaacagatgtggttttgtagtttgagcaaattaatacatcccctgatacccagtattcagccattgatgtgttaaatatttttttctccatcactgttaataagaaccatcaggaacagtttcctttcatttggcaagggcatcagtacaccttcacagtcctacctcagggtctgggaaagcacctgggggttgtgatcggggtctcagtggccttcagctggtgctcttcctcctcttctttctcctctgacactggcctcagggccaacacaggacattgggtgagtaggaagttggcggggagacccatgggctgactgaaggtggggtcagggcaccaccaaccagacagattccagatgggaaagttcagctcagaaaaacggctccagcatttcccagtgagaaaacctagaaagaagagaataaatgtgaacatacatgaacataccttattcttttggttgtttcatctaacgacgtttttaaaacatctatgcaagtgtgttttcagctttccttcttttctcttgagttctctgtgcagggcaggtggctctcatgatcccaaggctgaagctctgtccctcttcacccagcccagagggaggctgatttccaaagtcctgtggggactgtggagtcagagaacgacagaggcctgtggaggaggtaattctgcccgaagaccccagacgcccacctacccccacaacctcctcactggccctcacactcccatgtccttccccgggtccagcccagctgctgatgtccaggaagaaaacttctgtgacaggaagaggggggcacctgagggtggagacagaagccccaaagtttcggtagcaatgatagcaggggaaaaggctgagaagggcttgggactcttttatataatatataaattaatataaaaattaattcaccttcacaatgtctgtctaatgcatttcaacaactgtctgtgttttcctcatgtatcttggttgtcattcctgtggggcggctcctcccacgcacctgacctttcataaagggtttctcccacggctgtccaggcatcagcctgatgaaggggattgttgccgctgctcctccccactcccccaaactcagtgtcagctcaagattgtgcccagcagggatgggaccaacgccagtctcacactcacctgtggggcagagcagacgcccatgtcagaccaccgtggattgaatctgtttctcacacacaggggaggggctgagcactgaccatggcctccagtgagtgagcagagaccccccagcgcctgtccacacacacaggggagggggagccacagcttccagcgtcacccagagccctgacccctccctgcctgggaggacgtggggttcctcttctgtcccacacggaggtgggagcctcctcctccctaatgaccctgggtggtcccagacacctgtggccactcagcattgaactctgctcatggaaggggatgcgtctcaatgtgaggaactgttcttcctctttctgtgcccgtggctgtgatgatctgcatatttcagatgtatcacaaggagaatttcatggtatttggagccgatgtgggctcttgagtgggggcgtcaatcatcctcctggactgtggagcccagcaccaggatcctctcccgtccccaccctcctgtctgaactggtctggaaattcaccatggctgagcctcccatgtcctgggcaccactgacccccacagccactgtgatgagtggggttcacgacagcaggctcagaggtgacattcatgtccaaagtcacataaaccctggatgataatcaggaattaaatacaaatcagctcaccttccccagaatcagattacagacctaacaaattcttctgaaaactctgaacatggacggaggtgccgagggaaggccaaggacgcaagggacactgagggggcgggaccgactcagagcctcattcccggggtgggggtgggtgatgttgcaacaaagagaaaaggggaagtacaggagagggacggtttggtaggaaggaaacacacactctcaagacagaacaaatatgttttattatagttaatccctgcatttccccttttgagacagggtctcactctgtcactgaggctggaatgctaaggggtgatcatagctccctgcagcctccgcctcccaggccgaagtattcctcccacctcagcctcctgagtagctgggactagagatgtgagctgccatgcctggctaattttttgctttttttatacagacaaggtcttgctatgtggcccagggtaatctgaagctcctggcctctagccttcacccacctcagcctcctgaagtgctgggattccaggcatgagccaccatggtagaccctgcattactcctctgtgctcactgccacacgcagctcaacctgagctacacagccaggtgtcaggtgcgtctctgctgatctgagtctaactgcagcatggacctgggttttccctgaagcatctccagggctggagggacgaccgccatggtaaggaccccgcaacgctgagctgatggacgggctgaaggagggagggagaccccatggggaagctctgagaaggaagaggaagcctctgctcaccctcatctggaagggcagacgcaggagggcaccagttctatttgctgctacatcccaggtctcaaggagatgaggataaaccagacagacagtggctggggggcaggaaagaccccatttctgtctgaaatgtctgcagagggcctggtgcctgcccccacctcagccctaaaggtatgacagccaggctcctgagagggcagttgcacttcctgtgtggttgcacataacaaaaccccatgacaagaaggatccagcctccgagtgtccacaccctgtgcgtctctctgtcctgccagcactgagggctcatccatccgcagagcagggcagtgggaggagacgccatgacccccatcctcacggtcctgatctgtctcggtgagatttgaagagggaggggagcttctaacctaggagggacctcaccccacagccaaactctggtccctaaggagaccccaggggctcacaaagatcccagggaggggaggacctgcccaggcttcaggggaaaaatccctcacagggaactctcttccagggctgagtctgggccccaggacccacgtgcaggcaggtgagtctgttcccagctgtcccaggtccctcctcctcactagggacaaggggccacccccgtgcagctggggatggggaatagcagttctgggctgactgatgggggtgtctggagggtcctgcagctgagagctgagatctgttgggtgggaaatgacttagaatccgacctctgatttccttccagggcacctccccaagcccaccctctgggctgagccaggctctgtgatcatccagggaagtcctgtgaccctcaggtgtcaggggagccttcaggctgaggagtaccatctatatagggaaaacaaatcagcatcctgggttagacggatacaagagcctgggaagaatggccagttccccatcccatccatcacctgggaacacgcagggcggtatcactgtcagtactacagccacaatcactcatcagagtacagtgaccccctggagctggtggtgacaggtgagaggacactcaggagtcccagccccaggctctgccctcaggaagggggtcggctctcaggggcatctccgctctcacagctcaaccctggggatgatgtgggaggtgggagccccatttaacacagtgcctccttctctcctaggagcctacagcaaacccaccctctcagctctgcccagccctgtggtgaccttaggagggaacgtgaccctccagtgtgtctcacaggtggcatttgacggcttcattctgtgtaaggaaggagaagatgaaca

SEQ ID NO: 8027 - DNA, 6000 bp, Homo sapiens
atgaaagaggcccacgttttagagattttgaaatttaaaacacctataaatgtgattgtatatataggcatgtagggacaactgggcttcatctgtaagaactacaggtggaaagtggagactccttactggcctgagagcaaggagacagccctgagtcttggtgtctgaggagaagaagtatgtgtttctgttcgattcttggtcagaaaaaggtgttataaagaagaatcttggttccctgtctcttttctcatgccagatacttataatagtaactatacatgtgtatatatatgtgtatatatatatttgtctttataaaagctcacatctcccaagtatcacacaaaaccctttttgtctttttttctacaccccatggagaagtacaaacaggatgtgatactctaatatcactcagttttctaaaataagtaggttgcaatttcctatgaagtgaaactattcctagttcacattgagaaagtaccagattcagtttctcataggaccaacaattgtctggaccaagggaaattacaaatggtctggtcttacatttttctccagctacctgtgatgatctctaagagtctgttgttgcagataaaaaagtatatcactcaaggcagggtgcagtggctcacgcctgtaatcccagcactttgggaggcagaggccggcagattatctgaagtctggagtttgagtccagcctggccaacatgatgaaaccccgtttctactaaaaatacaaaaattagctgggcatggtggcaagcacctgtaatcccagctactcgggaggctgaggcaggagaatcgcttgaacctgggaggtaggaggtcacagtgagctgagactgccctactgcactcccagcctgggcgacagtgttagactctgtctcaaaaaaaaaaaaatgtgtatcactcaaactgacaccttcatggatcttagaaccctgatcatgttcccatgagaattccattcattccattcaagaagatctaactttcacatatacaccatggaatactatgcagccataaaaaatgatgagttcatgtcctttgtagggacatggatgaaattggaaatcatcattctcagtaaactatcgcaagaacaaaaaaccaaacaccgcatattctcactcataggtgggaattgaacaatgagagcacatggacacaggaaggggaatatcacactctggggactgttgtggggtggggggaggggggagggatagcattgggagatatacctaatgctagatgacgagttagtgggtgcagcgcaccagcatggcacatgtatacatatgtaactaacctgcccaatgtgcgcatgtaccctaaaacttaaagtataattaaaaataaataaataaataaataaataaataaaaaagaagatctaactttcctaaatatctatgcatccaacacagcagcacccagattcataaaagaaatttgtaaagaccttcaaagagacttagactcccacacaataatagtgggagactttaataccccacttacaatagtagacagatcatcaagacagaaaattgactaagataatcaggacctgaactcagcacgatagatatctacagaactctccacacccccaaaccagaatttacattcatctcatcaccacatggcacatgctctaaattcaatcacataattggaagcaaaagactcctcagcaaattcagtttgttacaactgaaattggcacaaaccactctctgaccacagcataatcaaattagaaatcgagactaagaaactcacttaaactcatacaattacatggaaattaaacaacctgctcctgaatgacatcagggtaaataatgaaattaaggcagaaattaagaagttattacaagctaatgggagcaaagatacaacatgccggaatctccgggacacagctaagggggtattaagaggaaaatatatagcactaaatgtccacatcacattagttgtgatgacctaacatcacaactaaaagaactagagaacgaagagcaaacaaaccccgaagctagcagaatacaagaaagaaccaaaatctgagctgaactgaaggagattgggttccttcacacacaaaaaaatcattcaaaagatcagcaaatccaggagctggttttttgaaaaaaataataaaatagactgctagctagactaattgaaaaaagagaagactcgaataaacacaatcacgaatgacacggggaatattaccattgaccccagagaaatacaaacaaccatcagagaatataatgaacccgtgtatgcacataaactagaaaatctaaaagaaatgggtaaattctcagacacgtgcagcctcccaagactgaaccaggatgaaattgaattcctcaacagaccaataatgagcctgaaattggttcaacgtacacaaatcaataaacagattcatcacataaacagaactaaaacaaaaaaccacatgattatattaatgatgcagaaaagccttctgataaaatttaacatcacttcttgttaaaaactctaattaaactaggtattgaaggaacatacttcaaaataataagagccatttatgacaagcccacagccaacatcatgctgaatgggcaaaagctgaaagcaatccacttgaaaactggcacaagaatgccctctctcaccactcctattcaacagtattggaaatactaggcagggcaattgggcaagagaaaaaaataaggcgtattcaaataggaagagaggaagtcaaactatctttgctgcagatgaaatgatcctgtatctagaaaacatcaacccaaacatcaacctgagatcttcttaagctgataaacaacatcagcaaagactcaagatacaaaataaatgtgcaaaaatcactagcatttatataccaataacagtcaagttgagagccaaatcaggaatgcaatctcatttacagtttacacacacacacacaaacacacacacacaatacctaggaatacagctaactaggagggtggacaatttcttcaaggagaactataaaacactgctcaaaaaattagagatgacacaaatagatggaaaaatattccatgatcatgaataggaagaatcaatatcttaaaaatggccatagtgctcaaagccatttatagattcagtaatatttgtattaagttatcattgagattcttcacagaactagaagaatcatatggaaccaaaagttttaaatttaaaaattcatatggaacccaaaaagagctcaaatagtcaaggcaagcctaagcaaaaacaaaaaccgaaaaccaaagctggaggcattatgttacctgacttcaaactatactacagggctacagtaaccaaaacagcatggtactggtacaaaaacaaacacatagaccaatggaacagaatagaaaacccagaaataaaaccacacacctacaactatctgatctttaggaaacctgacaaaaaaaaagtgatggggaaaggattccctattcaacaaactgtgctgggataactggctatccatatgcagacaattgaaactggaccccttccttacaccatatacaaaaaaactaactcaggatggattgattgatggatgtaaaacctaaaactataaaaacctggaagacaacctagacaatacattcaggacacaggcacgggcaaagattttatgactaaaatgccaaaagaaattgcaacaaaagcaaaaattgacaaatgagatctaattaaaccaaagggtttctgcactgcaaaagaaactgtaaacagagtaaactgacaatctacagactgggagaaagtttttgcaaactgtgcatctaacaaaggtctactctccagtatctttaaggaacttaaaccaatttacaagaagaaaacaaacaaccacattaaaatgtgggcaaacgacatgaacagacgcttttcaaaagaagacatacatgtggccaacaatcatataaaaaaagctcaacatcactgatcatgagagaaatgcaaatcaaaaccacaatgagataccatctgatacctgtcagaatggctattattaaaaagtcaagggacacatgttctcaggacctcctgagtgctgatcactcatatttggctcagaaaaatctcttctaatatattacagagtttgactctttttgtccacaataatttggtgcctgaacacgtgaggcctcagataagactcaggaccccaaaggagttgtctcaacctggagctaaggtaccagcaggggcccactgaaagcctccaggattttgagcttcttctctgccagaagtggtaagtcctcctgagccccgacctccctttggttgacggccctttatttattctgatctactatttctttttctttctaggaagttgttgtttaaggatcctacttctagttgggagatacattctaaagggtcttctccattgcttttctccccaaattaatctcgatttggcttgtctgttcacatttgcatgaggaactgaactgttgttttcatagggaaacgagagactgtgtttcctcagcttaaaaaagaaagggcattttgctcctcccagccaaaatgtgggaagtgatgaggggtgcttgtgggaatgtctgggggtgggtggaccccatcgtgatgtgagtggcctacagggaacacccaacaaaatgagttttaaaaaggcttgtccaggaagcacatatgggagctggtcactctgcattttgggccctcctggaggtgtttagaccttccgagagagaaactgagacacatgagagggaagaaatgactcagtggtgagaccctgtggagtcccacccacaaccagcacactgtgacccactgcacaaacctctagcccacagctcacttcctcctttaagaagagaagagaaaagaggagaggagaggaggaacagaaaagaaaagaaaagaaaaagtgggaaacaaataatctaagaatgaggagaaagcaagaagagtgacccccttgtgggcactccattggttttatggcgcctctactttctggagtttgtgtaaaacaaaaatattatggtctttgtgcacatttacatcaaggtaagagagccctaatggcagcttgcacgctatagagttcctaagttctctctttctctattttcttttctgcctgctttacatctgctgttacctttctactgagataaaaaccactgtttagatccaaattttttttgcaagctggtaaatttatattaatatctcatggctagagttttgaagtaaaagctacaggatgtctgtgtgtgtgtgtgtgtgtgtgtgtgtgtgtgtgtgtgtgtggtgtgtgtgtgtttaaaagcctttatgatagatttctataattttatgtttaattggcagtgaacccattttaatttccctctaacacaccagacttcttcctctgtactttgagatgtaagttttgctgattttttctcctaaaaagtgtttcctgtaacatggaaatttagggttatttagctgacaactgcctggggtaaggaaacaggttatgaagagtttgaaagggttgggcgtggtggctcacacttgtattcccagcactttgggaagctgaggtaggtgactcatgtgagatcaggagttcaagaccagcctggccaacatggtgaatccctgtctctactaaaaatgcaaaacttagccaggcagtagtggcacactcgtaatcccagctacttgggagactgagacaggagaatcgcttcagcatgggagatgtaggttgcagtgagctgggatcatgccactgcattccagtctgggtgacagagtgagcccctgcctcaaaaaaaaaaaaaaaagaaaaaaagaaaaaaaaagagtttgaaagtttgagatagaaaaaaagaggtt

SEQ ID NO: 8028 - DNA, 6000 bp, Homo sapiens
gcagtttcgatgaaagaattttttttgagatggagttttgctttgttgcccaggctggagtgcaatggtgcaatctcggctcactgcaacctccacttcccaggttcaagcaattctcctgcctctgcctcccgagttactggactacaggtgtgcaccaccattcccggctattttttgtatttttagtagagacgggggtctcgccatgttagtgaggctggtcttgaactcctgacctcaggttatccacctgcctcagcctcccagagtgctgggattacaggtgtaagccactgtgcccggctgatggaagaattcttaaatgactcgttctactttctgctggtccaggcactccttggcttggggcagcattccaccagtttctgcctccatcttctcaatgcttacacctacctggttgcctctgtcttcacacccattcttctgtgtgtgtcttttctcttcttcagattatgatatcactcagatcagattaggactcatcctaattcgttatgatcccttgatcataacttaaatgcatttgcaaagactatttccaactatgttcacatttatagctaatggggctcaggatttcaacgtgtatattagggggaacaagtcaatttatgacagtgtctacaagaaaagtatgcatagaaatacatttaaccaaatacaaaaattaggtgggtgtggtggtacacgcctgtaatcccagctactcaggaggctgagacaggagaatcgcgtcaacccaggaaacagaggttgcagtgagctgagatcttgccattgcactccagcctgggcaacagagtgagactctgtctcaaaaaaagagaaatacatttaaccaaagagatgcaatacgtatacattgacaattttaaaatactgctcaaagaaataacaaaagacctaaatgaggaaaaagtcatcccagtatcataaatcaaaaggcttaaaattagttatctccctctagggaacctagactaatacactcaccccgtctccttgttcggaggctctcctgcctatcagctgttctcctctgtgctttccatgtccctgtggttctctggtgagccccatcatgctgtcctagaagatccacttagaatttcggtatttactcaccattttgactcctcttaacgagacaggcacatgccagctgtttccattcatccaacctgaacctgagcccccgatcattttttctaccacttttcagtcctgggaaactcagtcccaatgtgcttgtcattcatttgagaataattttcattttctccagtagttttaaaattactttgtatctattctagatatcgtttgctctatcatagttaagacattaatgttatttatgaatttgtgcacattaaactcatgatctttcatttctgtaaaaatgtcaactatttcctttgcaagtatttattgactaacatactccttatttccttcattctgaaagtgtgacacatagagatatatctgtttcctcttctcactctattctttgtgtgcattaattatcttttctatttttttcatttctagtttttctccgatgactaatgaaaaatttaataaatattctacaccaatacaatgtttatcatttcagcagtgtctggttcttgatgaaagtatttctaaatgtgttaatataatttactattttcacatcacaatagcttcctaattcatttctataattgcctgttttttctctaatggactcttcgatttttattcctctggggtgggtttttctcccacacacctgatcttccatacagggtttctcccagggatgactcaggaaggaaaactgatgaggggcatttttgtacccgctcctgccctgcggtgtccatgctcccaagtttagaatcagctctgtgttatgcctggcatggtggagcccatgagaccctcacattcaagtgccaaagatgcccggtccagcagtgataaagcgagactgtgtcatgcacacccgggaaggtggctcagtgctgaatgtggcctgggtcaccaaaccaagcaatcccagattctgtccacaaatacagaagagagggagccacagtctctctaggatcccacggtttcctccactttttcctttgttctgagagaaagacaaagtgccatgactgctctgtgggctggacagatgcctgttttcacctgcaggcttgaactcaagctgaggtcttgagcattcccaggtactgataaagcaccttagattgtttctagaaaacactgaaaaattaaccctttgttaattatgtagaaacaaaccctgccctgaaccaaactcctgaaacgctcaggttaaactttgtaactcaatcccttcactgcagatacccagtaggaaagtcacatgagcaaggatgagatgactttggttaaactcagaccccacagggccaggaaggcctgacggagaggaggctcgtgttgccaggtctcagataagaactgtttctaaggacttttttaaaaaccccataagaaactcttccatgtctttcacccctctcctgctttgacatggtttattactagatattctttaggacatcaggaatgcagataggctgctctcgagagaatacttgcccagcaatggcatctcctccaatggactgacagcaactctggctttgaacctctggaaccagggaactctgcttctaagcagctctgtcagcctctcccttgttgctgataagaatttcctttacctctctatgtacagagagctctctctatgatgtttttcctctactctcacaccacaacagtcatcaacacaggagacttgtaggatcagatgtgtgggattgtttcccagacccaatagcgaacagcagctgggtgtcctctaagtcggctccgagctgtctacccagacacagtcccagatcccacagattgaaggcccattctccaagattgcccccacacaccattcccaagtccagacctccagaacttctgactgactggcttcaagttggggatcccatgaccacctctttgggtttgattaatttgctgtagcagctcacagaactcagggagacactgacgtttactggttgaatacaaagcacactgcagaggacacagatgaagagactcataggaggaggcatgggggaagggaccggagcatctatgccctccctgggcgccacgctccaggaacctccgcatgctcagccatccagaagcccatgaaacccagtcctcttgggcttttaaggagcttcgtgacatcagcatttcctcccacaaggaacagggtgagaccatcttctgggagggtcttaagagccaccatcagaaaggcagggaacattcgagtcttgccttgggcaggtgaaggaagggcaggaggaggtcagaggcctcccctaaggcctaacacagccaacactctaacaaaagactgtaaccagtggtatggagttataagccaggaaccgcgggtgaaaaccagtgtgtatcacaacatcacacttccctctccggatgcactgtgtcttgccatgccatgcactccagattgtaatctttgcttctcattctcaaatacaagcaaaatccaggcaaccctggagcaatgcagccttgaattcctggggtctcttgtatgcacactctcttcaaccaaacggggatcataactatggcatttgtgggatgcaaatcctgtgtatacgaatggcagactttccctatacatggtgcagtggagccagcttcagggctggagtacaggcaggttttgtgacatgtgggccacggactggagccagttcccttgtacaccaaagaacaactgtacttagagataattttctctagatttttgttttgttttgttattttaggttaaagcattggatagaacacccagtgtcaccttgtctacctccaggacatgctgcagggcccactctatggaagtccctctaacaaatgctctatgaacaccctggtgtttagtgcttctttctttggaatcccagcagctctatcactggacggtttggtgcactcctttgatggaattcctctgggctgcttggggtccactccagcctcaggtgtagctggaggacgcagcctcccaccttggtctggagccctgaggccctcactgtcattgcagatcccgaggttcctctcccacctccattcagtggtggaaaactccattctaattaccccttgaaggtcctgggaccctctggcctctgttctttcttgtggatccacctacacttgggaacttcctcacctctttttctgctcatgacattgatgctctgggtatttcagaaatgcctcatgtacatttctccattagggtcagatgtgagatccagagtggacacatcaatcatctacacagactggggggtccaacatcgagatcctttcacatcccaaacagttcaggtcttaccctggtctggaaatcaagcacaaatgagcccctccgaatgtcccaggcaccactgacccaacaaccactgtgaccagtgggattcatgacaacaatctgcaaaggaggaaactgaggctcagtgatgggacattacaaaccaaggtcatgtaggcagcggatgataaccagtcatcaaataaatatcaactccctcccccactccccaaatcaaagctcaaacataagtcattgttctcaaaacgttgaacagggattgaggtgcagagggatggccaagtaagcaaagggcaccgaggaggcaggaaagtctcagatgtttgttcccagcgggtgggagtggacactgtagcaaaatattttaaaaaggggaagttgagaggggactatttggttgaaagaaaacccacaatccagtgtcaagaaagaagtcaacttttcttcccctatttccctgcatttctcctctgtgctcactgccacacgcagctcaacctgagctacacagccagatgcgagatgcttctctgctgatctgagtctgcctgcagcatggaccttggtcttccctgaagcatctccagggctggagggacgactgccatggtaaggaccccacaacgctgagctgatggatggctgaaggagggagggtgaccatgtgggaggctgtgagaaggaaagggaagcctccgttaccctcatctggaagggcagacgcagaaagcaccagttctatttgctgctacatcccgtctctcagtgagaagaggagaaaccagacagacagtggctgggggtcaggaaagaccccattacagtctgaaatgtctgcagagggcctggttcctgcccccacctcagctctaaaagaatgagagtcaggctcctggtagggtagttctgcttcctgtgtggctgcagatgacaacaccccatgagaaggacccagcctccgagtgtccacactgggtgggaaggaggggaggctatttctctctgtgtgtctctgtcctgccagcaccgagggctcatccatccgcagagcagggcagtgggaggagacgctatgacccccatcgtcacagtcctgatctgtctcagtgagatttgaagagggaggggagcttctaacctaggagggacctcaccccacagccgacctctagtccctaaggagaccccaggggctcacaaagatcccagggaggggaggacctgcccaggcttcaggggcaaattcctcacagggaactctcttccagggctgagtctgggcccccggacccacgtgcaggcaggtgagtctgtccccagctctcccaggtccctcctcctcactggggacaaggggccacccccgtgcagctggggatggggaatagcagttctggactgactgatgggggcatctggagggtcctgggctgagagctgagatatgttgggtgggaaatgacttagaatctgaactctgatttcct

SEQ ID NO: 8029 - DNA, 6000 bp, Homo sapiens
gtatttttggtagagatgaggtttcaccatgttgcccaggctggtctcaaactcctgggttcaagtgatccacctgctttggcctcccaaagtgctgggattacaggtgtgagccaccgcgcttggccgatgattagtgttttatatagctgttggccatctgtacattttcttttgagaagcaactattcagatgctttgcatacttgttaatggaattatctggggattttttgttgaggtgtgtttcttctaggcctaatttgttgatagttttaatgatgaagggatgttgaattttgtcaaatgtttttttaacatctattgtgatgatcatataatttttttttttttttttagacagagggtctctccttcacccaggcaggagtgcagtggcgcgatcttggctcactgcaacttccacctcctgggttcaagagattctcctgtctcagcctcccgagtagctggactaccggtgcacaccaccacacccagttaatattttgcatttttgagagagatggggtttcatcatgttggccaggctgatctcgatctcctgacctcaagtgatccacccatctcaatctcccaaagtgctgggattgcaggcatgaaccaccgcgcctgcccatgattatatgttttttgttcttccttctgttgacatgagatatcatatctattgatttgagaatgttgaaatatcctcccttctggctgctgtgtggactgcgagctctcctaccctccatggtcttccaatcccactgtccccaggccaactgctcccagactatgcagtagtctcatgtgcatggagcagttgcaattgatcctggtggtgacagaggggttggtgtttcaggcatggcacagtcagaggaggtcccaaggagagaccaagaggtaaacttaagtagagctgcaccccttccttggcatctgtagaaccctggataaaatcaaatacgccaacccaaatgcccatcaatgatagactggataaagaaaatgtggcacatatacaccatggaatactatgcagccacaaaaaaggatgagttcatgtcctttgcagggacacagatgaagctgaaaaccatcattctctgcaaactaacacgagaacagaaaaccaaacatcacgtgtcctcactcataggtgggagttgagcaatgagaacacatggacacgaagaggggaaaatcacacaccggcacctgtcacgggctggggggctgggggagggatagcattagaagaaatacctaatatagacaacaggttgatgggtgcagcaaaataccatggcacgtgtatacctatgtaacaaacctgcacgttctgcacatgtatcccagaacttgaagtataataataaaaaaaaagaaaacgaaacaatgaaacatgggttcttatgaatcacagaacacccgtgaccccaagttaagatggaaatttatgattcattccaactaggtcctgttttcagtatctcacaaaagcttgactctagagtgaaatatacttggaaatgaatgaacgactcttgtggtctttttacttcttgtaaggctttaggatccacccgtttgaatacctatgaccaggacctcctgcaatgcttctctctccacctccaggcatcccttcattcagataataccaattcatcatcaccatctgacctctccttcagcttcttcaccaccctccatctcaattgctttctgtttttcttctttattttttgaacttcaacttttattttagatacgaggatacatgctcaggtttgctacatggaactattgcacccaggtggtgagtgcaggacccagtgggtatttcttttatcctgtcctattgcgttaaatctttccttcccgggactggtcctatctctaaactttttgcgtagtgattttatcaacttaatttttgctaggatgctagattttctaggaggggaggtaatttgaaatgaagtctgggttactgtgaatccagtatatctgctttgctcgcctttatctcttgtgtcctgggatggccacaggttgacatgtttaaatgtttcttaagtgaggatggataagatttactgagtggtgagtgcacgaatacaaaagcaaaatgaggccgggcgcggtggctcacgcctgtaatcccagcactttgggaggccaaggcgggcagatcacctgaggtcaggagttcgaaaccagcctggccaacatggtgaaaccccatctctactaaaaatacaaaagttagccgggtgtggtggcagctgcctgtaatctcagctctcagctactcgggaggctgagttaggagaattgtttgaacccaggaggccgaggttgcagtaagccaagattgcaccactgcactccagcctggatgacagagtgtcaccctgtcacaaaaaaaaaaaaaaaaaagaagcaaaatacaagaagtccaggactggtaaaggcaaggcatgttgagcggttagaaaaggggtgatgacatcgaaaaacctcctggcatttcccagtccttgcctagcacaggttactctgaaagcaggacttaagacaaggatatgagcgcaggtaactgatttgggaaccaagtttaagggaatagggttcccttatgaaagagagaaggagaggaattcctgaaatcagcatgcattgcggacaccactacagcaggtaatatggacaggtccacaccaggatctctgataatgtgcagaccatcatccagaacttcccgccaaaacaggagatactcgccaatatgtgtatggctttctagcccccatttctgggagtttctttttccccagccactgtcagacgcatcaagctttggctgaaatagcttccaataaggtccttacacacaaatgtggagagacacatggaaatcctcgaaatgagatactgtcccgtgattctgagagtgacccaaaaggatacggaatgaggtactaaaagcaggtgcttggaaacctgagggcagtggtgttcatgcgtttcccggcactttgactttcagcctcctgcaagcctctccttctttgccttcctgaccgttagatacaattaatttggggtttgttttttctgcttcctctttcccctcccaccctatgtttcagttctaaagttagaaggtcctctcatccttttaagaagaacagagacagaaaatggttagtcaccatctaggacagactacaattccagatcattgcaggacgtgcccactcaaatggatgattattgagagctggccacctgaagtgttttacacaggcagtgatctaagggttgaagctatctggcctttttgcttgcttgttatgtatttatggcttttttccttttcaaaataattttactaaatatttaattcaccaactatatatatttatggggtacaatgtgttataaatgtatacactgtggaatgatggaatcaagacagttaacatgtccatcactccgcatactaacatctgtgaaaacatttaaaatctatgcttggctgggcgtggtggctcatgcctgtaaccccagcaactttgagaggctgagatgggcggatcaccagaggtcaggagttcgagaccggcctggccaacatggtgaaaccccatctctattaaaaatacaaaaattagctgtgagtggtggcgggtgcctgtaatcccagctacacaggaggctaaagcaggagagtctcctgaacccaggaggcggaggttgcagtgagctgagatcacaccacagcactctagcctgggcgacagagtgagactgcatctcagaaaagaaaaaatatatatatatattttggagctacatcgtgctagcgctgcagagaatgagttttgttttgcgacacagtttttagatgtctaccgggctctggtggagatggaatgtttggcctcaagtgggcaggtcccatgggacatgagtagccgaccatgacctggctgcgtactggcccaccaagcattcgactggcgtgcccagccactctccgtcatcgcagagaagtgctctatgtgagatttggttaaaggagtccctgaaggcctgtgggaggcagaatagtgacctcccagagatgtccacctcctgaggcccagaccctgtgagttggggaagcttatgtggcaaaagggactttgcagatgtgattaagtcaaggatcttgggttggggagattacccaggtgggcctgatgtaatcacaaggggctgagtaagtgaaagaggaaggcaggagggtcagagtgagagaaggaggtgagtgcatgcaagcagggggcagataacgggactggtggctttgaggttggagggaatggagaggcaggaatgcgggagcctgcagaggcttgaacaggcgagggaacagattctccttggagcctccaggaggacacggctctgatagcagcttcattttagcccagggagacccattttggacttgtgacctccgggacggtaagtcaataaacctacattatgtgaagccactaagcttgtggtgatttgttatggcagcaaaaggaagctttatggttcatctgtaccctgaaaatgcaggtttttggtttttttttttttttcacttgttcaatgatgtacccccagtgtcaggcgctttgcaaacacacgatacatacgggttgatgtttggtcaagagaggaattaagaccaggcagacagcaggctgggatcagagagaccccatttctgtctgaaatgtctgcagagaacctggtgcctgcctcagccctagctctggggaaatgaaagccaggctggggttcaaatgagggcagtttcccttcctgtgggctgctgatggaacaaccccatgacgagaaggacccagcctccaagcggccacaccctgtgtgtctctttgtcctgccggcactgaggactcatccatctgcacagctggggcccctgggaggagacgccatgatccccaccttcacggctctgctctgcctcggtgagatttaaagagggggaggggagacccgagtcttggaggaaatttgcctcacagccaggccctggttctttaggagactcaaaaatctcagggtagccgggcgcggtggctcacgcctgtaatcccagcactttgggaggccgaggcgggcggatcacgaggtcaggagatcgagaccatcctggctaacacggtgaaaccctgtctctactaaaaatacaaaaaattagccgggggtggttgcaggcgcctgtggtcccagccactcgggaggctgaggcaggagaatggcgtgaacccgggaggcggagcttgcagtgagccaagatcgcaccaccgcactccagcctgggtgacagcgagactccgtctcaaaaaaaaaaaaaaaaaaaaaaaaaaatctcagggtaaagagaggacctgctcaggcttccggggcaaatccctcacagggaactctcttccagggctgagtctgggccccaggacccacatgcaggcaggtgagtctgtccccagctgtcccaggtccctcctcctcactgggacaaggggccacccatgggcagctgggggaggagacagcagttctgggtgactgatgaggatgacgggggggtcctggggctgagagctgggatctgagggctgaggaaggtcttgggatccagcctctgattttcttccagggcccctccccaaacccaccctctgggctgagccaggctctgtgatcagctgggggaactctgtgaccatctggtgtcaggggaccctggaggctcgggagtaccgtctggataaagaggaaagcccagcaccctgggacagacagaacccactggagcccaagaacaaggccagattctccatcccatccatgacagaggactatgcagggagataccgctgttactatcgcagccctgtaggctggtcacag

SEQ ID NO: 8030 - DNA, 6000 bp, Homo sapiens
tacataattatgacacacagaaattacaaaggcaactggataccaaccatcatttttctatttctctgtgtttaattctttgaccctttatcttatccattaaacaatcaggttaaacctcttccttatttggctttctgtgagcttgggatcatatggaaaatgtgaaagcctcctgaacccaccagcacaggtcctggaatagagaacgtgctctgttcatggcataaaacttgccccttcacccaaatcccccaattcatctctacttccaatcacctatggagatacagatagatcatggggaggtaaacactaatactctttggagtgagctcagatcttggactcagagaccagtgccagcactagcccctggtcacatttcgtactaactcacagaaggacaggctgtattgaaacaataaacgacggagagggcggtccttccccgtgcttctcgggtggaatagcagcctaatatatgtctcagcagatcacaaaaagtagcatgttgttcctgggctacatcattatttcatggctgtttgatttaagtcagttctacttcactttttttatcttgatttcattttttctttcttttcttggagaatgtaattttttttgagtcaagagggttgtggtggtagaaactgtaaagcacattcgctgtgtatcaatcccaatccagtcttcccagagaagattctaaacacctcctggaatgcacctgggcctataccaattcctatcactcaccgtcactccagggagacagaacacacagagaacacattacacaggcaggttcattactaacagataagcagcgagtgacaacagaaacctacatttcaatgtgagccagtccctcaaggctcagaaaagctgctcgagacatgtggagtcaccccatatgcagtgtatctgggggaaatcaaaaagcagcccagcctgggttttgtaccctggagccacaggaagcactcagctaaagcactgcatgacgtcctcctccaggaagaacaggaagacagcccaggctgttctgggatgttcctcctgatctcaggacgttgctgtcttagtccatttttgttgctctaaaggaacacttgagcctgggtaacttctaaagaaaagaaatgtgtttgcctcacagttctgcaggctgtactggaagcatggcaccagcatctatttcttgtgacggcctcaggctgctcccactctggcagaagggaaggagggtctgtctgtgcagagaccacagagatcacacggcaagagagggaccaagggggagggggagcgatggagcttccaagctcttttaacaaccagttctccaggaactaatagagggggaacttgctaaccccgtctccttggaacagcattgatctgttcatgatggatccacctccatgacccaaacaactcccaagaggcccaacctcccaccctgggggttacatttcaatgtgaggtttgaaggggtcaaacatctaaactaaagcagttgtatcctcagcacgttctatggttactacaactgagaaagcaggaggaagctaggtctcccgccatctgggtgcttgtcctaaagagacgttgtatgtggttacctgtcaatcaagaaatgtgagacaattcatatagaggaactgctatgattagcttcttattggtgtcttgtcttcctccaggtaactccagacacctgcacgttctgattgggacctcagtggtcatcatcccctttgctatcctcctcttctttctccttcatcgctggtgtgccaacaaaaagagtaagtctcacgaagcagaagccagagagctcagggccatgtggggaagcaggatgggagcactcaggtgtgtgttcctcacaggcaggatggtccctggcccaaggcaggagccacagaggcaggactttctagagagagcaccagactccctgcctctgccttcagctcacagaccattgcctgattctgaaccgtatcctcacatcccctgcagccactcacatccaggagaaggttccatgacaggcagaaagtgggacacagaatcaataggatgggaactcagagctatacatgggatggatccttgagctcagagagatagaatgtctgagtctgctgttggcaactgagggacctcaggcacctatggcctccccctgtatgttggtatctgcttatgaaatgaggacccagaagtgccctccgagctgttttgacgacttccgtcttctacagatgctgttgtaatggaccaagagcctgcagggaacagaacagtgaacagggaggtaggtgctcctccgcccagcctcgtggctagtcttattcccaaagagtcctggaaaatgtgagcaccctccctcactcagcatttccctccctccaggactctgatgaacaagaccctcaggaggtgacatacgcacagttgaatcactgcgttttcacacagagaaaaatcactcgcccttctcagaggcccaagacacccccaacagataccagcgtgtaacacggaacttccaaatgctgagcgcagatccaaagttgtcttctgtccactagcaccacagtcaggccttgatgggatcttctagggagacaatagccctgtctcaaaaccgggttgccagctcccatgtaccagcagctggactctgaaggcgtgagtctgcatcttagggcatcgctcttcctcacaccacgaatctgaacatgcctctctcttgcttacaaatgtctaaggtccccactgcctgctggagagaaaacacacttgcttagcccacaattctccatttcacttgacccctgcccacctctccaacctaactggcttacttcctagtctacttgaggctgcgatcacactgaggaactcacaattccaaacatataagaggctccctcttaacacggcacttagatacgtgctattccacctttcctcagagtatctttcagccttctgtcagcagtaaaacttataaattttttttataatttcaatgtagttttctcttcttcaagtaaacatgtctgccctcatggtttcgtcaatgggactcttttcttgcctaaggcttccggtgttatcattaccacgtccacataaccccatctgttctccgctgggttctcacccctggactctgagcttctggaagcagggtggagcctgaattgtctctgagactccaatttccatccaaagatgcagcacataggaggttccaaggatggtgaatcagatgaacaagtgatattcttactctctgcagatctggaaagctggcagagtcattccacgatgaaacatttgtagagtcataggccttgttagtctcatctccacagggacacgtatcaacacatcatctttcatactactataaatagacagtcactcctccatatctctggggtttacacatgtttattgaatcagcaataaatcaaaaatattttgagaaaaaaaatccccgaagtttcaaaaagcaaaaaactatgttgaatcgacacaaattgagtggcgtgtaggctgtgtcaggaattataagtaatcaagagatgatttcatgtatacaggaggatgtgcatgggttctatgcaattgctatgctattttttttttttttgagacagtctcactctctcacccaggctggagtgcagtggcgtgatctcaactcactgcaacctccgccttccaggttcaagcgattctcttccctcagcctccccagtagcctcccctaggattacaggcacgtgccaccctgcacagataaatttttttgtgtgtatatttttagtagagatggggtttcagaatgttggaccagctggtcttgaactcctgaccttgtgatctacccagctcagcctcccaaagtgctgggattacaggcgtgagccacggtgcccagcttcactatgccatttcatgcaaggggcttgagcatctgcagattttggtatctgaatggggatcctggaaccaatcacccaggtatagtgaaggaccatggtatataatttttatttgtcaatcttaaaaataaagcataaaaaatttacaacaacaagataaaaaataagaagtgtttttatagtgtgaggataagtttagatttattttttcctacgtgtaaccctatggtcctgtgttatttgttgagaaaatattctattccaccttaaactacatggcagcctttgtcaactataaagggactgtgtatccacagatgtattttagacacagttttctgtccagtggttctctgtatcccctctcatgaggatgctgcattttatataaacttatagaaccccttaaaatttggtaacctgagtcctctgatttgttattataggttatttagtttgctttttttttttttcttgagacagactcttcctctgtcacccaagctggagttcagtggcttgagctcagctcactgcaacctccgtctcccaggttcaagctattctgatgcctctggtttagtagtagaaactcaagcaggaaaattagaatggcttcttgtcacaattactctgataatgttaataatacctgttagacattttgcacattacatatgaagaagagtttgaatctcagataaaaacaaaaatacatcaaaaatctttaatgtaagcacagaattcaatcatctcgtgtatgagaggttggatctgagacgtcttttgagtctggtcgtagtgaaggacgcaaggtgtcaattctagtgagaacaatttccaggaagccatgttccgctcttgagcgagcacccactgggcctcatgcaaggtagaaagagcctgcgtacgtcaccctcccatgatgtggtcaacatgtaaactgcatgggcagggcgccaaataacatcctgtgcgctgctgagctgagctggggcgcggccgcctgtctgcacagacagcaccatgtcgctcatggtcgtcagcatggtgtgtgttggtgagtcctggaagggcatcgagggagggagtgcggggatggagatcggggcccagagttggagatataggcctggaagtggagttatgggcctagagatggagtgatgggcctagaagtggagatctgggcctggagtggagatctgggcctggagtggagatatgggcctggaggttgagatatgggcctgcagtagagatatgggcttgtagtggagacatgggcctggagatggagatatgggcctggagatggagatatgggcctgcagtagagataggggcctggagtggagatatgggcctggagtggagatatgggcctggaggtggagatatgggcctggaggtggagatatgggcctggagtggagatatgggtctggaggtggagatacgggcctgcagtagagatatgggcctggagtggagatatgggccaggagtggagttatgggcctagagatggatatctgggcctggagtggagatatgggcctaggaaggagatatgggcctgggtgtggagatatgggactggagaggtgatatgggcctggagtggagatatgggcttagggtggagatctgggcctggggcggagatatgggactggattggagataggggcctagggtggagatctgagcctggattggcgatatgggcctagggtggaaatatcagcctggagtggagatatgggcttggggtggggatatgggcctggaaactgggtctctgcacagccgacagccctgttcttgggtgcaggtaggcactgagggtgagtttaacttcagcccaggaagggcctggctgccaagactcacagcccagtgggggcagcaagggaggcctggtttgcctgcagatggatggtccatcatgatctttctttccagggttcttcttgctgcagggggcctggccacatgagggtgagtccttctccaaacc

SEQ ID NO: 8031 - DNA, 6000 bp, Homo sapiens
aggcaatgagcctaaaacctcttccgtatttggctttctgtgagcatgagaccatatagaaaatgtgaaagcctgctgaatcctccagcacagatcgtggaatagagaaagtgctctgttcatcacaaaaaaaacttgccctctcactcaaatcccccacttcacccctacttccaatcacctgtggagattcagatagaccatggggaggtaaacattaatactccttggagtgagtccagatcttggaatgagagatcagcaccagcactagctcctgctcccctttcctactaattcacaggaggacaggtggtattgaagcaatagatggtggagggggtggtccttcccccagcctctcaggtagaacagcagcctaacatgtgtctcccgagatcacaaagagtaggacgtttcacaggggcttcaacacgatttcctggctgttggacataagataactctatttcgcttttttatcttgatttcacttttgtttcctttccttggagaacgcaagttgtttgactcaagaatgctgtggatgtagaaatcctaaagcacattcgctgtgtgtcaatcccagtgcagtcttcccagaaaagaccctaaacacctcctagactgcacctgggcctacgccaattcctatcactcaccgtcactccagggagacagaacacacagagaatacgttacataggcaggttcattactaacagataagcagcgagtgaaaacagaagcctacatttcaatgtgagccagtccctcaaggctcagaaaagctgctcgggacatatggagtcaccccatttgcagtgtagctgggggaagccagaaagcagcccagcctgggttttgtaccctggagccacaggaagcactcagctaaagcactgcatgacgtcctcctccaggaagaacaggaagacagcccaggctgctctgggacgttcctcctgatctcaggacgttgctgtcttagtccatttttgttgctctaaaggaacacttgagcctgggcaacttctaaagaaaagagattggtttgcctcaccgttctgcaggctgtactggaagcatggcaccagcatctatttctcgtgatggcctcaggctgctcccactctggcagaagggaaggagggtctgtctgtgcagagaccacagagatcacacggcaagagagggagcaagggggagggggagcgatggagcttccaagttcttttgaacaaccagctctccaggaactaatagagggggaactagctaaccccgtctccttgggacagcattgatctgttcatgatggatccacctccatgacccaaacacctctcaagaggcccaacctcccacaatgggggtgaaatttcaatgtgaggtttgaaggggtcaaacatctcaactaaagtagttgtgtcctcagcacattctatggttactttgagagctataactgagaaagcaggagaaagctgggtctcccgccatctgggtgcttgtcctaaagaggtgttttacgtggttacctgtcaatcaagaaatgcgagacaattcataaagaggaactgctatgattagcttcttattggtgtctcatcttcttccaggtaacccaagacacctgcacgttctgattgggacctcagtggtcatcatcctcttcatcctcctcctcttctttctccttcatcgctggtgctccaacaagaaaagtaagtctcacgaaggagaggccagagagctcagggccatgtggggaagcaggatgggagcactcaggtgtgtgttcctcacaggtaggatggtccctggcccaaggcagcagccacagaggcaggactttctagagagggcaccagactccctgtccctgctttcagctcacagaccgttgcctgattctgaactgtatcctcatgtcccctgcagccactcacatccaggagaaggttccatgacaggcagaaagtgggagacagaatcaatgggatgggaactcagagctattcatgggatgggtccttgagctcagagagatagaatgtctgagtctgctgttggcaactgagggacctcaggcacctatggcctccccctgtttgttggtatctgcttatgaaatgaggacccagaagtgccctccgagctcttttgttgacttccgtctcctacacatgctgctgtaatggaccaagagcctgcagggaacagaacagcgaatagcgaggtaggtgctcctcggcccagcctcgtggctagtgttattcccaaacagtcctggaaaacgtgagcaccctccctcactcaggatttccctctctccaggactctgatgaacaagaccctcaggaggtgacatacgtacagttggatcactgcgttttcacacagagaaaaatcactcgcccttctcagaggcccaagacacccccaacagataccagagtgtacacggaacttccaaatgctgagtccagatccaaagttgtctcctgcccatgagcaccacagtcaggccttgaggggatcttctagggagacaacagccctgtctcaaaaccgggttgccagctcccatgtaccagcagctggaatctgaaggcgtgagtctgcatcttagggcatcgctcttcctcacaccacaaatctgaatgtgcctctctcttgcttacaaatgtctaaggtccccactgcctgctggagagaaaacacactcctttgcttagcccacaattctccatttcacttgacccctgcccacctctccaaccttactggcttacttcctagtctacttgaggctgcaatcacactgaggaactcacagttccaaacatacaagaggctccctcttaacacggcacttagacacgtcctgttccaccttccctcatgctgttccacctcccctcagagtatctttcagccttctgtcagcagtaaaacttatatattttttaaaataatttcaatgtagttttccctccttcaaataaacatgtctgccctcatggtttcggtaatgggactcttttcttgcctaagacttccattatcattaccatgtccacataaccccatctgttctccactgggttctcacccccggactctgagtttctggaagcagggtggagcctcatttgtctctgggactcctatttccatccaaagatgtagcacataggaggttccaaggatcgtgaatcacatgaacaagtgatattcttactctctgcagacctggaaatctggcagagtcattccaagatgaaacatttgtagaatcataggccttgttagtctcatctacacagggacacatatcaacacatcatctttcacactataaatatacagtcactcctccatatctgtggggtttacagttctttattgaaccgagtataaatcaaaaatattcagagaaagtatccacagagttacaaaaagcagaactgtgttgaatggacacaaatgaagctgtgtgtaggctgcatcaggaattataagtaatctagagatgatttcatgtatacaggaggatgtgcataggttatttgcaaactctgtgccatttcatataagaggcttgagcatctacagattttggtatctgagtggagatctcgaaaccaatcacccacgaatagtgaaggatgaccgtatatgacttttatttctcaaatttaaatataaatcataaaaaatgtacaactagataaaaactaagaagtgtttttatagtgtgagttagatttattttttcctaggtataacccattggtttaatattatttattgagaagacattctatgccaccttaaaccacacggcagcctttgtcaactctaaagggactgtgtgtacacggatgtactttagacactgtttctgctaaggggctctctgtgtccacactcttgatgatgctgcactttatgtagccttatagaaccctttaaatttagtagccagagctctctaatttgttattataggctatttgcttttttttcttgaggcggagtcttgctctgtcgcccaggctggactgcagtgacacaatctcagctcactgcaacttctgcctcccaggttcaagcgattctcatgcctcagcctcttgagtagctggcgttacaggtgcctgccaccaggcacggctaatttttggatttttagcagagacacggtttcactatattggccaggctgctctcaaactccttatctcagttgatccgcccacctcggcttcccaacgtgctggggaaacttgattttctatagcattatgttactggatatttctgtaaaatttaaaatgagggagggagagagacagacggaaaacaaactccagagttgggactctggaatcttgggtcatgagacaaattttagattaaactacaaaactccagaatttacaggtggggtttttactgataaagtacaattctaagattgtaaataattgcataatccttccctgggaatttaaatcattttaactggttctgctgtaatactagaaatacaagcatgaaaaattctaatggtttattagtgacaatgactctgaaaacattaataatacctattagatattttgcatattacacaggaagaagagtttgaatctcagataaaaacaatagaaatacatgaaaagtctttcatgttagcacagattttaggcatctcgtgttcgggaggttggatctcagacgtgttttgagttggtcatagtgaaggacactaggtgtcaaattctagcgagaacaatttccaggaagccgtgttccgctcttgagcgagcacccactgggcctcatgcaaggtagaaagagcctgcgtacgtcaccctcccatgatgtggtcaacatgtaaactgcatgggcagggcgccaaataacatcctgtgcgctgctgagctgagctcggtcgcggctgcctgtctgctccggcagcaccatgtcgctcttggtcgtcagcatggcgtgtgttggtgagtcctggaaagcaatagagggagggagtgaggggatggagatctgggcccagaggtggagatataggcctggaggtggagttatgggcctggagtggagatctgggcctggagtggatatatgggcctagagatggagtgatgggcctagaagtggagatctgggcccagaggtcgagatataggcctggaggtggagtgatgggactgtagtggagatctgggcctggagtggagataggaacctggaggggagataggaacctggaggggagatatgggcctggaggtggagatatgggcctggagtggagtcatgggcctggaggtggagttatgggcctgcagtagagatatgggcctgaagtggagacatgggcctggagtggagatatgggccaggagtggagatatgggcctagaggtcgatatctgggcctggagtggagatatgggccaggagtggagatatgggcctagaggtcgatatctgggcctggagaggagatatgtgcctaggatggagatacgggcctgggtgtggagatatgggactggagaggatatatgggcctggagtggagatatgggactggagaggagatatggacctggagtggagataagggcctggattggagatatgggcccagggtggagatctgagcctggattggagatatgggcctggattggcgatatgggcttagggtggaaatatcggcctggagtggagatatgggcctggagtggagatatgggcttgaggtggggatatggacctggaggctgggtctctgcacagccgacagccctgttcttgggtgcaggtaggcactgagggtgagtttaccttcagcccaggaagggcctggctaccaagactcacagcccagtgggggcagcaagggtgccctggtttgcctgcagatgggtcatccatcatgatctttctttccagggttct

SEQ ID NO: 8032 - DNA, 6000 bp, Homo sapiens
ttgatcctttatcctatccgtaagaaaatcaggcgaaaacatcttccttatttggctttctgtgagcatgagatcatatggaaaatgtgaaacccaccagcacaggtcctggaatagagaacgtgatctgttcatggcacaaaacttgccccttcacccaaatcccccacctcacccctacttccaatcacattaatgatacagatagatcatggggaggtaaaaactaatattctttggagttcagatcgtagactcagagaccagtgccagcactatctcctggtcaccttttggagtaattcacagaaagacaggctgtattgaagcaacagatgatggagggggtggtctttcccccagactctcgggtggaacagcagcctaatatctgactcccaagatgacaaaagtagcatgttgcccacgagcttcatcattatttcctggctgtttgatataagacagctcaacctcacttatgttgatttcaatgtcactgttttttccttttcttggagaatgtaatttgtttgagtcaagagggttgtggatgtagaaactgtaaagcacattcactgtgtatcaatcccagtccagtcttcccagagaagactctaaacacctcccatactgcacctggggctgtgccaatttctatcactcaccatcactccagggagacagaacacacagggaatacattacataggcaggttcattacttatagataagcagcgagtgacaacagaaaccttcctttcagggtgagccagtccctcaaggctcagaaaaactgctcaggacacatggagtcacttcatgtgcactgtagctgggggaagccagaaagcagcccagcctgggttttgtaccctggagccacagggaacactcagctaaagcactgcatgatgttctcctccaggaagaacaggaagacagcccaggctgttctgagacgttcctcctgatctcaggatgttgctgtcttagcctatttttgttgctataaaagaacacttgagcctgggtatcttctaaagaaaagagatgtgtttggctcactgatctgcacgctgtactagaagcaggacactaccatctatttctggctgcggcctcaggctgctcccacactgacagaagagaagggggtcctgcgtgtgcagagaccacagagatcacatggcaagagagggagaaagggggtgtgatggagcttccaagctctttttaagaatcaactctccagggtactaatagagggagaacttgctaaccccgtcctctggggacagcattaatctattcatgatggatccacccccatgaccaaaacacccctcccaataggcacaactcccacactggggattaaatttcaaagtggggtttggaggggtcaaacattgaaacaatagcagttgtatcatcagcacattctattgttattatgaaaactataacggagaaagcaggagaaagctgggtctcccgcctcgtgggtgcttgtcttaaagaggtgttttatgtggttgcctggcaaccaagaaatgagagacaatccacaaagaggaactgctatggttagcttcttattggattcccatcttcctccaggtatcgccagacacctgcatgctgtgattaggtactcagtggccatcatcctctttaccatccttcccttctttctccttcatcgctggtgctccaaaaaaaaagtaagcctcacgaagcagaggccagagaactcagggccctgtgcggaagcaggatgggagcacgcaggtgtgtgttcctcactggcaggaaagtctctggcccaaggcaggagccagaggcagagctttctagagagagcaccagacaccctgcccctgccttcagctcacagaccgttgcctgattgtgaactgtatcctcacgtcccctgcagccactcacatccaggagaagattccatgacaggcagaaagtgggagatagaatcaatgggatgggaactgacagctattcatggaatggggtcttgcactcagagagatggaatgtctgagtctggctgttggcagctgagggacctcaggcacctatggcctccccctgtgtgttggtatctgttcatgaaatgaggacccagaagtgccctcccagctgttttgattgcttccgtctcctacagatgctgctgtaatgaaccaagagcctgcgggacacagaacagtgaacagggaggtaggtcctcctagcccagcctcatggatacagtcttattccgaaatagtcctgaaaaatgtgaacaccctccctcactcaggatttccctctctccaggactctgatgaacaagaccctcaggaggtgacatacgcacagttggatcactgcattttcacacagagaaaaatcactggcccttctcagaggagcaagagaccctcaacagataccagcgtgtgtatagaacttccaaatgctgagcccagagcgttgtctcctgcccatgagcaccacagtcaggccttgatgggatcttctagggagacaacagccctgtctcaaacccagcttgccagctctaatgtaccagcagctggaatctgaaggcgtgagtctccatcttagagcatcactcttcctcacaccacaaatctggtgcctgtctcttgcttaccaatgtctaaggtccccactgcctgctgcagagaaaacacactcctttgcttagcccacaattctctatttcacttgacccctgcccacctctccaacctaactggcttacttcctagtctacttgaggctgcaatcacactgaggaactcacaattccaaacatacaagaggctctctcttaacacggcacttagacacgtgctgttccaccttccctcgtgctgttccacctttcctcagactatttttcagccttctggcatcagcaaaccttataaaatttttttgatttcagtgtagttctctcctcttcaaataaacatgtctgccttcattctttaggtgactctttttttggctgaaagtttccagtgttatcattaccatgtccaaataactccaactgttctccactgggttctcacccctggacttggagcttctggaagcagggtggagcctgatttgtctctgagactccaatttccatccaaagatgcagcacataagaggttccaaggatcgtgaatcacatgaacaagtgatattcttactctctgcagacctggaaagctggcagagtcattccatgatgaaacatttgtagagtcataggccttgttagtctcatctccacggggacacatatcaacacatcatctttcatactataaatatacagtcggtcctctgtatctgtgggatttacaggtgtttattgaaccaaatataaatcaaaaatattcagagaaaaaatccacaaagtttcaaaaagcaaaactatgttgaatggacacaaatgaagctgtgtgtaggctgtatcaggaattataaataatcaagggatgatttcatgtacacaggaggatgtgcatgggttatttgcaaatgctgtgccatttcatgtaagaggcttgagcgtctgcagattgtgctatctgagtggagatcctgaaaccaatcacccacgaatagtgagggatgactgtatataatttttatttctcaattttaaatataaaacataaaaaaattacaataacaagataaaataaacaagtgttttatagtgtgagaatacgtttagatatatttttctctatgtgtaacccttgggcccatgttatttattgagaagacattctattccaccttaaaccacatggcagcctttgtcaactataaagggactgtgtgtacacggatgtattttagacactgttttctgctcagtggctctctctctgtccactctcttgagaatgctgcattttatgcagccttatacaacccctaaaatttggtagctggagtcctctagttatttattataggctatttgctatgctttttttatttttcttgaggcagagtctcgctctgttgcccaggctggagtgcagtggcacgatctcggctcactgcaacttccgcctcccaggttcaagggattccgtgcctcagcctcttgaatagctggcattacaagtgcctgctaccaggcatggctaatttttgtatttttagcagagacatggtttcactatattggccaggctggtctcaaactcctgacctcggttgatcactcacctcggcttccaaagtgctggggaaattgattttctatagcattatgttactggatatttctgtaaaatttaaaatgagggaggcagagagacagagagagagcaaaccatgagttggaactctggaatcttgggacatgagacaaattctagataaatctacaaaaatccagaatttacatgttgtgatttttgctgataaagtacaattctaagattgtaaataattgcataatccttccctgggagtttaaatcatttgaactggttctgctgtaatactagaaatacaatcatgaaaaattctaatggtttattgtcacaattgctctgaaaaccttaataatacctattagatattttgcatattacacaggaagaagagtttgaatctcagataaaaacaataaaaatacatgaaaagtctttcatgttagcacagattttaggcatctcgtgttcgggaggttggatctgagacgtgttttgagttggtcatagtgaaggacgcgaggtgtcaattctagtgagagcaatttccaggaagccatgttccgctcttgagcgagcacccactgggcctcatgcaaggtagaaagagcctgcgtacgtcaccctcccatgatgtggtcaacatgtaaactgcatgggcagggcgccaaataacatcctgtgcgctgctgagctgagctggggcgcagccgcctgtctgcaccggcagcaccatgtcgctcatggtcgtcagcatggcgtgtgttggtgagtcctggaagggaatcgagggagggagtgcggggatggagatctggacctggaggtaaagatatgggcctagaggtggagttatgggcctagaggtggagttatgggcctgaagtggagatctgggcctggagtggagatctgggcctggagtggagataggggcctggggtggagatatgtgcctggagtggagatctgggcctggagtggagatatgggcctggggtggagatatgtgcctggggtggagagatgggcctggaggggagatatgggcctggaggggagatgtgggcctagaggtggagtgatgggcctagaagtggagcgatgggcctggagtggagatatgggcctggaggtggagttatgggcctgcagtagagatatgggcctgaagtggagatatgggcctggagtggagatatgggcctagaggtggagttatgggcccggaggtggagttaagggcatgaagtggagatctgggcctggagtggagatatgatcctggagtggagatatgggcctggggtggagatacgggcctggagcagacatacaagcctggaaaggagatatgggcctggagaggagatagaagcctggagtggaaatatgggcctggagtggagatatgagcctggagtggatatatgagcctggagttgagataggagcctggagtggagatatgggcctggagtggacttaccagcctggagaggagatatgggcctggagtggagatacggacctggagtggagatctgggcctgttgtgtagatctaggcctggaggtagagatctgggcctggaggctcagtctctgcacagccgagatccttgttcctgggggcaggtaggcagcgagggtgagtttaccttcagcccagcaagggcctggctgccaagacgcacagcccagtgggggcagcagggtgccctggtttgcctgc

SEQ ID NO: 8033 - DNA, 6000 bp, Homo sapiens
catcttgggagtagatcaataactgagatggtgccaggaatgttaaaaagcttttgtcagtcctaaatattgacaaataaaatttaattaaagtcttagaagaaaacacaaaggaaaacttcacaacatcggatttggcagtgattctttagatgtgacaacaacggcacaggctactacagaaaaaataaacaagttagactttatgaaaattttgaaatattgtgactcaaaagacaacatcagttacttcacatggcaaggaaaaagaacttttaagacgatattatcaaagtaaaaagacaacccacagaatgggagaaaatgttttcaaaccacaccacctgtaagggattaacatccagaatatacagacaactcctaaaactcaatcacaataaactcaattcaaaaatgggcaaagtactgaaacagacatttctccaaagaacatacgcatgaaaagatattcagcatcacgaatcattagggaaatactaactaaaactacaccagatgccatttcataccccttaggatgggtatcatcaaaacaacaacaacaacaacaacaaagtttctatacattaacaacaaactatccaaaaaagtttacaagaaaataagcccatttgcaataactacagaaaacaaaacatgcaggaataaattcacccaaggagtagaaagatctgtatgcaaaagctataaaacattgatgaaaaaactcaagaaataaacaaataaatcgaaagatattccatgttcacggatcagaaggattaatgttgttaaaatgtccattctatccaaagtgattcaatgcaaccattatcaaaaatccaatgacattttttttacagaaatagaaaaaacagtcctaaaattcatgtggaaccacaaaagatctcaaataaccaaagccatctagagggaaaggaacaaagttggaagcatcacattacctaaacacaaactacattacaaaattacagtaattaaaacaacacagtacttgcataaaaacagacacatagaccaatggaagtgattcatagcccaggaaaaaaatgcatgcatttagggtcaaacaatttttgggatgtgtcaagaacacacaatggagaaggaacagtctctttaataaatgggattgggagactgcatgtccacatgcagaagaatggaagtggacatttgcctcacaaaacatacaaagtcaactcaagatagattaatgacttaaatgtaagatgaaagactataatcccagcaatttgggaggccaaggtgggcagatcacctaaggtcaggattccaagaccagcatggccaacatggtgaaatcccgcctctactaaaaatacaaaaacagctgggtgtggttgtgggtgcctgtaatctcagctactcgggaggttgagacaggagaatcacttgaacccaggaggtagaggttgcagtgagccgagatcgcaccactgcactccagccggggcaacacagtgagactccatcttaaaaaaaaaaaaaaaactactaaaagaaatcaagggaaaactccactggcttgggcaaaaccattttggatattaacccaaaggcccaggcaacaaaagcaaaagtagacaaataacattatatcaaattgaaagtttctgcaaagaaaaaaaaaactcaacaagtggaaagacaacctatggaatgggagaatatatttgcacccatacatctaataaggaattaatatccaaaatatataagaaactcaaacaactcaatggtaagaaatcaaataacccaacttaaaaaaatgggcaaagtatctgaataaacatttctaagaataagacaaatcaccaaaaggtatatgaaaaaatgattagcattactaaacatcagctaaataaaaattaaaactagaatgagatatcacctcacacctcttagaatgaccattaacagtctgggcatggtggctcatgcctgtaattcaggcactttgggaggccgaggcagggagattacctgaggtcagcagttcgaaaccagcctggccaatatggtgaaaccccatccctactaaaaatacaaaaattagcagagtttggtggcgcacacttgtagtcccagctactctggagactgaggcaggggaatcgcttgaacccaggaggcagaggttgcagtacaccgagattgtgccactgcactccagcctgggtgacagagcaagactgagtctcaaaaaaaaaaaaaaaaaaaagaccattatcaaaaacataaaaaataacaagggttaacgaggatgtggagaaaagggaacatttgtatgcagttgatgggaatgtaaattagcacaaccattatggaaaacagtctggaagttcctgaaaaaattaaacatagaattcccatatgtgtctgcaatccaactactgcgcatgtatccaaaggaagtggaatcagtatgttgaagagatatctgcattcccatgtttacagccgcattattcataacagccaagatgtggaatcacccttactgcccatctatgggtgcatggacaaagaaaacgtggtatacgataggaacgtaatgaagtactatacaacctttacaacaaagaaggaagtcctctcatttgtgacaatgtgaaaaaacttagaggacattatgttaagggaaacaatccaggcacagaaagacaaatgccacatgatctcatgtgtggagtgtaagaagtggaacctagaggaacagtaaaatggtcgtcgaaagaacctgggatggagagagattgaagagatgttggtcaaaggatgcaaaatttcagttagaagaaatcggttcaagagatctattgtatgtcttggtgactccagttaatagcaacatatggtgtattgaacattactaagagattagattttacatgttctcaccacacacacaaaacatacaagtatgtgaaaaaataaatatgataaagaggttgtttcatccattccacaatgtgtacctatatgaaaacatcatgatggacaccacaaatacccttttcctcattaattaaatttgttttggttttttttttgagatgcagtttcactgttgttgcccaagctgaggtgcaatggcgtgatctccgctcactgcaacctctgcctcccaggttcaagcggttctcctgactcagcctcccaagcagctgggactacagttgcgtaccaccccgtccggctatatttgtgtttctagtagagacagggtttcgccatgttggccaggctggtctcgaactccagacctcaggtgatccacccgcttcgccctcccaaagtgctagatttcaggctgagacaccacacccagcctgtacattgactttctgcccttaaactgtgctgaagtttgtttctcagatgtaggagcctttgggcagagactatggggtttctaggtatagaaattatctcatcttcaaacagaggtaatttgactacctctctctgctactctcttcttacttggatgccttataattctttctctttcctgatggctctgtctaggacttcaagtactatgttgaataggatggtgagagtgggcattcttgtcttgtttcacttatgaagggaacttcttccagcttttactcattcagtatgatgttggttgtgggtttgtcacaggcggctcttattatattgagttatgtttcttcaatgcttagcttgttgagggcttttaacatgaagaaatgcttagtaaaaagtatgttctacatgtgtgttgagaagatcatgtggtttttgtttttagttttgtttaggtgatgaatcacatgtattgattgtgtatgttcaaccaaccttgcaccctaagaataaagttgacttgatcatggtggattcactttttgatatgctgcgggattcagttcttagtattttttgtggatttttgcctctatgttcatcaggaatattggcatgtagttttcttttgtttaatgttcttttctgtctttagtatcagggtgatgccagccttatagaatgagtaaaggccaccctgggcaaacagtgagacccatccctttttaaaaattatgagttttacaaatttaaaatgcatagtgaaaaagttcttacaaactccagaaagataggtgtaaataagagacatttgtaagaatgacagcacattaaatgtgtagatttcaaccttcagttattgcaatattccagtatcaagttggaggatgttatcagtctgatattttttcctcaaatgagagagagaaagaaagacacacaaacaacacagggagaaaaaaagcacacgttacagagagacaaaaagggagacagggaactgtgaatttggactcttgtgtcataagacaaattctagataacacgaccagaccttcaattgacatattgtgtttttgctaataaggtggaattctatgatgcgaaataactatatagtcttttctactgggatttaaatcattttatctgtttctggcttaacaggaaaaatacaaccatggaaaattatgatgatttatttaatacgattgctctatagtgttaataaaacctattaggtattttgcatattacatatcaaggagagtttgaatctcaggtagaaacaaaaaaaaatacatcaaatttcctcatgtgagtgcagaattcaatcgtcccgtgcaggggtaagtgagtctgagatgtgttttgagcctggccgttgcgcatgatgtgaagtgacaagtctagtctgcagttttcagaaaccctcattcctcccttgactgattcaccacttgaacctcatatgacgtagaagaagcctacctatgtccccttcacatgttgtggtcaatgtgtcaactgcacgatccgggcccctcaccacatcctctgcaccggtcagtcgagccgagtcactgcgtcctggcagcagaagctgcaccatgtccatgtcacccacggtcatcatcctggcatgtcttggtgagtcctggaagggaaggagcaccagggttacactatgggcctgcagattgggtgtctccccagcagagagccatgttctgaagcaagtgagtggtgaggatgagttaattttcagtccagcgtggcgcccagtggctcaggaggaaagggtaggttgctgccgagatgaatagttcatcatgatctttctttgcagggttcttcttggaccagagtgtgtgggcacacgtgggtgagtccttccccaaatgatgggttgccatcttcaccccaatacaagtgaattttccagaaatgggagggaggcagcacagagggtgggctgatgggctgaccatgggaaggcctggggggagtctctcatgaactagtaagaggagatcctgggagtctctcatgaactagtaagaggagatcctgggagtctctcatgaactagtaagaggagatcctggtatgctcagccctctgttttgtcttagccctccccagcctttcttccccatggctgagttgagctctgtgtggcccaggcgggatactgaggtgctcaaagctggggtgtgtggggggatgtggtgtcaccgacagaggagggaagggtagcagtgttaggaacagcaggtcctctgaggacaagagggtaactcacaccctccagcgtttccatgacggtaggggctgcagtgtggctgctgtcattctgccagaagaggtgggggaaccacagccacgaccctgccattccaaatcctctgatggagctcagttgtttattgtggttcaggcattagctaatattccattcacaaaggtcataccctccaccccatgtctactttgtgttctttggtgtaactaatcttgcagtattaaaatctagtaagagtcccttactcagcacctgctcagttctcaactgacacttttgttgtagggagacgccacgtctatgcgggatgg

SEQ ID NO: 8034 - DNA, 6000 bp, Homo sapiens
atgagatcatatagaaaatgtgaaagcccgctgaatcctccagcacaaatcctggaatagagaaagtgctctggtcatcacaaaaaaaacttgccccctcacccaaatcccccatctcacccctacttccaatcacctgtggaaatacagatagatcatggggaggtaaatgctaatactccttggagtgagtccagatcttggaatcagagatcagtgccagcactagctcctgctcccctttcctactaattcacaggaggacaggtggtattgaagcaatagatagtcgagggggtggtccttcccccagcctctgaggtagaacagcagcctaacatgtgtctcccgagatcacaaagagtagcacatttcacacgggcttcaacactattttctggctgtttgacataagagaattctacttcgctttttttatattgatttcacttttgtttccttttcttggagaatgcaagttgtttaactcaagaatgccgtggatgtagaaatcctaaagcacattcgctgtgtatcaatcccagtccagtcttcccagagaagactctaaacacctcctggactgcacctgggcctatgccaattcctatcactcaccgtcactccagggagacagaacacacagagaatacgttacataggcaggttcattactaacagataagcagcgagtgacaacagaagcctacatttcaatgtgagccagttccccaaggctcagaaaagctgctcgagacatgtggagtcaccccatttgcagtgtagctgggggaagccagaaagcagcccagcctgggttttgtaccctggagccacaggaagcactcagctaaagcactgcatgacgtcctcctccaggaagaacaggaagacagcccaggctgttctgggacaatcctcctgatctcaggactttgctgtcttagtccatttttgttgctctaaaggaacacttgagcctgggtaacttctaaagaagagattggtttgcctcaccgttctgcaggctgtactggaagcatggcaccagcatctatttcttatgatggcctcaggccgctcccactctggcagaagggaaggagggtctgtctgtgctgagaccacagagatcacacggcaagagagggagcaagggggagggggagcaatggagcttccaagctctttttaacaaccagctctccaggaactaatagagagggaacttgctaaccccgtctccttgggacagcattgatctgttcatgatggatccacctccatgacccaaacacctcccaagaggcccaacctcccacactgggggttaaatttcaatgtgaggtttgaaggggtcaaacatctcaactaaagtagttgtatcctcagcacgttccatggttactatgagagctataactgagaaagcaggaggaagctagatctcccgccatctgggtgcttgtccgaaagagatgctgtaagtggttacctgtcaatcaagaaatgcaagacaattcatatagagaaactgctatgattagcttcttactggtgtctcctcttcttccaggtaaccccagacacctgcacattctgattgggacctcagtggtcatcatcctcttcatcctcctcctcttctttctccttcatctctggtgctccaacaaaaaaagtaagtctcacggggcacaggccagagagctcagggccatgtggggaagcaggatgggagcacacagctgtgtgttcctcactggcaggatggtccctggcccaagacaggagccacagaggcaggactttctagagagagcaccagactccctgcccctgccttcagctcacagaccgttgcctgattctgaactgtatcctcatgtcccctgcagccactcacatccaggagaaggttccatgacaggcagaaagtgggagacagaatcaatgggatgggaactcagagctattcatgggatgggtccttgagctcagagagatagaatgtctgagtctgctgttggcaactgagggacctcaggcacctatggcctccccctgtttgttggtatctgcttatgaaatgaggacccagaagtgccctccgagctcttttgttgacttccgtctcctacagatgctgctgtaatggaccaagagcctgcagggaacagaacagccaacagcgaggtaggtgctcctcggcccagcctcgtggctagtgttattcccaaacagtcctggaaaacgtgagcaccctccctcactcagcatttccctccctcactcagcatttccctctctccaggactctgatgaacaagaccctgaggaggtgacatacgcacagttggatcactgcgttttcacacagagaaaaatcactcgcccttctcagaggcccaagacaccccctacagataccatcttgtacacggaacttccaaatgctaagcccagatccaaagttgtctcctgcccatgagcaccacagtcaggccttgaggacgtcttctagggagacaacagccctgtctcaaaaccgagttgccagctcccatgtaccagcagctggaatctgaaggcgtgagtcttcatcttagggcatcgctcctcctcacgccacaaatctggtgcctctctcttgcttacaaatgtctaggtccccactgcctgctggaaagaaaacacactcctttgcttagcccacagttctccatttcacttgacccctgcccacctctccaacctaactggcttacttcctagtctacttgaggctgcaatcacactgaggaactcacaattccaaacatacaagaggctccctcttgacgtggcacttacccacgtgctgttccaccttccctcatgctgtttcacctttcttcggactattttccagccttctgtcagcagtgaaacttataaaattttttgtgatttcaatgtagctgtctcctcttcaaataaacatgtctgccctcattgcttcaggtaatgtgacactgtattcgctgaaagaaaccgctgttatcattaccatgtccacataaccccatctgttctccgctgggttctcacccctggactctgagcttctggaagcagggtggagcctcatttgtctctgggactccaatttccatccaaagatgcagcacataggaggttccaaggatcgtgaatcacatgaacaagtgatattcttactctctgcaacctggaaagctggcagagtcattccacgatgaaacatttgtagagtcataagccttgctagtctcatctccacggggacacatatcaacacatcatatttcatactataaatatacagtcgctcctccatatctgtggggtttacaggtgtttattgaaccaagtgtaaatcaaaaatattcagagaaaatgtccacaaagtttcaaaatgcaaaactatgttgaatggacacaaatgaggcagtgtgtaggctgtatcaggaattataagtaatcaagagatgatttcatgtatacaggaggatgtgcatgggttatatccaaatgctgtgtcattttatgtaagaggcttgagcatctgcagattttggtacctgagtggagatcctgaaaccaatcacccacgaatagtaaaggatgaccgtatatgacttttatttctcaattttaaatataaatcataaaaaatgtacaataactagataaaaagtaagaagtgtttttatagtgtgagaataagtttagatttattttttcctacgtgtaaccctttggtttaatattatttattaagaagacattctatgccaccttaaaccacacggcagcctttgtcaactctaaagggactgtgtgtacacggatgtattttagacactgtttctgctaaggggctctctgtgtccacactcttgaggatgctgcacttcatgtagccttataaaaccctttaaatttagtagccagagccctctaatttgttattataggctacttgctatttttttttcttgaggcggagtcttgctctgtcgcccaggcgggactgtagtggagcaatctcagctcactgcaacttccgcctcccaggttcaggcgattctcgtgcctcagtctcttgagtagctggcgtttcaggtgcctgccaccaggcatggctaatttttgaatttttagcagagacgcggtttcactgtgttggccaggctgctctcaatctcctcatctcagttgatccgcccacctcggcttcccgacctgctgggggaaacttgattttctatagcattatgttactggatatttctgtaaaatttaaaatgagggaggcagagagacagagagagagcaaactccagagttgggactctggaatcttgagtcatgagacaaattatagataaaactacaaaaatccagaatttacatgtgtggtttttgctgataaagtacaattctaagattgtaaataattgcataatccttccctgggaatttaaatcatttgaactggttctgctgtaatactagaaatacaagcatgaacaattctaatggtttattagtcacaatgactctgaaaacactaataatacctattagatattttgcatattacacaggaagaagagttcgaatctcagataaaaacaataaaaattcatgaaaagtctttcatgttagcacagattttaggcatctcatgtttgggaggttggatctaagacatgttttgagttggtcatagtgaaggacgcgaggtgtcaattctagtgagagcaatttccaggaagccatgttctgctcttgagcgagcacccactgggcctcatgcaaggtagaaaaagcctgcgtacgtcaccctcccatgatgtggtcaacatgtaaactgcatgggcagggcgccaaataacatcctgtgcgctgctgagctgagctggggcgcggccgcctgtctgcaccggcagcaccatgtcgctcatggtcatcatcatggcgtgtgttggtgagtcctggaagggaatagagggagggagcgtggggatggagatctgggcccagaggtggagatatgggcctggaggtggagttatgggcctggagtggagatctgggcctagagatggagtgatgagcctagaagtggagatctgcgcctggagtggagatctgggcctggagtgaagatctgggcctggagtggagatatgggcctggagtggggataggaacctggagtggagagaggaacctggaggagagataggaacctggaggggaggtaggagcctagggtggagatatgggactggagtggagatatgggactggagtggagatatgggcctggagtggagttatgggcctggagtgaagttatgggcctggaggtggagatacgggcctggagtggagatatgagcctggagtggagatatggtcctggagtggagatatgggcctggagtggagatatgggtctgcagtggagttatgggcctggagtgaagttatgggcctggaggtggagatatgggcctggagtggagatatgggactagagtggagataggggcctggaggtggagatctgggcctggagtggagatctgggcctggagtggagatctgggcctggagtggagatatgggcctggagtggagatatgggtctgcagtggagatatgggcctggaggtggagatatgggcctggagtggagttatgggcctggagtgaagttatgggcctggaggtggagatatgggcctggagtggagatatgggactagagtggagataggggcctggaggtggagatctgggcctggagtggagatatggccctggagtggagatatgggcctggagtggagatatgagcctggagtggagatatggccctggagtggagatatgggcctggaggtggagatatgggcctggagtggagttatgggcctggagtgaagttatgggcctggaggtgga

SEQ ID NO: 8035 - DNA, 6000 bp, Homo sapiens
cacgaatgacaaaggcacctgaattccaatcatcatttttctatttctctataattacttctttgatcctttatcttatccattaggcaatgagcctaaaacctcttccctatttggctttctgtgagcatgagatcacatagaaaatgtgaaagcccgctgaatcctccagcacggatcctggaatagagaaagtgctctggtcatcgcaaaaaaaaacttgcccactcacccaaatcccccacctcacccctacttccaatcacctgtggagattcagatagaccatggggaggaaacattaatactccttggagtgagtccagatcttggaatcagagatcagcgacagcactagctcctgttcccctttcctactaattcacaggaggacaggtggtattgaagcaatagatggtcgagggggtggtccttcccccagcctctcgggtagaacagcagcctaacatgtgtctcccgagatcacaaagagtagcacatttcacacgggcttcaacactatttcctggctgtttgacataagagaatcttgcttcgctatttttaatcgtgatttcacctttgtttcctttccttggtgaatgcaatttgtttgactcaagaatgctgtggatgtagaaatcctaaagcacattcgctgtgtatcaatcccagtgcagtcttcccagagaagactctaaacaaatcctggactgcacctgggcctatgccaattcctatcactcaccgtcactccagggagacagaacacacagagaatacgttacataggcaggttcattactaacagataagcagcgagtgacaacagaagcctgcatttcaatgtgagccagtccctcaaggctcagaaaagctgctcgggacatatggagtcaccccatttgcagtgtagctgcgggaagccagaaagcagcccagcctgggttttgtaccctggagccacaggaagcactcagctaaagcactgcatgacgtcctcctccaggaagaacaggaagacagcccaggctgttctgagacattcctcctgatctcaggatgttgctatcttagtccatttttgttgctctaaaggaacacttgagcctgggtaacttctaaagaaaagagattggtttgcctcacagttctgcaggctgtactggaagcatggcaccagaatctatttctcgtgacggcctcaggctgctcccactctggcagaagggaaggagggtctgtctgtgcagagaccgcagagatcacacggcaagagagagagtaagggggagagggagcgatggagcttccaagctctttttaacaaccagctctccaggaactaacagagggggaacttgctaaccccgtctccttgggacagcattgatctgttcatgatggatccacctccatgacccaaacacctctgaagaggcccaacctcccacaatgggggtgaaatttcaatgtgaggtttgaaagggtcaaacatctcaactaaagtagttgtatcctcagcacgttctatggttactatgagagctataattgagaaagcaggggaaagctaggtctcccgccatttgggtgcttgtcctaaagagacgttgtatgtggttacctgccaatcaagaaatgcgagacaattcataaagaggaactgctatgattagcttcttattggtgtctcctcttcttccaggtaaccccagacacctacatgttctgattgggacctcagtggtcaaaatccctttcaccatcctcctcttctttctccttcatcgctggtgctccgacaaaaaaagtaagtctcacgaagcagaggccagagagctcagggccatgtggggaagcaggatgggagcacgcggatgtgtgttcctcaccagcaggatggtccctggcccaagacaggagccacagaggcaggactttctagagagagcaccagattcccttcccctgccttcagctcacagaccattgcctgattctgaactgtatcctcacgtcccctgcagccactcacatccaggagaaggttccatgacaggcagaaagtgggagatagaatcaatgggatgggacctcagagctattcatgggatgggtccttgaactcagagagatagaatgtctgagtctgctgttggcaactgagggacctcaggcacctatggcctccccctgtttgttggtatctgcttatgaaatgaggacccagaagtgccctccgagctcttttgttgacttccgtcttctacagatgctgctgtaatggaccaagagcctgcagggaacagaacagtgaacagcgaggtaggtgctcctccgcccagcctcgtggctagtcttattcccaaagagtcctgaaaaatgtgagcaccctccctcactcagcatttccctctctccaggattctgatgaacaagaccatcaggaggtgtcatacgcataattggatcactgtgttttcacacagagaaaaatcactcgcccttctgagaggcccaagacacccccaacagataccagcatgtacatagaacttccaaatgctgagcccagatccaaagttgtcttctgtccacgagcaccacagtcaggccttgaggggatcttctagggagacaacagccctgtctcaaaaccgggttgccagctcccatgtaccagcagctggaatctgaaggcatcagtcttcatcttagggcatcgctcttcctcacaccacgaatctgaacatgcctctctcttgcttacaaatgtctaaggtccccactgcctgctggagagaaaacacactcctttgcttagcccacaattctccatttcacttgacccctgcccacctctccaacctaactggcttacttcctagtctacctgaggctgcaatcacactgaggaactcacaattccaaacatacaagaggctgcctcttaacacagcacttagacacgtgctgttccacctcccttcagactatctttcagccttctgccagcagtaaaacttataaattttttaaataatttcaatgtagttttcccgccttcaaataaacatgtctgccctcatggtttcggtaacgagactcttttcttgcctaaggcttccggtgttatcattaccatgtccacataaccccatctgttctccattgggttctcagccctggactctgagcttctggaagcagaatggagcctgatttgtctctgagactccaatttccatccaaagatacagcacataggaggctccaaggatcgtgaatcacatgaacaagtgatattcttactctctgcagacctggaaagctggcagagtcattccacgatgaaacatttgtagagtcataggccttgttagtctcatctccacggggacacatatcaacatatcatctttcataatataaatatacagtcggtcctccatatctgtggggtttacaggtgtttattgaaccaacaataaatcaaaaatattttcagaaaaaaatccccgaagtttcaagaagcaaaaaactatgttgaatcgacacaaattgagtggcgtgtaggctgtgtcaggaattataagtaatcaagggatgatttcatgtatacaggaggatgtgcatgggttctatgcaattgctatgctattttttttttttttttgagacagtctcactctctcacccaggctggagtgcagtggcatgatctcagctcactgcaacctccgcctcccaggttcaagcgattgtcttccctcagcctccccagtagcctcccctaggattacaggcacgtgccaccatgcacagataaatttttttgtgtgtgtatttttagtagagacggggtttcagaatgttggaccagctggtcttgaactcctgacctcgtgatctacccaactcagcctcccaaagtgctgggattacaggcgtgagccacggtgcccagcttcgctatgccatttcatgcaaggggcttgagcatctgcagattttggtatctgaatggggatcctggaaccaatcacccaggaatagtgaaggaccacagtatataatttttatttgtcaatcttaaaaataaagcataaaaagtttacaacaacaagataaaaaataagaagtgtctttatagtgtgaggataagtttagatttattttttcctacgtgtaaccctatggtcctgtgttatttgttgagaaaatattctattccaccttaaactacatggcagcctttgtcaactataaagggactgtgtatccacagatgtattttagacacagttttctgcccagtggttctctgtatcccctctcatgaggatgctgcatttcatataaacttatagaaccccttaaaatttggtaacctgagttctctgatttgttattataggttatttagtttgcttttttttttctttcttgagacagactcttcctctgtcacccaagctggagttcagtggcttgagctcagctcactgcagcctccgcctcccaggttcaagcaattctcgtgcctcaggtttagtactagaaactcatcaggaaaattagaatggctttttgtcacaattactctgataatgttaataatacctcttagatattttgcacattacacatgaagaaaagtttgaatctcagataaaaacaaaaatacatcaaaagtctttaatgtaagcacagaattcaatcacctcatgtgtgagaggttggatctgagacgtcttttgagtctggtcatagtgaaggatgcaaggtggcaattgtagtcacaacaatttccaggaagccatgttccgctcttgagcgagcacccactgggcctcatgcaaggtagaaagagcctgcgtacgtcaccctcccatgatgtggtcaacatgtaaactgcatgggcagggcgccaaataacatcctgtgcgctgctgagctgagctggggcgcggcctcctgtctgcaccggcagcaccatgtcgctcacggtcgtcagcatggcgtgcgttggtgagtcctggaagggaatagagggagggagagtggggatggagatctcggcctagaggtaaagatatgggcctggagtggagatatgggcctggagtggagatatgggcctgggtgtggagatatgggcctggaggtgtaaatatgggcctggagtggagatatgggcctggaggggagatatgggcctgggtgtggagatatgggcctggagtggagatacgggcctggagtggagatatgggcctggagtggagatatgggcctgcaggtggagatctgggcctggagtggagatatgggcctggagtggagatatgggtctgatgtggagatatgggcctggagtggagatatgggcctggagtggagatatgggcctagaggggagatctgggcctggagtggagatatgggtctgatgtggagatatgggcctggagtggagatatgggcctggagtggagataggggcctggagtggagatatgggcctggagtggagatctgggccaggaagtgttgatctgggcctggagcctgggtctctccacagctgagagccctgttcttggcagcaggtagcagggaggctaagtttaccttcagcccagcaagggcctggctgccaagacacacagtgcagtgggggcagcagggtgccctggtttgcctgcagttggatcgtctatcatgatctttctttccagggttcttcttgctgcagggggcctggccactcatgggtgagtccgtccccaaaccttagggtgtcatctccccacataagaggatttttctgaaacaggagggaagtcctgtcggggagtctctcataaactaggaagaggggacccttggatactcggcccacatttctgacctcgccctccctggcctttctttccctttcctgagtcaagctctgtgaagactggggtgagactggggtgctccaagctgggg

SEQ ID NO: 8036 - DNA, 6000 bp, Homo sapiens
tcctgacctcgtgatccgcctgcctcggcctcccaaagtactgggattacaggcatgagccaccacgcccggctgggagagtagatcttaagggtcctcaccacaaaaaaaaaaaaaagaaagaaagaaaaagaaaccataggccgggcgcggtggctcacgcctgtaatcccagcactttgggaggccaagacgggcagatcacttgaggtcaggagttcaagaccagcatggccaacatggtgaaaccctgtctctactaaaaatgcaaacattagccaggcgtggtgacacaagcctgtaatcccagctactcaggaggctgaggcacgagaattgctggaacctgggagcggaggttgcagtgagccaagatggcaccactgcactctagcctgggggacagagtaagacttcctctcaaaaaaaaaaaaaaaaaaaaaacaataaccctgcgagatgatggatataactagcttgactatgatgatcatgtcaccatgtatacatacatcaaaacatcaagtgtaatacaccttaaatatatacaatttccatttgtcaatcatatctcaataaagctaaaagaaacctctaagtttcaactttattttcagaaagctgtgccatgcttacctcagtgcctaagtatactctaattcatggaaatggcctttaaaactgcagagagtggctgggtgcagtggctcacgcctataatcccagcactttgggaggcggaggtgggcagatcacgaggtcaggagttcgagatcagcctggccaacatggtgaaactctgtctctactaaaaatacaaaaaatagctgggcatggtggcaggtgcctgtaaatctgagatactcaggaggctgagacaggagaatcgtttgaactggggaggcagaggttgcagtgagccgagatcctgccattgcactccagcctgggcgacagggtgagactccatctcaaaaaaaaaaaaaatactgcagagagttaaggccctcactggacactctccggtacctctgaggtcagtggatagagaagcagctccccttcttcttcctcgaaacaaaggcctccttccttcttaggtgtttgagacaaattctccacacaggtgcagctgagtgctgtaaagtcccactgagagttgaaggtccccactgccagtcacagttcggtcccactgagggttgaaggtccccactgccagtcacagtttggtcccattgagggttgagagtctccactgccagtcacagtttggtcccattgagggttgagagtctccactgccagtcagtttgggcttattagggtttatgctgtgcacggagaatggaacctaccaatcaactcttagtgaccagttagacagattcaaggcaaatttccctgctgggaaatcccaaatcccaaaatatgcagagaccaatagatgcctcaattcttccgtgtctccgtctaaatccttgggtcactgtgactcctgtagttatgtggcttgtaattccttgggccgtagaatggctatgataggccctgtgctaaggggactggtgacagttgagacaggaacatggaagctatagtagtcagggttctccagaaaaaaaaataatcaacactaataatgatagatatatagataatgattgatagacaaataatgatagatatataatgatatcacaaataatgatagacatatagttggataatgacagatatataatgattgatacacagatagggtatttatatattggcttatgcaactatgtagactgacaggtcccatgatctgccatctgcaagctggagacccaggggagtccacgtgtagttccagtctacgtgcaaaagtctgagaaccagtagagttagtggtatacgtaacagtccaaaagctagcaggctcatgccgggcatgatggctcacgcctgtaatcccaacactttgggagaccaaggcaggcagatcacctgaggtcagagttcaagaccagcccggccaacatggtgaaaccccatctttactaaaaatacaaaaattagccgggcatagtggcattcgcttgtaatcccagctactcagaggctgaggtacgagaattgcttgaacccaagaggtgaaggttgcagtgagccgagatcatgccacagcactccagcctgggtgacagagtgagactctatctcaaaaaaacaaacaaacaaaaaaagctggcaggcttaacatctaaagagtcaatgttttagtgagagttcaagagccagaaaagactgatgtccaggcaaaaggaacttcatcttacattaccagttcaatgttttgttctattcaggtcccacctgattgaatgaggccgactcacattagggagagcaatctgctttataaattacactaattccattgataatctcattcagcaacacccccacagacacacacagaataatgtttaaccaaatatctcagcaccccatggctacgttaccattcctgttccacaaaaggaggaaacaaaagaacaaaaccacaccaaatgttgtggtaagttgacaaaatctgttccagcccattagtaaatattggccactgaagttcctgaaattcaacaattagtaagtatctctctcccaatagaaagccacgtcatttgtaaaccataacaatagcttttgtttttttgagacacagtctcgctctgtgttgcccaggctggagtgcagtgatcttggctcactgcaacctctgcctcctgggttcaagtggctctcctgcctcagccttccgagtagctggaattacaggcacccgccaccacacccaagtaattttttatatttttagtagagactgggtttcaccacattgaccaggctggtcttaaattcctgaactcaagtgattcacctgccttggcctcccaaagtgctgggattacaggcatgagctactgcacccagccaacaatagtatttttaattaggtcatcctgcctttacaatctctgcattttaaatactcaactaagagtacagccattatttgtctttcacccaaagtcccattcaagtgagaacaaaggaatgaataaataaggcataagtaacaaaacaacaaaaaaagaaaattagaatgcggtcaatttcatgcaatcatcaacaccaaatttccagaacgtagtatttccaaatttcccgaacgtaaatatgtatgtggaaattaacaaaatgtggcaaaacaaaaggtcacttaaatttgcacaaatgaaacagtcaacatggaagctgatcggctttctgaaatatgggacaagctcaggacttcaaaatacttcggcgttggaagggctaagttatgatgtattaaaatgaaaataaagtggggcgcggtggctcacgcctgtaatcccagcactttgggggaccgaagtgggtggatcacgaggtcaggagatcgagaccatcctggctaacacggtgaaaccccgtttctactgaaaatacaaaaaaaattagccgggcgtggtggcggatgcctgtagtcccagctactcgggaggctgaggcaggagaatagcatgaacccaggaagtggagcttgcagtgagctgagatcacgccactgcactccagcctgggcgacagagcaagactccgtctcaaaaaaaaaaaaagaataaataaaataaaataaaatagtagaaggtttaattaggaatatttcactctccatacctgaagaattcgtgatagccaggagtctacaatcaaaataacataaataataagataaaaataaaattaatttgaagccataaaaaaagaatgagttcatatgttttgtggaaacatggatggagctggaggccattatccttagcaaactatacaagaacagaacaccaaatacagcaggttctcacttataagtggaagctaaataatagaactcatgaacacaaaaaagggaaaaacagacaatggggtctcctttagggtggagggtgggaggcgggaaaggagcaggcaaagtaactattaggtaccaagcttattacctaggtgatgaaataatctgtacaacaaacccccatgacacaagtttacctgtataacaaaccttcccatgtacccttgaacctaaaataaaagttaaaaaaatactcaatgagcaacaatgtacattatttgaggataattatattaaaagcccagacttcaccactacacaaaatatccacgtaataaaatttcacttgcgctccttaaatttatacaaataaacaaaaaagtataataaaatagtagattctttctttagagatgacaaatagtgccagagaaaatgcctccacactctggcattgagatcatctccaggataagggtatactgcatgcctggtcaagtccaagtaaatatactcagaccatgaatctcagagatgaaacataggttcagaacagacaaagccacagagcttttgactaatggcccagtgaaggcaatgtctgcctgtatggtatccaccaccttatattctgtcccaagcccgtctatttggatgtagcatctggttcaaagatgaatttgaacaccattagacactggcttaatgaaaattcacttctcattcgtttctcatctgaaacataaatagaaatataggtcttaggcaggaggatttcttgatgccagaagttagagactaccctggccaacatagaaagaccccatctctatttaaaaaaatatacatatatatgtcttctcttgggctccacccaagagcaacctggaactaagttattcggcaacgaactgttccactttgttgtgaggcaatagatgtggaaattccctgacgaggggctctgtcctcatacttcctgcggagcttattgtcgtaagaatatctgtcatcctgctaatgtgcattgaaaggagagcaacggggctgaggccgtgtcagcacgatggaccccaaacagaccaccctcctgtgtcttggtgagtttcagagtaaaagtgggttagaggggaagatagagaaatcccaaaataatcagggtgtctcttaacagtgtgactaggagattttagtggctgccaaggagattctgatctccttagtggaaaggccgtctttgtcaatgtatctataactttgtctctacccaagcccaagctagcttgtggggctcaaggtttaatatttgtattaaacctatagtgtgttatctgggattcatgatggtcccaaggttcttatcaaggagagacttagaggctggaatctgaaaggtaaaaataaagaatgaacctcaaaactgtgattgttgtggaaggaaaacatatgatagaaccccatatagaaatatggttactagtattttgttgaagatttttgcatttatgttcaacaaagatattatccagaagttttctgtttttgttgtatctctgccacattttgttatcaggataatgttggcctcatagaatgagttggggaggagtccctcctccaggatttttttcaatagtttcagtaggaataatactagctcttcttggccgggcgcagtggctcacacctgcaatcccagcactttgggaggccaaggcaggcggatcacaaggtcaggagatcaaaaccatcctggccaacatggtgaaaccctgtctctactaaaaatacaaaaaaattagccaggcgtggtggcgggcgcctgtagtcccagctactcgtgcggctgaggcaggagaatggcatgaacctgggaggcagagcttgcagtgagccaagatcatgccactgcactccagcttgggcgacacagcgagactctgtctcaaaaaaaaaaaaaaatgccagctcttctttatatatctggtgggattgagctgtgaatccatctggtactggtctttttctggtctgtcattacagagggtgatttgtcgtaaaggttg

SEQ ID NO: 8037 - DNA, 6000 bp, Homo sapiens
agctactcaggaggctgaggcaggagaatggcataaactcgggaggcagagcttgcagtgagtcgagattgcgccactcaggaggctgaggcaagagaatggcataaaccccggaggcagagcttgcagcgagccgagattgcgccactgcactccagcatgggtgacagagcaagagtccatctcaaaaaaaaaaaaaaaaagattagtaatatcctctgtgtcacttaccacttaagtgattgaatcacgacttgaaattcatcatctcaaacatggcttagagtctgtagaggggggacagtcccaggaatgctggtgtgggcttaaggctgaattaaatagatccagatggctcacacctgtaatcccaataccttgggaggccgaggcaggtgggaggctgaggcaggcggatcactggagctcctggagcgaagaaaggatgctagtggaaaaactggtgaaatcagaataaagtctatagttttattttttaaaggaggctgggcgtggtggctcatgcctctaatcccagcactttgggaggctgaggcaggtggatcagttgagttcaggagttcgaaaccagcctggccaacttgacgaaaccccatctctactagaaatacaaaaattagctgggcgtggttgtgggtgcctctaatcccagctactcaggaagctgaggcaggagaattgcttgaacccaggaggcggaggttgcagtgagctgagatcacaccattgcactccagcctgggctacagagcaagattccatctccaaataagagagacatgacaattaaataaattgtgtaatcttggattaaatcctaaaccaaatatatgtcactggtaaaacaagtggtgaaatttgaataaagtggatagatcagacaatagtgtcatatcagtgctatttcttgaccttgaacattaataacagaatgtccttggttttgggaaatataacctgaagtgattagaggtttagggcatcatatgcaaattagacacactttcttcggggagagagggagagggagagaggctgaatgatgaagcaaatgtggtaaaatgctaactttggggaaatctggatgaagaaattacagattttttttttttttatagacagggtaacactctgtcacccaggctagagtgcagtggcacgatcatggctcactgcagcttctacctccctgggctcagatgaccctctcacctcagcctcccaagtagctgggactataggcgcacagcaccacacctggctaatttttgcatttttttttcccccaggctcgtctcaagcaatccacccacctcggcctcccaaagtgctgggattacaggtgtgagccactgcacctggccagaaattctttaaactatttttgcaagtctggaattatgtcaaaattaaaagctcaaaataataaaagacaatattcttatatttctttggtgaaggtaactatgttatggctgagagggtggctgaggtctgaggatccagcctacataagtctcctccatagagggcatccaagcgctccgtagggggaaggataaagaaaacacccagagttatgacagctgtgtaaggggaaacgccagcaccgagtactgaatcttcagtaaataagaaggaggcgggctgggtgtggtggctcacgcctgtaatcccagcactttgggaggctaaagtgggctgatcacttgaggtcaagagttcgagactagcctggccaacatggggaaaccctgtctctactaaaaatacaaaaattagtcgagtgtggtggcacacgcctgtaatcccagctacttgggaggctagaacaggagaattgcttgaacccaggaggtgaaggttgcagtgagctgagattgcaccactgcaccccagcttgagggacagagtgagattccgtcttaaagagaaaaaaaaaagaattagcacatttgtttgcctcaagaagatacaactagtcttgtacagtagtcacatgtatccaccaggatatattccaaggccccagtggatgctgaaaactacatagtaccttacatgtatatatatatgtatatacatatatacacatatacgtatatgtatacatacatgtatatatgcatgtatgtatatacatatatgcatatatacatacatgtatatatacatgtatgtatatacatatatgtatatgtatgtatacacgcatacatgtatgtatacacgcatatatgtatgtatatacatatatgtatgtatacacgcatacatgtatgtatatacatatatgtatgtatacacgcatacatgtgtgtatacatatatatgcatgtatgcatgtgtgtatatatacatatatgtgtatatatacgcatatacatgtatgtgtatatatgcatgtgtatatatacatgtacggtactatgcagtatatatacacatatatgtatatatgtatacatatatgtataaatgtatatatgtgtatatatataaaaggtatatatgtatatatgtgtgtatatataaaatgcatgaatttcttttttcttactgtagatcttaacaacttctgcatagaatttttttttattaagtggagagttagttacttacttaaaagaaatgtttcttggctgggtgtggtggctcacacctgtaatcccagcactttgagaggccgaggcaggaagattcacttgaggtgaggagttggagaccatcctggccaacgtggtaaaaaccggtctctactaaaagtacaaaaatgagctgggcgtggtgttgggtgtctgtagtcccagctactcaggtggctgaggcaggagaattgcttgaacccacaaggcagaggttgcagtgagctgagatcacaccactgcaccacagcctgggcaacagagcaagactctgtctcaaaaaaaaaaaaaaaagaaagaaaaagaaaaagaaaagaaatgtttcttttcttattaagttctttaaatgaaaagcttttcttttcacttttattttattgaaacattataacactatctttgaagaagttagtgttatcattccattctgatgaaaccaattaacttatccaagcatatgtatactgtacacagagaagccaacgtcaaaacccctatttttatctttttagattcagcagatacatgtgcaggttttttatgagtatattgcatgatgctgaggcttgcattaatgatctagtcaccaaataggtagattttcaagccttgctcccctccttacccaatgtttagcgctctcacttataagtgagaacatgtggtatttggttttcttttcttttttttttttttttttgagatggagtttcactcttgttgcccaggctggagtacaatggcaccatctcggctcactgcaaccttcaccttccaggttcaagcaattctcctgcctcagcctcccgagtagttgggactacaggcatgtgccaccacacccggctaattttgaatttttagtagagacagggtttctgcatgttggtcaggctggtctcgaactcccgacctaaggtgatccacctgcctcagcctcccaaagtgctgggatgacaggcgtgagccaccgtgtctggccagtatttggttttctgtttctgtgttaactcgcttaggataatggcctctagctgcatccatgttgctgcaaaggacataatcttgtgatttttcaaggctgtatagcgttctgtggtgtatacatatcacattgtctttatccagtccacctctgatgggacctgggtggattccatgtcttcactattgtgaatcctgctgcaatgaacatacaagtgcatgtgtctttttggtagaatgatttattttcctttggctatatacccagcgatgggattgctgggctgaatggtaactctgtttgtagttctctgaaatatctccaaaccaaactgctttccacagtggctgaactaatttacacccaccaacagtgtataagtgtcccctttgctccacaatctcaccagcatctgttaatttctggcttttcagtaatggccattctgactggtgtgagatggtattgttgagggataatttaggaatcagagagaccgaggggttgaggaggatttattattattattattatttaggtgcaccggccccagtcagattaacatccaaaaagactgaggctcgaacagagagtccggttaccttttaagcattttgtggggttgggggagatctgtgcagggggaagcatattacagaagcaagaaacaaaggcagttattcaattgagacatgcatcacattattccttacttttcaagaaaaatatgttttacgacttgaggttatcctgtctagtgatcttgcagccgcacggcaagagaaacagggtcttcacaatgcctgggaaagggagagataaggctcactagccacagacagaaaaacaggcagttcatgtttaaaggactccacctctttctcttcctcggggggaactgggttttcttaaatacaactgagtttttgtttacacattctgtaatttcttttaattcctgttccagtatctcactgtgaaactccctatgtttttatacgattctcagggggtttcctctgggcatgattgggcacaacttcccacagtcagctctgggtacgacctccacattgcagaattgagaagttgacccagaaatgcattttgggctgagcagacaattgtcagagttgctggctagaccacagatgtgtcagagggaccacggcctttctgtaagctcatggtcagaggcggaggggagttgtgaacgttctgatgaaagcagtcaacgtgaaagcgctctggtgatgggcgctggtgctcacccaccacttcctgtgtatctatctccctggcccgcccggctcagtccccactgctcagcactaggccggcagaatctgagcgatgtcttccacactccctgccctgctctgcgtcggtgagttctggcgtggaaggggaatgggatcacggtgtgcctgggaggcaacaggtctcattactcccgtcttccagggctgtgtctgagtcagaggatcagcgcccagcagcgtgagtccttccttcaaagcccagggtcactcttccgggttcaggccaagctccttccacccaagcacggctggggagaggggacagggtgctggcttcccaggagagcttggggccagcagctgggtggagcctaaggttggggggagggggctccgctggaactccagcctctgattcccttccagagactctcccaaaaccgttcatctgggccgagccccatttcatggttccaaaggaaaagcaagtgaccatctgttgccagggaaattatggggctgttgaataccagctgcactttgaaggaagcctttttgccgtggacagaccaaaaccccctgagcggattaacaaagtcaaattctacatcccggacatgaactcccgcatggcagggcaatacagctgcatctatcgggttggggagctctggtcagagcccagcaacttgctggatctggtggtaacaggtaactgtccggttctctaactggagagtgatctcagtctgcatccgggatgcagcatcatctatgaactcttccaagccccactcagacactgcttgtctcggtaggaggctggaaggaggggtgatccccatcacaatccttgcctacaaggggttgtctgcagaccgtgtctctacgtcctaggagcagatgtgtcctcagtcagtttctccatgacacagattctgagatagatatttgtatgcaggggtatgactgaggaatgtcctcaaaaacaatgcctgtgggctaggcgcagtggcttacactttgcttccctcacccatcacaggtggtgggttttttttttttttatctgttttgagacggagtt

SEQ ID NO: 8038 - DNA, 6000 bp, Homo sapiens
cacgtccgctgtcttcatgggacgggtcactcacaccagtgctgggtgtggcaggatgtgtgtcctgtgccctctcccgctgaccctggaccaagctgaccctgcccagggcaaccccaggagctgctcttccccgtggggccttaattgtgcagactggcactgccctggcccctccctcctggccatgtgacctcagcaggtccaggtctgtcgggacctctgtgtcagttcctcgtatataaaccagggatggtaacagccgtgcgtcccttgtgaagcgttggacagccccgacctcggcccactgtgtatcagcactttttggaacatcttggcacagggtccattgctgtcctgggcacagctcctgctggatgtgtgggcctggaaggcagagcgtggccaccagcagcatccaccatgggcctcgcgggcccctctctcctgagagtgctgagccgaggggctgtggggtcagtgtctctgaccgtgacccaccactgggcccagcctccgtggctcctgtccccagatgccatatggggaaacgctaggctttgaaagcatctcaggctccggggctgccccccttccacactgccctccctgtcttccccaggacacaggggaaccctccccagcagagggccctgccccctccccccgcccacccctcatttgtagctccggcgtctgtgggcggggcctgaatgcctggcggtcagggttctgctcttgcctgtttctgcttaaatctcagcgccgggccagccttcatcccctgcggctcttttggctgtaaggactagaaatgcagttcagatcagcccaagggattctccagctcctggggctggggagtgtgatggggctcgccccaggtgcacgtgcggctagacccagggctttatccgtgctcagactcagggcctcccacaggtcacagcactgcggccgggctggaagtgggttgctttgctgactcggccctttgctcagtctacagagggttctggagaggaggccccagctcactgtgggcgtggaagagttgaggctcctggtggtcttgcctatggctgtgcggccacaggtggctcactgcaccccgggcattggtgcacctgccagcaggtcacgggtcacggaggggccctgtgctccaggctctctggcttgtgattttgagtctgatcaattcttccctgagagtctggggttccatgtggccgtgggcgcccccttggcccagctgggtcctcagttttgcggatcggggcagcaggtagacgtgaccctcaccaggctcgggggtgatgcctggacctcaggttgggaggtacagtgggcagccaaaccgccagacggtgaggcgggctccctggaagaggggctgccctgaactgcccctagaggggccccactctgagttgtgcctgcagcacgctggggcgtgggctccccaagccctgtggacgtcggggtggggccgtcctgggcactgcggggtgccgagcagcatccctggcctcacccactccatgccaggagctcccccaattgtgacaaccacagatgtcccaagcatcccctgggcaggagcccccaggtgagagctgctggcaccccagttcataggttgtgcctcgggcacggcagcctcgccctgccgtggggcgctctgcccagccacggaggtccactgtgtccccagcagctgcggctggccccgccaggcctgggagggttgcacagggcgccccgccaggtgagagaagctattttcaggtggtgagatcaggggagtgctggggacgcagcggaaggtgaggcaggaagcagcaggttgggctgtggagggctgtgccctctttcgtagacagtgggtccagctggtggccctggggtggcggcaacacccatgctgctgcttgcagggcgggagccgttggctggcagagggccctggtgtgctccacttggtgggtctgagtccagcctcgtctcctcccaggtttggggggtcctgtgtgcatctgagagggccccggcctgctggcttcgtccggctcacccctgaggaggtgcggggcagtcacaggccttgccgaagccccagggcctgtcagagccgggctgcaggtggcagagcccctccggggttggagtggggcgtcccccggatcctcagtcacttggactatgtgaggggctggcccggtgcagtcagcgtgggagggacccagggtcctcagagcccaattcggcttctggggtttccttcctttccccgtcctgggcgtcccagcgcgccccatcacgccccatcacgtaggcccttgggtgtcggctgcagctggccctggggcgccccactgactgccggccgccccctaggccctgtttgtgctcttcgtcctggcctacatccacatcgtcttctcccgctcgcccatcaactgcctggagcatgtgcgtgacaagtggccgcgtgagggcatcctgcgtgtggaagtgcggcacaactcgagccgcgcgcccgtcttcctacagttctgtgacagcggcggccgcgggagcttcccgggcctggccgtggaaccaggcagcaacctggacatggaagatgaggaggaggaagagctgaccatggagatgtttgggaacagctccatcaaggtgagccaggcctgggctcagctgcagcagaggccagcgccccgtagatgctggtcgctgaaggggcggttcctgacatcgacaggatgttggggttcttgactttcagggacctggcatgcagacaaggccgcccctgcctgccgtggccttttggtggcctgggggctctgaagcaagaccctcggcctgtcgccctgctagaggcctgggcagggcagggggatctcggggaggacttgggctgggcagactcgggcctttgagagtagctgttccggggaggggattggctggggctggggatgcagtgggcagcaatagctgaggaggcctgggggctgaaagctaagagctctgggcccatcctggccgtcctgaggtggccccactgcctgcagaggtgctgggttcccggtcagcttgtggtggccttgggcactggtgggaccaggtggctgtgttgggccccacagcctggtgggagatgtttttgcttcagcagtcagggtttggggtcccacctgttcccacagagccaaccccaagagtttgagtgtttgggcagagcatcatggacccttccatggggtctactgcctgtagctggcccttgcctcagcttcaggattcagagctgtgctggagatggcctcacagcagggcaggcttggtgttgaggtggggtcccagctgaggcgggaggcacacgtagtccaccctggcctggtcagtggtggggcagaggctgaggcttccagtcccttcccattagcaggactgtatcctcaggctgggccctcacagcccgggctggcgctgctgacacccaggtccctggtcgcccacagtttgagctggacatcgagcccaaggtgttcaagccgccgagtagcacagaggccctgaatgacagccaggagttccccttccccgagacgcccaccaaaggtaggccacccaccaaaggtgtactgcctcacggggttgcctcagtcatggggtgctggggtgcaggcggggtccctccgaacatccccagcctgctggctgcatgtcctggaccgttgagggcacccccgtgcctcgatttccccatctgtcagcacaggaggctgtggggacaccccagagcctggggtaactggctcagctcatcctttctgggatcctcgtgaacggcgacttggaggggatggatcccttcggctctgagctcagagttctagcgggctgtgctcagggaagcccccgcccccgcccccacccctgcccatctggcagcagagggtctatccagagggccggggcctctgaagtgttgggggtgtgctgggggccgccagggcagtggggcagccctgcacccagccagccccagccagggagagggggccacgggaggaggagcctggccagcctctgcagtgcacagggcaggacaccagcttgagtgggcaccatcccaagtgtccatgtaggggtcctcccagcacccacctggggcccagggctcagcaggtctcaccctccacccctcaacgcctgccttgcctgctggcagtgggcgggggacgtgtgtgggggcgctgacctggtccctggttctgccctgcagtgtggccgcaggacgagtacatcgtggagtactcactagagtatggcttccttcgcctgtcgcaggccacccgccagcgcctgagcatccccgtcatggtggtcaccctgggtgagtctgagctgctgggcttggggagctccatggcggggcctcccctcctccctcgggtctcctcctgctggtgcgggacggggggctgtgcaggaagcactggggtctgccccgccccaggcacgcttcccagggctggggtcctggatgggtttcctaagaatgggcagggccaggaagcaggccaggcctcagcaatggagccagctggggcagggcccagggggtggcctgggcggggctcccggctccctgattcacccacccgcagaccccacgcgggaccagtgcttcggggaccgcttcagccgcctgctgctggatgagttcctgggctacgatgacatcctcatgtccagcgtgaagggcctggccgagaacgaggagaacaagggtgaggcatgccccggggccgagggtgcgagggcgcgggtgggggcgggcgctcacggctccttctgctgcaggcttcctgcggaatgtggtgtcgggcgagcactaccgctttgtgagcatgtggatggcgcggacgtcctacctggccgccttcgccatcatggtcatcttcgtgagtgcctcggggcgggtgcgggggctggccgggcgggagccaagcaggccctcgcagcccctcatagcgcttcctgcgcgccccttgcagacgctgagcgtgtccatgctgctgcggtactcacaccaccagatcttcgtcttcatcggtgagtgtcccgccggcgcagggcggggcgggcgtcctccaggccctcaccgggcgcccgccgccctgtgcccgcagtggacctgctgcagatgctggagatgaacatggccatcgccttccccgcagcgcccctgctgaccgtcatcctggccctcgtcggtgaggaccccacccggcctcccccgccccgcgctgcaccccgccccgcccgcttcaaccggcgccgcctctccctgcagggatggaggccatcatgtcggagttcttcaacgacaccaccaccgccttctacatcatcctcatcgtgtggctcgcggaccagtatgacgccatctgctgccacaccagcaccagcaagcggcattggctgcggtgagcgtggcgcgggggcagggtggagtgggtgctggtgggcaggggtagggggctgccagagggaggggcgctggaggcgggggtggtggctgcgccacgcgggaaccccaggggctgggcctggcagggtgggacctgcagccccgacgccctcaccccgccccgcaggttcttctatctctaccacttcgccttctatgcctatcactaccgcttcaatgggcagtatagcagcctggccctggtcacctcctggctcttcatccaggtgaggcctgggcggcaagcagggggcaggccagccgtgcctttccaggcaggagaggctgcagccggggaggatgccctgtggggtcggcccaagcgggcagaggtagcgtggatggtcccgggtgggctgccctctgggagcagcggctgggtggggcaggggcgggcccgtcctgactcccactctccctcccgcagcattccatgatctacttcttcc

SEQ ID NO: 8039 - DNA, 6000 bp, Homo sapiens
ggtgacggtccctgtctagctctgtgcccaacaccttccaggatatttgtttcgttttgttttgttttgagacagagtctcactctgtcacccaggctggagtgcaatggcacgatctcggctcactgcagcctccgcctcccgggttcaagtgattctcttgcctccacctcccaagtagctgggattacaggcgtgtaccatcacgcctggctaatttttgtatttttagcagagacagggtttcaccatgttggccaggctggtctcgaactcctgacctcaggtgacctgctcactttggcctcccaaagtgctgggattacagcgtgagccaccgtgcccggcacactcagagctttcaagcaagggcaggcactgcacatggacctcctcttctggggagagttgagtgaacaagaccttgaaccccagagaagatccgattgtgggagctggggctctggtccagactctgagcggtatcctgacaaggactagaggagccccagggcagtgctattccctgcgtgtagggaaactgctgggaagcaggtgccttggagaaggaatgagctcccatcactaatacctgggcatttgagagggagctttacagaaaccccttagtaagtatatattggtttctgttttatttttattattattaccttttgagacagagtctcactctgttgcccaggctgtcgtgcagtggcatgatcttggctcactgcaacctctgcctcccgggttcaagtgatcctcctgcctcagcccctctagtggctgagattacagacacctgccaccatgcctggctaatttttatatttttagtagagacagggttttgccatgttggccaggctggtctcgaactcctgacctcgtgatctgcccatctcagcctcccaaagtgctgggattacaggcatgagcaatcgcacccagcgtttttttttttttttttttttttttttttttttagacagagtttcacacttgttgcccaggctggagtgcaatagtgtgatctcggctcactgcaacctccgtctcctgggttcaagcgattctcctgtctcagcctcccaagtagctgggattacaggcgcctgctaccacgcccagctactttttatatttttagtagagacggggtttcaccgtgttggccaggctagtatcaaactcctgacctcaagtgatctgcccgcctcggccttccaaagtgctgagattataggcgtgagccaccgtgcccagcctgtatccttttttgatgccatccaattaaaacaaaaactcagaggtgccattatgagggaatttgatcatgctttcctccctccctttatcttgccgcctttatcaggccgcacttcaccccaccccagtcccagccccaaccttgagtgtaactcgaccagagttacctcacccagaaccctccctgggtgcctgcttggcaggctccttgggtgcctggaggctgacttgttctccttgcccttctcccccggctcagcccctgtatgaaggatggttcctggctcttttcaacctcctgtacagcaccctgccagttctctacattgggctctttgagcaggtgagcagggcaaggccgggtcttccttccaggtctctgcttagcctctcctcctctcctccgctccttggggcggggagagggagcctgggagaccttcaggccatggggtggggctcagggggtgcagtccagtacctctccctgcccactgccattgaccttctcccaccggagcctacgctcatcccggggccatccagctcctcctgtgtgtgggagcccccaccctgtgctggagcccccgtgcctctgtctacccatccatgcaatggggagagaggatcagagcagatgactctgctaggtttatcatcccccagctccaagaggccctggctacgtgatctggggttgggagggtgggtcacatggaacgttccagatgatggaagtgtcccacagctatgcaatccaacacagaagccagcagccatacgtgcccatgaggaacgcttgtgttgcggctggtgtgacccagggactggattttacatctcatttcatgtttgctagaatctttttttttttttttttgagacagggtctcgctctgtcgcccaggctggagtgcagtggcacaatctcagctcactgcaacctctgcctcccgggttcaagcgattctcctgcctcagcctcctgagtagctgggattacaggcgtgcaccaccatgcccggctaatttttttatttttagtagagacaggatttcgccatgttggccaggctggtcttgaactcctgacctcaggtgatcctcccacctcggcctccccaagtgctgggattacaggcgtgagccaccgcacctggccttgctggtatctttaactgtggtggaatacaaatcacgtaaactgccccgtctcagccagactcatgcgcacagcccagcatcacctagtgcgttcgtgtggccaagtgaccaacctccagagctctttccatttcattttattttattctgtagacgaggtcccattctctcacccaggctggagtgcagtggtgcgatcacagctcactgcagcctccactcctgggctcaaatgatcctcctgcctcagccgcccaagtagatgggattacaggtgcgcaccaccacacccagctcctttaaaaggtttttttggagatggggggtttcactatgttgtccaggctggtctcaaactcctggccttaagcgatcctcccaccttgacctcctaaagtgctgagattacaggcgtgtgccaccgtgcctggccttactttattttaactcacttaaactcaaagagccacacacagagagtggccaccctactggcctgcccgaggagatcctgatctctgttgggtgtcccccgccccccacccaatcccaagagcttctgcttgccccaaggacgtgagcgcagagcagagcctggagaagccggagctgtacgtggtggggcagaaggacgagctcttcaactactgggtcttcgtccaagccatcgcccatggtgtgaccacctctctggtcaacttcttcatgacactgtggatcagccgcgacacggcgggacccgccagcttcagcgaccaccagtcctttgcggtcgtggtggccctgtcttgcctgctgtccatcaccatggaggtgggcaaggtcctcacctccccggggccttggacatggcctatggaggcctcctcccctggggacccctgctttgggggcattgccaggtgcccttcctggaccccaggggctggtgtcctggtgcaagccccgctaggccccggatttaccccaccgctgcctgtccaggtcattcttatcatcaagtactggaccgccctgtgcgtggcgaccatcctcctcagccttggtttctacgccatcatgactaccaccacccagagcttctggctcttcagagtatcccccacgaccttcccgtttctgtgtgagcccccatggggaagtgggacgggcggtcgtggtgcaggggagccccgatggaagaggttgcaggttgctcatgacagtcgtccggcaaagtgtcctggggaaggcgctcctttatggaccaggcacaaaggcaccaaggcgctccctagcctgggggcatccttggagctgggggtaggctctgctgtgaccccgccctgtccccagatgccgacctcagcgtgatgtcctctccctccatcctgctggtggtcctgctgagtgtgtccataaacaccttccctgtcctggccctccgagtcatcttcccagccctcaaggagctacgtgccaaggtgaggtgggcctgggcctggggtcctcatctggtacattccaggaccctggttggggagccgtgcagggcgtagggactgcaaggtgtcccggcccctctcggccctccaagacactaggcttgggggaagggtgggtgcggagccccggacacacgcccagtgcccccggggcccgatttcccaagaagggagacctcactcccccgacaaagcagcagagagcacccaaacgccgccctggattccagtgctgatgccatcgggctcttaaggttttatttatttatttatttttactttttgagaagggtcttgtgctgtcacccaggctggagtgcagtggcacaatctcggctcactgcagcctcgaccttccgggctcaaaggatcctcccacctcagctttccaagtagctgagaccacgggcatgtaccaccacgcccagctaattttgtagttattttctagagatggagactcattatggtgcccaggctggttcaaactcctgggctcacgcaatcctcctgccttggcctcataacatgttgggatttcaggcatgagccacactgtgcctggctgacaccatcagattctaccgtgaatgatctagagcttgggggttgagatgacggaaacaaccttgaaatggtttaggcaaaaggaggaacttagaaataagagtctgttgacagatgagtgggtcaacacggcacgctccatctgtgcaatgaaacacgcctgagccgtgagaaggagtgaggctctgacacaggccacagcgtggatgcaccttgaggacatgtgctcaaggccaggcgcagcggttcacacctgtaatcccagcactttgagaggctgaagcaggtggcttgcttgagcctgggaggttgaggctgcagtgagctatgatttttgccactgcactcctatctgggcaacagagcaagaccccacctcaaaaaaaagggaggggacttactagcccacgtaaccaaagcatgcatggaaaagcaagttgcagctgagatgggccccagaattgactggaatggtgtacctgccctgccacctctgttctccctgcccagctcctgccacctttactgcacaggctgggcacctggctgtcccaggctcacctctcctggatttgccaccaaagggcagccaaggcacctggtggctggtccagagtcggggaaggactctgattggctgagccagggttaagtcccagggaaggactctgattgggtggtcccgagttaagtcccagggaataactctgattggctgatccagggttagtttccagggcaaggccaattagtgggtcttgaaaagcaaaggactagagtcctccttagaactcaacactgagagtcgaggactctaattggctcaacttgggtagggaagaacgtagccaatcaatagtggccaagggctttgaatcctgcctctcctacttgggggacctgagagccatcagccaagcataggagtctgcttcccctgctctcccctttgctcttcaggaggagaaggtggaggagggccccagcgaggagattttcaccatggagcccttgcctcatgtacaccgggagtctcgtgcccgccgttccagctatgctttctcccaccgtgagggatatgcaaacctcatcactcagggcacaattctgcggaggggaccaggggtcagcagtgacatagcatctgaatccctagacccatctgatgaagaggcagcttcgagcccaaaagagtcacagtgacacctcaggaagatgtccttcctggggaagaagaagcaccagccacaggggcaggtgtcctcccaggaagtacagctcccccctacacctagctcatcattttctatggatagacaatccgctcttcatccagaaaaccaacctgccctccccaaatatgtgctcaccagcagcaacaggctatctgagtctttccaagagcaattgccaagggcacaggagaggtcattgtcacccaagcagaggccaccttctcctgagaagttgctgttgaccaaggagaggtcacattcttttcaggagaaatcac

SEQ ID NO: 8040 - DNA, 6000 bp, Homo sapiens
agaccggggcatgggggtaacggggtgacccagctgatggggtgaccagggtcagggtgacggggctgccggccaatgcgaggcaggggacaagatgactggaaagaccggggcacaggggtaatggagtgacctagctgatgggggtgaccagggtcagggtgacagggccgccggtcaggacgaggcaggggacaaggtgactggaatgaccagggcatgggggtaatggggtgacctagctggtgggggtgaccagggtcagggtgatggggccaccagccagggcgatgggggcggtgtcacagtcctggtggctgagggtcaggtgtgtgccgtgtcttccaggatcagtctctggggaactggagaatcaagaggcaggtcttggagggggaggagatcgcctacaagttcacgcccaagtacatcctgcgcgccggccagatggtcacggtaggtggtggggcaggagggcgagggtggccacggatggggtgtgaggtggggtcaggggactggaggcacaggacttggcgggggtgggtggggatgatggtggcaccaggcaccgtctcagagcggctgccgcagtcatagaacctccatgtgctggtgtcaccccactgggcctccctggagcctgagtggtgtgccctgggtctgagtccaggctgctggggctggcaggcgtccccgtgaagtgttaacagtcaggcgcatgggccatggagcctggtgggtgtcagatcccagttcagcccctgcttgccaagagcccttggcctctgtgaaccctggtctcttcttgtgtatcctggggaccatcaccctggataagcctgcgtcgggctggaaggactgaacgcccagggcattgaagggggctttgtggtaggggccactggctggcccacgtccctggaaccagaggtgaccctgatggggccattgttattgggtcctcaggtgtgggcagctggtgcgggggtggcccacagccccccctcgacgctggtgtggaagggccagagcagctggggcacgggcgagagcttccgcaccgtcctggttaacgcggatggcgaggtgggtgtgtgtggcttggggggtgctcggctggagtcctgggcagggtctgggcaccctcggggccgccacagcagctctgggcccgatcccgggacatgccgccgtgtcctgtcccgcacaggaagtggccatgaggactgtgaagaagtcctcggtgatgcgtgagaatgagaatggggaggaagaggaggaggaagccgagtttggcgaggaggatcttttccaccaacaggtaggacccctgtgcccacttgcggctggggggcagcctctggggcagagtgagctcgtgcacacacatacacatgcgtgctggccgcatccccgacgggagctccatctggctgccgtggctcagggtgaagccagccttggctgttaccagcacggcagagacctgttcttgcctcctgggtcgtgcccatcgtgtgaatttgcgacatcacagacctcagggtagctggccagggggtcccctgagaggtgggtgttgaacagctccccaaatgctctctggtcaaccggcttcctcagtcgaagacacaggtcccttcaatactggcttctggggagaagatgagtgcagaaaccacagctgcattaaacgcgtgcgtcgcaagttcctgtgactgttttggaacccagaacagaatgtgtagctcacaggcgggctcatggggacatggaagtggaatggaaggctctagaaatagacactgttgttgctcagcccctccctggtggggaggtgggggcagccatctacctgccggctgcctccaggctggccctgatcatggccgaccttccttccttccttcctgcagggggacccgaggaccacctcaagaggctgctacgtgatgtgaacccacactcctcatccacacacctttctttacccagagccactgaaaactatttttatatcattggctttctttagttcttgatacatttctagagaatttctaagcgaactgccagaacgtgtgggtgggtctcccccagccctccctcctggcgggtctcctccagcctcacttcgctgccacttcgccgctgccccggagacttttcaatcccaccccactcctcatctcaccatttggtcaaattggaagcccagggccaggacccggaggtttagaagatgcttgggcttggagggaggagggccggcgaggctagcgaggggacaggagacggccctgctgcggacggagcgcggaaactgcgtaggaattcagtggtggtgggtttttttaaggctttctacaaaaccaaattcagaatccaggcgtcgacctggtggggcccggggccaagcctgcattctggctgcccagcttcggacagcgggaactcctcaggcagccacgcagcgggtgtgggccagcatggggatggcgtggcccccagggcgggttttcactccgctgcctgggcttccagattcccgttctggcagcgcaccggccgggtttctcggaccgttgactttatttgggggagttttcccgcagttcagttcctgactgtgcaaggccaacagggcaggggaggggaagacctggggaaggaagaatgaggacagtcccgtcgtaagacctgtcacaacaataagcagggaggggagatgtggaggggacacatctggttgccttggaggcagaagctgtgagtttcagaacagctgtctgcagggaacgccaccatgttgaccctctggaggagagcgctgtggagcccctcccgtgttccagctccgtctgccctgtgcctatatatacacatgcgtctatccatactgtgcttttatctgtgattttctcgctgaaaccatgtttctcagacaggccaaggccacctgactcctatcacgacgcacccaagcccctcagtccagcttcccaatgcctggcaccccccttcggcaatagctcaccgtttacaccctccctcatagatacacagaagttatttttttaatggatatttatttttttacattggtcagtacacaggtcaggagctcacgccagggccttgaggacaggctgaccctcctccccggggtggcgtggggctggggcaccctccgacggcagagcctccttcagaaagtgcagctcaagtcttaaagacaccaaaactgagccatgggcacgcgccgtctccgggccatggcgttcactgcagggcgggggcggcaccgctcccctgtgactgcatcccgcctccctggggacctgcctgtggcaggaaggaatggggggccccagccccaggccgggaaggagccagcggccgacaaagcagaaacacccgctgctccacgtagcccctgctcgctgtccttgctctcagaagtcccggtcccatgtagatagaggggggcgcatcttaccaaagcatttcctcctggaggctacgccgctgtgctcccagtcaggcggctggtagggagctttgcctgccccggggataccctctgccagccgctggaagtgggaatgctggcgacagactgtgtcctctttcccaccttcatagcaggaatcacccggacccgactggctgggcttcgtgctagcgagggttctgggggtgggtcttggtgatcttgtcctatggggagtctgcagtggtctcagccacatcctatgtattttggctctggaggagcaaagctgtatcctggagttggtctgtgatttgccgacagccttgcaggctgggctcagggacaaagtcccccccaaaacccgcaggtcctcatgtccagacgctgcccagtcctgtcctgaaaacagcacgccccaggcccacagaaccccccaccctacatttgccttgggtggagctgggggtggtcctaggactgcgggtgcccttagctgaagggggtggggagaagcgtggactgggcagcctgtgggtaattggaggttcattgagaattgagtctttggaaacactaagaaaatcaaatttttaaaagttatttatggcctgggaaacaatttgcatttgtccccaaatacgcttagctgtgtgccgcttagaacgatgcgaaaccatccctctgtgtaagcccgtgccgtgtgactcgaagcctagcgccctccctgcgaagcatcagacgccacccagccctggggggaggcccacgcctgctggaccaacgcgggttctggggtgcacagcgccaggttaacgctgaagcctgccccgctgagcccaggagccgggaggcctgcgggctgacccagaatccgatcatgcacctgtcctcatgccagcggctttggctggggttggtctgaagcctgcacgcggcagttctttgttaaagatctgagggactcctcagtcctggggcgtcgccgcctgcagcctcttccaagccctgcgtccagcgagcgtcacagcacaacctgcaaaaacggagctgggctgcagctggggctggcatggactttcatttcagagattcggtttttaagaagatgcatgcctaatgtgttcttttttttttccaatgatttgtaatatacattttatgactggaaacttttttgtacaacactccaataaacattttgattttaggttctgcctctgagtttattcctgaggggaagctcgagccggggcctctgccctaatgaagcggatgtctaagaaagatccctccacccccaaggaaaaaggtcactggctagtgtagctagtgtaaacaggacccaggcgatgcatgggaccctgcccttttttttctagtgagcctccgacgctgttgcacaagctgactcttcgtcacgtgatgcgaccgggctccgccccggcggcaacacgctgtatagacgcgccgggtgcctcgtgcgcatgcgcggcaggcccttcgggacgagctggaggcagagcgtgagtacaaagtgatcggcctcggccgcacgtagtagcccccctactccccggccaagtcagggcctccctcttcccgcggagtcgcaaccacgggtagctcgtgtaggtaacggcaggtccaggcctccgcatgagcggagggccccccgcgcgaccttgaatggcccgggcgcgcgcggtcgtgtgggagttgtagtcctccgtccccgtccgcgcggactccgtttcccgtggtgccccgggcggcccgcttccggcgcagttagttacgagtcggcgcacgcggcctcggtccggttgactttgcggagccatggagggcggcttcggctccgatttcgggggctccggcagcgggaagctggacccagggctcataatggagcaggtgaaagtgcagatcgccgtggccaacgcgcaggagctgctgcaggtgcggggctggccggggacgggcgctgggggcgacagggccacccctgggggccgacgtcgcggctaaagcctcgcgtgtctccacagaggatgacggacaagtgtttccggaagtgtatagggaaacctgggggctccctggacaactccgagcaggtgagacccgcggaggttcggggcaagggtcgcgagggcctagattcgaggggggaggtgtctgcgcgtgcgcagactaacggggaggtgcgacggagtggtcactgcacgtgcgtagtctgcagcccgggcgtcctggagccggggtcagggcggtccccggggccgcgaagtcccgagctgagccgtgcgcccctccgctcccgcagaagtgcatcgccatgtgcatggaccgctacatggacgcctggaacaccgtgtctcgcgcctacaactcgcggctgcagcgggaacgagccaacatgtgaccggcgagcgcgggccaccccaccctgttcatttccataaacgtgctttgagaggcggggtccgcatgtacgtact

SEQ ID NO: 8041 - DNA, 6000 bp, Homo sapiens
ctttaatgatttccctctccagggctgggcctggttccctgtctgccccacccatccactcctggccaccaggacccctggggacagtgccctgagccttcacgtcgtcccaatacaaatcaatagtcaattaaagccaggtccccggacttcagttccgggaagggccagccccacccagcccctccctgagcccatttcctgatagggagataatggcgccctgggagggacagtggcttggccagagctgacttgagcccaccagtggccacagagcctgtgcttgctgcccaggggggccctcgctgcctgtccctgcttgagtggatgtgggagtgacccaggtgtccagggaggctggaggccagggtccagtcctggaaatgacgttccaggcggtggcacgggagagctgtgggtggggggtggatgtgaaggtggagagattgtgcagggtcaggggtctttcccctgagtcccactgctggcataatcagcctcagcttctcctgccctggggccatgggatggcccctgagggttaggactaggcccccagactcccgccccaggacagggcagcatggactctacagctggagcctgggctgggagaggcaccgggagcctcctctggcccgaggagcccccgcctcgtgcgggtgacacagcctgtttgctgcccggcctgggtcataatcacccctttatgcttcctggaccgcgtgggcacacaaagccggctcccagatcgcgtgacccatgccccggcgcctggttggaatgagtgcccactcgccccccattagcaccgcgggggagcccccagaggcggccagcgggctctaccagtcccagagagagttgtccagagatctcgcagtggccagagaaagacacagtcacaagattaaacgtgggctctagacccaagtcccaccccagctgggggccttggctgagtccctgtttttctgtgagcctcagtttcctcatctgtaaaagtcaagcgcctgcctctgaccagctgccgtgagctagtggtgggcagtgcagcccctgagagccaggtggggcgggcagagaccctccctgagccccacatgggttcagcgtccagcggtcactccctctccttctccctagccctggctcagcctcgctggccaccatgggctgccatgcttttcctaacagccgtgtcatttactgggagcttgcagattactgcacctgacttaatttccctttcttggcagtggcaaggctggtggcccaggctgccttttgcaagaggacatggtggagggttggcctggcaccaacctggccatttccctccctgcccagggccacgtagggctcctggctgctctgtgggtctagtctatgtgcacctctctgtcctcatctctccccctctccctcctaggacctctcagtgctgcccccttgctcttcctcatgctgtttgtagtgcagagacacccttgcccccaattcccattcaccttttggtcctcagccaatattaaatccaggaatggcccacgcaaaggcccgggggcaggactggactgcacttggggtgttggagaaatagcaaggaggcccatgcggctggagcagagggaggagggggagaaagggaggaggggagggcacggaggggacagggcaggtcgtgcaggacctggtgggcctcaggaaggacttgggctttgaccccgaggcaggtgggagccatggagggctgtgggcagaggaaggacgagccctgactcgggtgcttgcagatgctttctggtttctgtgagtggaacagatcaagggacaagggcgggagctgggagaccacgatggaggtgacgacatctgtccaggtcggtgacaatggggctggaagaagtggaggcagaagaatgagtaagaagtgggcaggttggggacagattctgaaggcagagctgatgggacctagggatcttctctcccaaatcctcgcagaggacctcacgcctggggttttcgtggaagcaggagtcggtgggaggattgtgggtgtgcagggtcctatccccatcatgggaggttctcctagggaggattggcacctaagggaccccgggatgttttgtctttggtagtgtctgaaccccactccctgggcccctcccaccaccctattcctgatacatcatccaatgccccaaatgctcctgttactgtagcccctcgtccctgcccctgacaggctggagtggcggatctggggggagtccatggccaggccctgcctgtctgtgcctgactcagccccatcctgcgcagacatcagggaggtgtgggcccaacatggcttctgccgtgggagccagggtgtaattagggctgcctggtttagaaggtggctgatgctgccctgaggtcctcgtgggatgtgggagagccagctgtggctggggccctccatatatgtgccccacctgggctctctgtgcaagtgactcctacccatgccctctgagcttcaggtttgctatgctgcctcagtttccccagaggctctctgcaggcctgcccagctgctcaaagtggtctgggactgacctcgccccctcagtgtggccaagcagatgtgcatttctgggcagggccagccgctgtggtcaccctagccccagctggccacaggctgttttctccatctggggccaccgccttcctcgttggcaacttttgctcttaaagggctagggcagggactcagagtaagggactgtgctctaggctttatttccttcatcttcccagtccccaactggttgtgtgcaaggtgtacctagagtctgactgtgtgtgtgcatgtctgtgtagcctgcctgtgtgcacatatgtgtgtaggaagggaatctgactttgcatatctctatttggctggctggcacatgcacctgtggtctgctgactgactggcctatctatagtctgacagtgtgccggcacctgtgtctgcgtgtgactttgaccggcttgtgcacctgtaggtatctctgatctaattgcatgtttgcagttccctgtaacccaactgtgtatgtgtactgcctgccccaccatgaccccttatgtgtatcttttctggcttggtgtatgtctgtggtctgattttgggcctgtctgtgtttgtggtctgactatgtgcaagttttatttgcctgattgtgtgtgtgtgtgtgtgtgtgtgtgtgtgtgtgtgtgtgtgtgtgcccgtctctgctgcctgactgtgtgaatgcatttgtttctgtgtctcttgcagatatgcaaccgcttgcagtctgactgtgtgtcggtgtgtatcggtggtttgactgtgtgcatctgtgtatgtctgtggcgtgatttagcaggcatcgttctctgtggctggtctgactgtatgcctgtggcctaactatgtacactgaggccccccgaatcccgttcgtcaccctaggctgtgacccggccactacccgcccatccttcccctgggaccgccccagggctgggcgaggtgaccgcagctgggtattttgggagtcagaatcacaggggctgccccgttattatgcgccaccagttcctgtggtcacggcctggacccgcccagggcatgggctggcatgggtgccagcctgactaggcaacaaagatcttatccttgggcctctcccttcccctccctggccctctgacctggctctggacagagtggagattggggagatggggagggggccattccagggttcaaggtatgtgacgagggacccttctgccctggaggagttgaggttcttgtgggagaaacgtgctgaatgattaacatcttttcatttagtttgggaaccagggtgaataccacggaggataaccttagtcatatctgatgctccgggatgtagaatgtagggggaattgacctttgaggggcagagaagggtttcctgaggaagtgacagctaagctgagacctgtcatgtggtggggacagcattccaggcagagggcacagcagaagcaaaggcttggaggtgggactgagcttggctggcctggctgtacctccaagcgagaggaaacagtgaagtcagcaagagtggcttcccctgggggctctgggagccatgggaggtcttagagcagggcagggacaggcaggtgtgtggaagagatttgtcttataacctgggggatcaggttttagagccagacagcagcatagtctggagtcccctccttcctgagaagcagcctgtgagttggagaaaactggggctcagcacccctcagtcctggtgtggggcttggtctgagtcaggggctcaggtcctcagtcctggtgtggggcttggtctgagtcaggggcccagcctgggttggggactcatgctggggttggggtttagctggtggttggaggctgtcttagtccatttgggctgctgtagccaaataccacagaccaagtggcttataaatgacagaaattggtacctcacagttctagaggctgggaagtccaagatcaaggcaacacagatttggtgtctggtgagggctatcttctggttcgtggaaggcatcttctccctgtgtcctcacgtggcagaaagggcaagggagctttctgggagatcctttatgacactaatcccgttcatgaggtctctgctctcatgacctagtcacttcccaaacactccatctcctgttaccatcatagtggggactaggtttcaacatatgattttttgtgggggagacaccttaattctatagcaagggcccagcactttcattccatcccatcaccccatgatccttccccattgtcccatgaccagcccccgcaggaccctcccctgctccatgtgaccctccctctgcctcctccatgaaggtctcctggatttccccactcgcctctcacagccctccattgtctctgcagacgttgccccatctgacgctcggctcgaggcctctctgtgagggaccggggggccatccccctccagggcggagatcggaggtcgctgccaagcatggcgcccacctggggccctggcatggtgtctgtggttggtcccatgggcctccttgtggtcctgctcgttggaggctgtgcagcagaaggtaagaagccggcacgggatgtgcaggggtctgcgtgtttgtttacctgtgtgcatttatggctgtgtgtgtgtgggcacactccccacctcctccctggggccctccattttgccaaatggaacttttatgctccacaaatgaggctgaatgctgaggactgtgtgctgagccctaagagattcagagataaataataatgctggtattcataaagtaataaccgtaatgatgatgacggcgtctgtttccccagcatcaactcagccccaggctccatgctaagcactaattttacctgcttcctctcccttgagcctgacaaaacccagtgtgccagttctgttaccttccacgtttcccaatgagggaaaacgaggcaaggacttatttgagatcactgcttagtgagccacagagttcaccttcccttgctgtgggcagtacctacacctggtggcagacacacaggcagacaaactgtctcaggtggagccaggggaggcttcttgggaaaaagggcattgggactggggttttgtgggtgtataggagttcgccgatagaaaagccattcctcgtcaggatgacagcacccgggaaggcctgcagatgaaagaggttggtatagtttagagatgggcaaggaagcatttctggctgtaatgtgaagaggatgagggtccatctggggcccaatgccaagactcaccccaccatgaaggacctggagaaggcatcactcaggcccatgaggacataggggatgagggcagtagggcaagagactgggttctgcagtcaggctgggtt

SEQ ID NO: 8042 - DNA, 6000 bp, Homo sapiens
cgccccaggaaacctgccatggcctcctggtgagctgtcctcatccactgctcgctgcctctccaggtaagttatcccattctaccttttccccccacccagaatgcctgggagacctcccaggaaaggcttcctggctccgtccctcctcccctcggcccccatcctatgggccctgattcatgatgtggctgggctggcacaaaatcccggtggagagtcaccaaactgtccatgacctggaatgtggccagcaccccctagtcacaggcaggggtctttctgggtgtggcatgcaccaccgttggggaggacatggaaggttctgggtgatttgccaaaccggaaggaaagagtgacgtttgtctctctctctggcagagctctggagtggagtcccctctgcaccccaaccccatcaacagcctccccccactcatcttttctggccttggattctctctggccctgccctgcctggggtggacttaagatgcattttttttttctttttctttgagacagaatcttggtctgttgcccaggctggagtgcagtgatgcaatcatggctcactgcagcctcagactcctgggctcgagtgaccctcctgcctcaggctctggagtagctgggactacaggtgtgtgccacctcacctggatactttttaatttttttttcttttgtagagatggggtctcactatgttgctcaggcaggacttttttttttttttttttttttttttttgagacagagtcttgctgtgtcgcccaggctggggtacagtggcatgatctcggcttattgcaacctctgcctccctcgttcaagcaattcttgtgcctcagcctcctgagtagctgggattaaggtgcctgccaccacacctggctaattttttatttttagtagagacaagatttcaccatgttgccaagggtggtctcaaactcttgacctcaggtgacctgcccacctcagcctccgcaagtactggcattacagccatgagccattgcacccggccaatcaggcaggtcttgaattcctgggctcaagagatctgcccacctcactctccgaaactactgggattacaggcatgagccaccacgcccagctatttttttgctttttgcttcctgatctttgtgatgtctcagcagagtagcattttttaatctttttctaggaaaaaatatcttgggttcaactggggtgggatctcagtcctcatcgcgatctcacatgtctgtgtgaagagaccaccaaacaggctttgtgtgagcaacaaggctgtttatttcacctgggtgcaggcaggctgagtccgaaaaaggagtcagcaacggtggtgggattatcattgttcttataggttttgggataggcagtggagttaggagcaatgttttgcaggcagagggtgaatctcataaagtacattctcaagggtggggagaattacagagaaccttcttaagggttggggggagattacaaagtacattgatcagttagggtagggcagaaacaaatcaatggtggaatgtcatcagttaaggctattttcactttttttgtggatcttcagttgcttcaggccatctagatgtatacgagcaggtcactggggatatgatggcttagcttgggctcagaggcctgacattcctgtcttcttatattaataagaaaaataaaacgaaatagtggtaaagtgttggggtggcaacaattttttggggtggtatggagagataatgggcgatgtttctcagggctgcttcgagcgggattaggggttggtgtgggaacctagagtgggagagattaagctgaaggaagattttggggtaaggggtgatattgtggggttgttagaaggagtgtttgtcgtatagaattattggtgatggcctggatgcggttttgtatgaactgagaaactaaacaaaagagtggctgccaggtgagttgaacagtctgattttcattgggggtccttcacagatgggacatggcttaggaggaatcccgggctgcgggcattccttggcccggtggccagatttccaaaacttgtagcaagctcctgggggaggaggttctggaggaacccctggcagctgcggttcaggcgtttggagttcttgtgttctggagatgtggctggggtttgtctcacggtggaggcaaggaattgcaactcagaaatacattgctacgtggctgcctctactcttattattgtacaccttgaaggcgaggttaattaagtcctgttgtggggtatgagggccggaatttaatttttggagctttatttaatgtcaggagcagattgggtaataaaataaaatgcattttgagaataagacggcattgtgacctttcagggtctagggctgtaaaacatctcaggattgctgccaaatgggccatgaactgggctgggttttatatttgatgaaaaagagcctaaacgctaactgatctgggagaggtcggataaagaaaaaggagcattaaccttgactgtgcctttagctccagccacctctttaagaggaaactgttgggcagatggaggagggctagtcacggaaagaaactgtaagctggactgggtgtgaggaggggaggtaataaaaggattatagggtggaggagcagaggctgaggaagaattgggacctagctcggcctggtgaggagcagcctgggaaggaggggagaagtcagatgggtttgtagaaaaggaagattcaagactcagcaacgcttggggttggaactgaggggacaggcaggagggaaagaaggaagatttgggatgaactgcattgggaacagagactagggagggaccgatgtataaaagaatgcctgaacgtcaggcacctcagaccatttgcccattttatgacaagaattatttagatcttgtaggatggaaaaattgaaagtgccattttttggctatttggaaccactgtctggtttgtattggggtcaagcggcattgcagaagaaaataagacatttaggttttaggtcaggcgagagttgaagaggttttaagttcttgagaacacaggctaagggagaggaaggaggaatggagggtggaaggttgcccatagtgaagtaggcaagtttaaagagaagggtagagacacggagagaaggggtgggggatgcttatcccccaggaaagtggagaagggatgggaggtgcttgccccccaggaaaatggaaacggggtggggggtgcttgcccctcaggaaagtagagaaggggtagagacacggagagaaggggtaaggtgagcagccaaagcaggcgtccctgcaattgacttgccaccaagggatgtgggtgaatgaccaaggcaggtgtccccgcggagatcagacacaaatggaatgtgggtgaataatcaggcagtcgtccccacaatgattaaacaccaagggaaggctgccttcccaagtccgtgaccggcgccagagttttgggtccacggataaaatgtgtctcctttgtctataccagaaaatgaaaggaatttaaattaagagaagggagagattgaaggatggtgccaagattgaaaggagaaagaggttgagggatagtgagagaggttggagaaggagtaaaagaggccacttacccaatttaaaatcagtgagatgttccttgggctggttggtctgcggacctgaggttgtaggtggatctcttcagggagtgaaggtgaggacaggggactgctgtcccgaaggagtcccgctgacccgggtcttcggcaccaaatgtctcatgcgtccgtgtgaagagaccaccaaacaggctttgtgtgagcaacgaggctgtttatttcacctgggtgcaggcgggctgagtccaaaaagagagtcatcaaagggtagtgggattatcattggttcttataggttttgggataggcggtggagttaggagcaatgttctgtgggcaggggtggatctcacaaagtacattctcaagggtggggagaattacaaagaacctttttttttttttttttgagacggagtctggctctgtcgcccaggctggagtgcagtggctctttctcggctcactgcaagctccgcctcccgagttcaagccattctcctgcctcagcctccggagtagctgggaccacaggcgcccgccactacgcccagctaatttttttttgtatttttagtagagacagggtttcaccgtgttagccaggatggtcttgatcttctgacctcgtgatctgcccgcctcggcctcccaaagagctaggattacaggcttgggccaccgtgcccggcctacaaagaaccttcttaagggtgggggagattacaaagtatattgatcagttagggtggggcagaaacagatcacaatggtggaatgtcatcagctaaggctattttcacttcttttgtagatcttcagttgcttcaggccatttgaacgtatatgagccggtcgtaggggatatgatggcttagcttgggctcagaggcctgaaaatcgcccccaccaatcacctgtttcccccaatctaccctcctgaaggtcactgacaaagacttcattgtctcctaggagaggctgccatatatccagggctgacgtaattccatcttaatatcagttacattataaaaatttacctcgtgcctgaggccccagagcccaagggtgcaaagcagtaattggtcaaagttcaacttccctcccactctgggctcaggctgtcccctgagggcctgtgttttgagtctctttccagaaccttggtgtgaacttaggtcttggcgtcgggatcccttttcgtcacactcaggtgacctacagggagctccgctcgacactgcaaggcttagaccagttcggtccaacagagaaagcaggcaaccaccatgtcatttgaaaacagtttcatcgggatataattcgcaacccatacagtgaatccatttaaggtgtgtaagtcaaaagtttttcgtgtattaccttatgtttatttatttatttatttatttatttatttattttgagatggagtctcgctctgtcccccagtctggaatgcagtggcactatctcggctcactgcaagctccgcctcccgggttcacgccattctcctgcctcagcctccccagtagtagctgggacaacaggcgcccgccatcacgcttggctaattttttgtatttttagtagagacggggttttaccatgttagccaggatggtctcgatctcctgaccttgggatctgcccacctcagcctcccaaagtgctgggattacaggtgtgagccaccgagcccagccttttattttatttttttaagacaaggtcttgctccatcacccaggctggggttaagtggcatgatcacagcttgctgcagcctcaaacttccagactaaagcaattcccccaagtagctgggactacaggcgcatgccaccttgcccggcaaatttttgtatttttagtagagttgggattttgccatgttgcccaggctggtctttttttaaaaaaattatttatttatttatttttgagatggaatcttgctctgtcacccaggctggagtgcagtggcatgatctcagcttactgcaacctctgcctcccaggttcaagtgattctcatgcctcagcctcccgagcagctgggattacaggcatgagccaccacactcggcttatttttgtatttttggtagaaacagggtttcaccatgttggccaggctggtctcaaactcctgacctcaagtgatccacctgcctcagcctcccaaagtgctgggattacaggcatgagccaccaaacccggctattatttatttatttatttttgagacacaatctccctctgtcacccaggctggaatgcagtggtgtcatcttggctcactgcaacctccgcct

SEQ ID NO: 8043 - DNA, 6000 bp, Homo sapiens
ggtagagacggggtttcactgtgttggccaggctggtctcaaactcctgacctcaggtgatctactcgcctcagcctcccaaagtgttgggatgacaggtatgagccaccacgcccagccggacacagttcttagtgacttgtgtgcatattaacacatctaattttcaccaccaccctaggaattagatgctttggtgatcaatgctgccttatgtgaagcacagagaggttaggtgacttgccaaaggtcacacagcacttcaatggaagaaccaggaatttgaacacaggtagtgtgggtcaggcatctgcagccctagccactatgccacctagacttctatatactaagaccccttggcactttgcccaccctcctcatccttcccaaaatgtgtcccctgatccttaacaccctccccactctcaactggggaactccaaatccccactcctgggtgggctacctcccatgtctctcactccagaagacacccccctgtgcccctacaacccacctcccaaccaggagggggctgggctgggccatccactagggctggacgttcccactgtgtcagggaggggcctggctgaaatgtcccctggaccctgcactccagaacagctgggaccatgctgccttgtctgtcaccctggaccgagtgacccttggtgcatgcctgttgagtgaatgactgactctggtggtctgaggctgttcattttgggtcccaaaatgtcccctccaccttgatctggggtaatggccgaggaccaagatggtaaagaagtgagggagggtccgggtgcggtggctcatgcctgtaatcccaacacttcgggaagccgacgtgggtggatcacttgagaccaggagttcaagaccagcctggtcaacttggtgaaaccccatctctactacaaatacaaaaaattagccaggtgtagtggcgcgtgcctgtaatcccaggtacttgggaggctgaggcaggagaatcacttgaatccggggaggcagaggttatggggagctgagatcatgccactgtactccagcctggatgacacagcaagactctgtctcaaaaaaagaaaaaaaatcaaaaaggaagggaaagagttggccgctgagcattggagaggtggctgggggctgctgagtggacatagggacagcatttgaggccaagccagggtggggtcactgggggattagtcttgagggcaggtcgggttggggatcctaagggggggtctgccgtggtggccaggtgggagtgaggaccctggagggtctgttttggggggcaagacaggaggtagagccccagggaaggctgtcatgggggcaggatgagagtggggaggccatggaggaggcagtcccagggacaaggcaaaccaggcagggggaaccctaagagggggatgtcacctggtccagggggaagagggagcagctgtggggatggggagaagcaggttatttttttgagacgagccaggcgcgggtgctgggtgagcggtggggtggaagatcgggaagtgcttggacaaggcctggacctgggccggggtgtctgggtggatggacggactgtcccaccaatggggacacacgaggagaaggaggaggaagcttgggaataagtccagctgggccatgttgtgaggacatggggatgaagtcttagttccaggatggggctgggatggagtttggtgtttcttttctgtttttctttcttttttcttttcttttttttttttgtgagacagagtttagcttttgttgcccaggctggaatgcaatggcgcgatctcggctcaccgcaacctctgcctcccggattcaagcgattctcctgcctcagcctcccgagtagctaggattacaggtgcccaccaccatgcccagctaatttttttttttttttttttttttttgtattttcagtagatacagggtttcaccatgttggccttgaactcctgacctcagatgatccacctgcctcggcctcccaaagtgctgggattacaggcgtgagccactgtgcccggtctctctctctctctttctctctctctttctttctttcatctcactgtgttgcccaggctgatcttgaactcctgggctcaagtgatccactcacctctgcctccccagtagctgggatcacaggcatgcaccaccatgccctgctagtttttatagtttttgtagagacaacggcttgctatgttgtccaggctggtcttgaactcccaggcttaagtgatcctcccacctcagcctcccaaagtgctgggattacaggcgtgagccaccgtgcccagccaaaactgtccatatttgacctgaatattatctcacgtatctttctttccccccgcttccctccttccctcctactcctccttctccctctccttccttctgtcttttttttccccttcctctgcctctctctcctcttcccttttttcttgctgggactcaaacctgggacatttgacctgggagcctatttgctcaatcatcaagagacataatctcatggtggggtgtctgctggtaagtgccgggtggcaggatcccaactccaggccgtccttctaacccaagaggccctgcctctgcctagagccttccgtggctccccagggccctctgtgatcggccatagtggtatgattcagtgtgcagtaacagtggttcacatcttgacgctaccactcacctccttcagccctgtgggaacttgctgcttaacatctctagttctcacccaattctcttacctgagaaatggagataataataacacggacttcacccgggtgtggggagcaccaggagaggccatgcgtgtaatgttatccgggtggcaagcccatatttaggtctatgaaaatagaagctgtcagtggctctactttcagaagaaagtgtctctcttcctgcttaaacctctgtctctgacggtccctgccaatcgctctggtcgaccccaacacactaggaggacagacacaggctccaaactccactaagtgagtacgtatctggtgtgttgggggttggccatgggaagtggagatcaaagcgcccttggaagaaacgaccttgggctgagcctcaagggatgaccagcaggaggtcacaaccagagaagggaggtggtgggtggtgagggggcgggggtgggggccgcagtgtggacagaatctcgaggcattcgagtccctgatttggggaagtgaaagcaggccatctggtctgagatgagcttggtgagtgcgctgggccgatcatagagggccctggggagccatggaagactctaggcagaggcaggacctcttgggttagaaggacggcctggagttgggatcctgccacccagcacttaccagtagacaccccaccatgagattatgtctccagatgattgagcaaatgggctcccagctcaagggtcccgggtttgagttccagtcccaccactgcgtgatggggacaaatgacttaccctcttggaacctcagttccactgagagaggccccacagaatgaggacagtcccccagcatcctgccagtaggtttactgagcacctactgtgtgctggtgctttgaatactcccaatttacagatgagcaaactgagctgctcatccaggaagaagccaggactcggactcaggtctgtccagctgcctccctggacagttccagtcccaggatggtctctgggttcctctcacaatgtcaaaagggccagcttgagctgccgctaatcagagcctggccgcgccacaccccacctccctgaggctccgagagaagggacttacctatagtcaagcagcgaaagaaggtagcccgtgacctccaggcctgaaggaccccaagtcccatgctcctcagcacatagtagatgctttaaagtcagaggacttggtcgggcgcagtggctcacgcctgtaatcctagcactttgggaggctgaggagggcagatcacctgtggtcaggagttcgagaccagcctgatcaatatggtgaaaccctgtctctactaaaatacaaaaattagccaggtgtggtggtgggtgcctgtagtcccagctacttgggaggctaagacaggagaatcgcttgaacccgggaggtggaggttgcagtgagccaagatggtgccattgcactctagcctgggtgacagagcgagactccatctcaaaaaataaaaaaataggccatgcacagtggctcacgcctgtaatcccagcactttgggaggccgaggcgggcggatcatgaggtcaggagtttgagactagcctggccaacatagtgaaaacccgtctctactaaaaatacaaaaattatctggtcatggtggcacgtgcctatagtcccagctactcgggaggctgaggcgggagaatcgcttgaacccaggaggtggaggtggcagtgagccgagatcgtgcccctgcactccagcctgggcaacagagcgagactccatttcaataaataaataaataaataaataaagtcagagcactttacagatgccctggggacattggcagaggagaaggctgaggcctgggttatgggctcttagcatttctcagtgggacgtggcacagagtagatgtttcataaatgtttagaatccgaagacccactgtgcgcagcccggcaccaaaaacctcaggtatgctgtgatctcattggatcctatcttggcctcatgagttgggtgctgtcatcagcccattttacagaggggaaaactgaggctgagaatggttgaatccttggctgaggtcacacaggcaaggcaattataataaacgctggtgatatttttagcacagatcaccaaccaacagtataggtgttcttggtatcatcattttacgaatgaggaaagaagtttccaggttaattaagccatttgtcaagatctcatgggtgcacctgctgtgtagctcaagtgtgatgggctctggagtgccccacttctgatctcaggctgctatctctccacaccagctgtgtctccctgctaaccacgctagtgagtccagattgtagactaaacaaaatcagcaaatggcccctgagtgccaccaagtcccagatgctatcctgtgctggtaactaggatttgatggctcaccctaaccatcattaaatcccaaatcagccagagctgtgattgtgcccgctgagtggactgcgttgtcagggagtgagtgctccatcatcgggagaatccaagcaggaccgccatggaggaaggtcaatattcaggtaggaggactctctggttctaacgttggcagaagcaatgacccttagctactgcctttcacccagaagagaagcggggctccccagtccctctctgggaaagagggtgaatttctaagaaagggactggtgtgagtaaggaggtgaggccggactgactttcctggcacagagccaggaaggagtggcaaattgagggcccctcctttttctgattcaacaccctcctgacaaaaaaagaaaaagaaaaaaaaaaaaaaacggcttcagctagggagcggggagcccaatagagtcagaggccaaatagaacaggaacttggaacaagcagaatttagcataatgaatcctccaagccagggtgagtgcagagggccaggggcttgaggtgggacatccagatagacctttgggtggggtctgggagaggtttggaggtctggatgttggatgacacctgggaaagtggctggggagtggctccgatgttggggaagaactgggactcagtgtcctgggtttagggaagggactccaggttggggacaggtgcagaggtgtaagggtgggcgttggggctcagaggggaaggaaaaagcaggacctagtcttctggaagtgaagctgggggcctggcattggttgttggggctg

SEQ ID NO: 8044 - DNA, 6000 bp, Homo sapiens
gctgatcttgaactcctgaactcaggcaatctgtctgcctcagcctcccaaagtgctgggattacaggcgtgagccactgcgcccggcccaaaaatccatctttgtgggttcctttgtaaatgtgtagtcaatttagaaatttagaaacacggtttcccttaagcctttatttagttacaatcacaactaacatgttacttatacacctggcaaagtgaaacatcaaaaaattaattcagggcctggcctcaggcctgtaatcccagcactttgggatgccaaggcagacggatcacttgaggtcaggagaatcgcttgaacctgggagacggaggttgggacgagctgaagatcacaccactgcgctccagcttgggtgacagagtgagtgagactccatctcaacaaaaagaaaaagaaatatcactttaagaggtcattggatgcatatttgggtccgtttataagtttagtggattgaaattaacattttacattttataagtgtgatgcattttattctatactcttttactactataataataattattattattaattttttttttgagatggagtctcgctctgtcacccaagccggatggagtgcagtggcgcgatcttggctcactgcaagctccacctcccaggttcatgccattctcctgcctcagcctcccgagtagctgggactacaggcgcccaccaccacgcccagctaatttttttgtatttttagtagagacggggtttcaccgtgttagccatgttgctctcgatctcctgacctcgtgatccgcccgcctcggcctcccaaagtgatgggattacaggcgtgagccactgcgcccggtcaattattattattttttagagacagtgtatcagctctgtcacccagactggagtgcagtggtgcaatcatggctcactgcagcctcgacctcctgagcaatgctcccacctcagcctcctgagtagctgggctacaggtgcacacaaccacgcccagctaattttatttttaagagatgaggtctctacaaaaagtgttgggatgacaggtgtgagccactgtgccagcttattctttaatcttttaatttattattattattttttgagacagagtcttgctctaccacccaggctagagtgcaatggtgcgatctcagctcactgcaacctctgcctcccgggttcaagcgattctcctgcctcagcctcctgagtagctgggactacaggcacgtgccaccacacccaggtaattttttgtatttatagtagagatggggtttcaccatgttagccaggatggtctcgatctcctgacctcttgatccacccgcctcggcctcccaaagtgctgggattacaggcatgagccactgcacctggcctattctttaatctttttaaatgtctccaccaagcaaacaccttgagaagtccttatcagttattaaaaatctacaatgcaaacatacaaataaaaggagaacagtaagttctcttaaacattctgatactacttctaaacttagccaataaactgagaatgaatgttaattttttaaataaacaggccaggggcagtggttcacacctgtaatcccagcactttgaggggctgagttgggaggattgcttgaactcaggagttcaagagcagcctggacaaggtgacaaatccctctctctacaaaaaatacaaaaattagctgggtgtggtggtgtgtgcctgtagtctcaatccccaggaggccaaggggtgtgggaggatcccctgagcccagaaggtcgagtctgcagtgagccgtgatcgcatcactggtctccagcctgggtgactctgttttagaaaaagaaaaaagaaagaaaaaaaaagctttcattaactgaagacagactgaaagcaagagaaactgaaagcaagataaatgagtgggtggttttctcaagcactggtaagtgctgcagagaaaactacagcaacaggagagtcaatgatgggggcagggtggtgcatttcagataatttcagataaattatctttttctttttttttttttttttttgagacagagtctcactctgtcacccaggctagagtacagtggcacgatcttggctcactgcaacctccgcctcccaggttcaagcaattctcctgcctcgacctcctgagtagctgggaccacaggtttgtgccaccacgcccagctaatttctgtatttttagtagagatggggtttcaccatgttggccaggctggtctcgaactcctggcctcaagtgatccacccggcttggcttcccaaagtgctgggattacaggcgtgagccaccacgcccagactcatttcagataaattaaaggaacttgaacacaatgggtgacctcagtatctgactaaggaagacccttccaggcagggagaacagaaagtgccaagaccctgaggccagagtgtatctgagacagtcaagcaatgcggaggaggtcagaggagcaagaaacagggaaagcaggattggcaggaggaaggaagggaagggattgggtagagacagcagcggagaacaggacctggatgtattggcaacaggaggaactcactcgtggggttgttgacatctgagattgacactggtgttgggaaaataggaaagggtggaggtggagggagattctgagtcacagcctgatctagctccacagaaaatcagcagaagagagttctcctgggtgaatggagagagaagagcttattcagcaccctggaggagaccagagagagatagccaagaacgcacaggttttattacatgctctgtgcaagatcaggtttatttttttcattgtgctctctctctctctctctctctctctctgagacaagagtctagctgtgttgcccaggctgaaggtcagtggtgcattcgtagcttattgcagcctcaaactcccaggctcaagcgatcctccacctcagcttcctgagtagatggaaccacaggtgtgcaccaccatgcctggctaattttttttttttttttttttttttttgtagcaatgtggtctcgccacgatgcccaggctgttcctgaactcccgggctcaagcgatcctcccacattggctgggtttacaggcctgagccaccatgcttggccagctttttcaatttaaaaaatatagaaagtgttaatacaaattaaaaagttataaaatagtgccaatagtatcccatttttccgaagacaaacataggcagagaaaaattaatggatactgtctctctgggcaggggtattactggctattataatctttttcttcgtgcattccagaatttaccaacttttctacaaagatcatgtagcacaataagataataaacataattttgtgtgatctcaaaatacaggaagcatagaagcttccaaaacacgcctgtacccaccacgtgaagaaacagatgttaacatttggtcataattgcttcagatttctttctttttttttttttctgttttttttttgggggggacagagtcttgctctgtcgcccaggctggaatgtagtggcatgatattggctcagtgcaacctcctcctcctgggttggagtgcagtggcatgatctcagttcactgcaacctctgcctcctgggttcaagagagcacctccagctaatttttgtctttttagtagagacaaggttttgccatgttgcccaggctggtctggaacacctgacctcaagtgatccgctcacctcggcctcccaaagtgccaggattacaggtgtgagacaccacaccggctaaataataagtttttaaaaaaacaggagactggccaggcatggtgactcacgcctgtaatcgcagaactttgggaggctgaggtgggcagatcacctgagatcgggcattggagaccagcctggccaacatggagaaaccccgtctctactaaaaatacaaaattagccgggcgtggtggtgcgtgcctgtaatcacagctactagggaggctgaggcaggagaatcgcttgtacccgggaggcggaggttgcgtgagccaagattgcgccactgcactccagcctgggcaaccagaataaaactgtctcaaaaaaaaaaaaaacaaaaacaggccgggcgcggtggctcacgcctgtaatcccagcactttggaaggccaaggtgggtggatcacgaggtcaggagatcgaaaccatcctggctaacacggtgaaaccccgtctctactaaaaaatacaaaaaattagccgggcgcggtggcggcgcccgtagtcccagctactcgggggtgctgaggcaggagaatggcgagaacccgggaggcagagcttgcagtgagccgagatcgcgccactgcagtccggcctgggtgaaagagcgagactctgtctcaaaaaaaaaaaaaccaaacaaacaaacaaacaaaaaaacaaaacaacaggagaagatgatgacagacctcacaagagcttggccccagggctgaaaccccacccagtgctgtggttctgcggctgtgggcccatgggtgcccccaaagggtcccaggcagatggaggctcctggttggcgtggaggaaggaaaaggatgaaatcggctcccctggccaccccttctagcccagctgcagctgcagtccgtgggtctgagccgacccttggggttcatcggcccattttacagatgcggagcctacagccgggaggcgtggcggctctgggcggtgcagggttccggggcggggaggccgaggcgcccgccctccccgccggggctcacctgggtcagccctgagccctcgagcagggcggatcggccgctgcctgcttaaagctggggccgccaggagtgcgatcgcctgcggatctgcagctgggcaccggccgcaacgcccgccccgcgacggcaggtgagatgcgggcggccccgtgggaggggtctctgcctgtcctcgtcacccacttccttcccgtttgttgctgctgcagggctgggaatgggggggaccaagcacttcgcagggtgacccggggagatctgtgagccagtggcctcagcgttgaatgagagctctctcccgggtccgcgctcgcagggactgaagggactcctgaatgtccgcgggacgtgtcgcggcggcgcccagcacggaggaggcaggcagggaggtgaggagcaggtcagaccggccgcaggtgcagggcctcctgccctcccaggctgcggtcccgtggagggcctgcagacagctgctgagactatgagggtcagaggtctgtggtcacgcgcgctatcaccagctagctgcctcctgcctggttcctcctgcaggaatgggagtctggggggaggggagggtgtgggcaggacttcctggaaaagggaagcccgttggtgtttatgtgtgggatggagagagggcagggggaggacggggacacacgcggagtcccccacccagatgttgtcaaacacagctcccacaccagacacgcaacccatcctagagatgcaacccaggcacacacacatggacacacacaaaactccatccatagggattcccacccagtgccacgtgagaacacaggcgtgcatcgcagacaagccacacaggcctcgcaggctcagcatacatgtctgcagcaacaccatcaggtacagagccgaggcccaggtaggcatgctcagctgcacgcaggaagcaagacacacccagacacacacaggtaagcccttactcagagaaagaaggtgcaggagatgtgtcttgggtaatcacagccacagcctctcaagtgtgcacacacacacacactcacactgagatacacagacacacagagatacctggacgtgtcaagcctacagcacaaacaggcccctgcaggtccacccggaggctgtgtgggccgaggctgctgcacacgtgtgc

SEQ ID NO: 8045 - DNA, 6000 bp, Homo sapiens
cctggctgttgggtctggggaaacacagccatcgttgcccagcagctctagtgaccccagacattgacatgggccctgtctgggagcgaatgtctgtgaagggcttccttcatctgggacacacctctcagcctgtttggctacggtgtcctccctctgtgtctgtctcctgtgactggctgactgggcccaccgtgcccccgcctccccacagcggaacggggccgactacgctgtttacatcaacacagcccaggagtttgatggctctgactcaggtgcccgaccagacgaggctgtctcctggggcaagatccgggtggatgcacagcccgtcaaggtaagcgctggctgggtggggcatagggtctctgggacgatgagtgtgggtcccatggcttacccaggttcccccctacccaggtctatgctgacgcctccctggtcttccccctgcttgtggctgaaacctttgcccagaagatggatgccttcatgcatgagaagaacgaggactgagcggctgcggtcccaggaaggtcttaccccctcttctatttattaatttgcagacccagcccctcccctactttttggtcagctacgtctctagaataagatggtatctgaagtccttccatgtctgtgtctcggtccttggtcctgttggtgggtcccctggcttcagcctgctccatcctctgcctcataggcctcctctcgccagcactggacgctgcctcccatggcggtcagcaggcagggctctgttgggtggtaggccagcgactgcaccacaccggaacccacaggcagggccagagccagcgcaccctgtggagcgaggggtagggagtggttatctgtggctgggctgtaccctggtttctgaggtccctgggcaccccccatctcagtcctgcctgaagccctcagtcacctctccccgaccttcagccacctgcctctaattgcctcctagacactgcaaaattaatctacctcagactgagcccctcagtagctctgtcctaccaggtgttcaggccgcaagtcttgggagcctcttattgattttttattttttaaaatagcagagatggggtcttaccatgttgcccaggctggtctcgaactcctggcctcaagtgatcctcctgccttggcctcccaaagtgctaggactacaggtgtgagccaccatgcctggctttgggagtctttttctttttctgtttttttttgagatggagtcttgctctgtcgccaggctggagtgcagtggcgccatctgggctcactgcaacctccgactccctagttcaagcgattctcctgcctcagcctcccgagtaggtgggattacaggcacgcgctaccatgcccagctaatttttgtatttttagtacagatggggtttcaccatgttggccaggatgatctctatctcctgacctcgtgatccacccccctcggcctcccaaagtgctgggattacaggtgtgaaccaccatgcctggccgggagtctttttcttgtaccacatgttcctctatcagttattcctcttggctctgcttctagaccatgtccagagactgctgattttctgccactaccatgtttggagcatgccttgctcacagcttgcctgttccctgccaccagctgggctccatcctgtccatttggcagccccaatgatccccacttcccctggtcccaacacaatgtaaacagttcctcaagcaagccatgcttcctctttccaccttgaaaatgtcccttgatgtgcctgccctccaaggcaacttctgttctactgggcccataagaaataggtggaacattcttgctaccttagttcctaaagcaagagcttgtccgccaagtcttcagggcccccccggttccctccatcctcttatgggccttagttcccctggccaagcccagcgctgatgtctcctttgccgagattcccccggctctgaccccactacaccaggatggtctgtttctggcctgactccccaccaggctgggacatgtcaaggacagggctcagggcttgaaaccatgcacagggatgctaagatgtagctccagtttcttgaatgactgcagccctatctcacccaaggttagacatggccgtcggctcccccttgcccaggggtcagtgccagttgctcggcctggcatctgcagcccagcctgaccccggatcttgccgcacctgccgccaccctgaagcctttgtttcctgactgatgcatgcgcaggctacacctcttaacatatgctgttccctttgcctggaatgcccttcctgcctcatcttctctctagcccaagctgggcacggtgtctcaggcctgtaatcccagcactttgggaggccgaggcgggtgaatcacttgaggtcaggagtttgagaccagcctggccaacatggtgaaaccctgtctctactaaaaatacaaaaattagccaggtatggtggtaggggcctgtaatcccagctactcaggaggctgagacatgagaatcacctgaaccctggggggaagaggttgcagtgagctgagatggcgccactgcatttgcctgggcaatagtctcaaaaaaagaaaaaagggccgggtgtggtggcttacgcctgtaatcctagcacttgggaaggctgaggtgggtggatcatgaggtcaggagtttaagaccagcctgaccaacatagtgaaaccctgtctctactaaaaatacaaaaattagctgggtgtggtggcacgcacctataatcccaactactcaggagactgaggcaggagaatcgcttgaacttgggaggcggagtttacagtgagccaagattgcgccactgcactctagcctgggcgacagagcaagacttgtctcaaaaaaaaaaaaaaaaaaaaaaaaaagatcctagccttcaggccctggagtgactgaggtaaggacagggctgagatggggcaggcatctaggtatgaagtagggctgggggcacctcacctccaccaggtcccagaagaacaccttcccgtcctcagaacagctgaccacatgtgtgtcacgctcgctcaggcagcagtccagcttgtattcctggttcttatggcccttgtacctaagggtggacaggatcggggggcttggtcctctccaggggtgggagaggagggaaggggatccccacgaccacaaggactcactcgcccagcagctcccctgtgtctttgtccaggagccgcaatgtggagtccaggctggacaccagggtgcactgcccatcccggctgaagcaggtgcaggtgatggggccttgggggaagggtgggtaggtgagtgagggtggggtgcccctggttggccccccatcttccctgcctgtcccacatccccagccacactcactgcccacgtagtctgagaagagctgccccatccttaggtcatagcgtctcacgcggccatccacggagctgcaggagagggtagatccagcgggaaccttgactacactcacatggctccaggcagccctgtgccttcccagcccagtgggcctgctcttccagtgcacaggagtggaattctgaagctctggccttgagactcaggcccagggccaattacgtcctactccatcatttccaagacccacaccccctttccaagcccttggagtccttctgattcccccttttcttccttttgtttgagacagagttttgctcttgttgctcaggctggagtgcaatggcatgatcttggctcaccggaacctctgcctcccgggttcaagagattctccttcctcagcctcccgagtagatgggaatacaggcatgcaccaccacgccctgctaattttgtatttttagtagagacggggtttctccatgttggtcaggctggtctcgaactcccaacctcaggtgatccgcccacctcagcctcccaaagtgctgggattacaggtgtgagccaccccacctggcccaattcccccttttcctgcattctccagctcctcctcctcagtactcagtcccaccactttccccactacccagcaccagcatctagactgttctggtctccctgcaccccccacagccaccagagggagcacttttcaaagtacagttgacccatgaacaacacggtttgaactgaacgcgtccacttatatgtggattttcttctgcctctatcagctgtgagacaccaagatcaatccctcctcttcctcctcctctgctttctcaacacgaagatctttatgacgatctcttcacttccacttaatgaatagaaaatatattttttccaccaggcgcggtggctcacgcctgtgattccagctctttgggaggccagggcaggtggatcacgaggtcaagagatggagaccctcctggccaacatggcgaaaccccgtctctactaaaaatacaaaaattagctgggcgtggtggcacgcgactgtagtcccagctactagggaggctgaggcaggagaatcgcctgaacctagaagttagaggttgcagtgagccgagatcacgtcactgcactccagcctggcaacagagcgagactgcgtctcaaaaaaaacaaaaattcttccttatgattatttttatgtatttatttatttaatttatttacttattttgagacggagtcttgctctatcgcccaggagtgtagtggtgcgatgtcggctcacagcaagctctgcctcctgggttcactccattctcctgcctcagcctcctgagtagctgggactacaggcgcctgccactatgcccggctaattttttgtatttttagtagagacggggtttcaccgtgttagccagaatgatctcgatctcctgacctcatgatccgcctgcctctgcctcccaaagtgctgggattacaggcatgagccacagcgcccggcctatttttatttatttttagaaatcattttatctttttttttttgagatggagtctcactttgtcgcccaggctggagtgcagtggcacaatctcggctcactgcaacctccaactcccgggttcaggcgattctcctgcctccgcctcccgagtggctgggattacaggctcccgtcaccacacctggctaatttttgcatttttagtagagacggggtttcaccatgttggccaggctgatctcaacctcctgacctcaagtgatctgcccaccttggcctcccaaagtgctgggattacaggtgtgagccaccgtgcccggccagattattattattttgtagacagtctgtctttcacccagcatggagtgcaatggtgcctcgaactcttggactcaagtgatccttccacttcagcctcccaagtagctgggattacagctgtgtgccactgtgcccagctgagagtaggttttaatctgagcatgggggcagctatgattccccgtagcacctggggtgagaccaggtcctggctccactcaccctgccaggatctcgtggtctgacaccttcacactggacacgccatctctggcctcatccagcgtctgcactggctcaggcctccgtgagcggcaatcccaacagcggatactggaatcaatagagcctgtgaggccagcatgatggtgaggtcaggtttggagggggagggcagcaccctgggcccccgtgcttaggccccagactcaccggacaggataactgtggcctcttcattaaactgcaccgtgttcaccttctgagaaagttattgccactcagaggaggctggactttggaggactgggataaaggcagggttcccagtgtcggttaaagcaagggcgaaggggaggtgaaaggttttgggggaacagcaaggacaggggttggtgactgcctagcctggcatgcggagtgggggatcgtcatctggggaagggatccttacggtgtaatgggggt

SEQ ID NO: 8046 - DNA, 6000 bp, Homo sapiens
ggagataattctggttaaagattaataaggaagggacatactgaggcatagccgacatcccctcccatcatagctgggaactcagtttttaagatttcttttgggtttccatgttcaagagggttcaagtggtactcctgcctcagcctcctgagtagctgggattgcagatgcccaccaccatgcctagatactttttgtatttttagtaatttttgtatttttagtagagacagggtttcatcacgttggccaggctgttctcaaactcctgacctcaggtgatccacccacctcggcctctcacagtgctgggattacaggcatgagccaccgtgctcggcccataaacttctatactctaagcttaaaaattattcatgctagagtttatttatacaaatatgacagatagaagtgtatgcatgtgtgcactgttcacctaatttctgtgaaaatcttgcagacatacctgctgttctgtacctcaatcccttagcctcatatcttgcctcccttgacatgtgtgtacatagaggaagatgcattttaaatgatcccctttctcattgatttagaactggttgagtttgaggctcatttccgtagagtatctaccctctaatattctgtaaagcagggacccccaacctccaggcagcagactggtactggtctgtggcctgttagggactgtaccacacagcagaaggtgagcggtgggcaaatgagcaaaacttcttcggtatttagagtcgctctacatcactcgcattactgcctgagctcagtaatgctcagtcagatcagtagcagcattagattctcaaaggagtgcaaaccctactgtgaaatgcacatgcagggaatctagattgtgtgcaccttatgaaaatctaatgcctgatgatctgtcactgtctcccatcaccgccacatgggatcatctagttgcaggaaaacaagcacagggctccctgattctacatgacggtgagttgtataattacctcataatatattacaatgtaataataatagaaataaagtgcacaataaatgtgatgcacctgaatcatcctgaaaccatctttgcctctcctccccctgctgcaacttgtggaaaaattgtcttccacgaaactggtccctggtgccaaaagggttggggaccactgctgtaaaggcagagtgtgtgtgtgtgtgtgtgtgtgtgtgtgtgtgtgtgctgaggtctccatgttgggggacattcaagcagagactctcatggatgcagtagctgggctgtgtagagctcacttcttcactagatgggaggctgggctccacggattgttcagttcccagaaccagaacagctggcatctcccctgcaagaatccacctgtgagtctgccttaacacctaacaggtgttcaaattttctgttactacttcaccacagataactcttctggattcaggccaagcctcctgtgtctaggaggttgctcccctagccataatctacagccaaagagaacacgtggtgaggacaggctggacctttaggtcccttctctaatacagtgcaaggccatgtctctgccccctgtgggatccaggtcaaaccccatatgcagcttacacagcaactgcaacaacagcaggaacagtgagttgcacttgctgaacctttagtctgccttgtgcattttgcatgcattgtctttttaagtattatgacaaccatgtgaggtgggtgctgctgaaacgcccatttacagacgtgaaggagcacggcccggtggtgagggtagcacaatgtgaggctgggtgggaggtctgggtgtatagcccggctccaccagctgtgcaactgtgggtggtcacttaagtatcttccaggcttaatgtttcatttgtaaaatgaaaaacaaggtgactaatatacttaaaggacttaaaacaggctgtgtaggttatgtcggcaaatggtggtggccaccattcctgctctaggctgcctgctcatcccaggcacacaggtggtctacagtgtgccaaacccctctagccactgggagcgctttcttctgtgtccctataaccccgcctgttcatcaaactctggctttgctccctgagcctaacagggatggaactgccagtaggtgaggtctgtccttgcagagggagtagggattttgggggatgcaccctaccccactgaggctgtagggccaggagcctgaatcccctggttgattgagctggcagtggtggtggggtgggggaggctttggggctccccaacacccagccagtgtcaggagcactgtcttccctgccctcctgcttagcagctgtgctaggagccccatccttcaagcaccccctcacccaagtccacccggcagggcaattctggacaggatacaaggagggccaggaggggagccctgggtctgctgggtggagcatccggggtgtgggaggaggagccaggtgctgattcaaagacctcaagatatttcccctctgggaccatgacattgcctgagattcctccatttatacatgtccctgtattaatatggcattgaccctaatgaatgggtgcagaacagcatggcagaggaaaaaggtttgggcttgaggatctcacaaacctggcttcctgtgagctctgtaacttgggctagaggcctgccctctctgagactcagtttgctcttttgttaaatggatgcattcccttctctggatgccatcactcaggtctctccaacaatcccagggctctggctcagagaaccgaggggaggttggtgtgaaggctttgggcatggtgacgcgggtgagcatctgacatgagcaggtgcacttgacctagagtaggtggaacacagtaggcatgctttacctagagcccctgccacatagtaggagtgctttgtggagagtgccttgcacacagtaggcattctttatgtcaagaactttacatagagtagttttactttatgtggagcacttgacacacagaaaaaacactttatatagagcatctggcacacagtaggtgtgcattatgtagagtaccggccacacagagtcagagtttatgaagagtacccagcatccagagtaggcacgctttatgtagagcacttgacacacagaaagaacactttatgtagagcatctggcatacagtaggtgtgctttatgtagagtaccggacacatggagtcacagtttatgaagagtacccagcacccagagtaggcacgctttatgtagagcacttgacacacagtaggtgcacttgacatagatcaccaggcacgtagtaaacatgctctacatagaacatctgacacacagtaggtgtgttttatatagagcagcaggtgcagagtaggtacactttacataagttactccgcacaaatttcactttatatagaggaccgagaacaaagaagcaagattttctgtagagcgcccagcacacagtggacacacttttcatagagcacttggcacacagtacacaacatgtatacagagtacctggcacatggtaggtgtgctttatttagagtccagtacacagtaaaagaactttgcatattgtcttttgcaaagagcagagactgacacacagcagctaaagtgctagctgccagccccttcccttcactccctcctcagaatctttcatctgtccccatctaaggcccattttcctgtgatccctcctctgtccccctctaaggccttatctgacatcccatttcccagatgggaagcctgagtccaggaggggctcactacccacagttagggcaaggggagggcagaataaggactccactcagggtcccccatctctgccctcctgtccctggccccatccactcatggcccctctcagccttacctcccatctcccctctctgtcctcctatgctgaacctagcctccaggtattctcctccagcggggctctttatctctaaaatctgaccgggtaatccccagcacagttagatagtttgttcctactcctgtcagtcatgtctcgacccaggccctgggttgcctggaggcaggacttgaactcctgccagactgtgaagccagaggccaggagcttctgtctctgaatctcctaagtctgcactgagaaatggtgcatgatgaactcctggaccacatgtggagaggagctcagaacatgatctggcacaatggttggcctggccccactctcttgccacctgaactctcaagttcatgactttatctgccacactcttgccttggaagggcaaggtggctgtaaactttggggctcagagtcacctttgactcttcctcaagatcccctcccactcaggtgtgagatgttgagacctgcggatcctgtgcccatgctgtgtcaccctgagctggctcctctgcacccagctggccctacgccaggttttggttggttgcccaggcttggaagacacacccagtccatggggattggctcgaccagcccagcccagcctcgcctcccacagccttccggaaatcaggggccagaggcaaagacctcctagcagagggggagaggagggtatgtgggacaagctgcttctgataggagccaggctggcagtggcagggctggagggtcctggcctgggatggggaggggactgcccaaggttggggtgggtcaaggctgctggcctgggagactggtgatttcctggtaactggacccctggcaacctcccagtgattcaggctgggcctttttggattctaatcagcctctctctctctttccctttctgtgtaactggaggccacttggctgctggttttcattgggcatttctggactttagatctcagctcttgtttacccatctcagagccttccctgatctgcctccagcactgcccatccttgcccctttccactgtccttggagcttcctgggcccttccctgggcctcaggatcccaccctccatcccgtctgccctgcaggatgccgcagctgagcctgtcctggctgggcctcgggcccgtggcagcatccccgtggctgcttctgctgctggttggaggctcctggctcctggcccgcgtcctggcctggacctacaccttctatgacaactgccgccgcctccagtgttttcctcaacccccgaaacagaactggttttggggacaccagggcctggtgagtttgtcagcaggacgggtctggggtctcaggatgcatggagttcctgaggggcaggaatggggctcagggagctgggttttgagggtggctggggtgtgggaacacagagaagagagggaggcagctcactcattcctctgcccactcactcattcctctccccgctcactcattcctctgcccactcactcattcctctgcccactcactcattcctctccccgctcactcattcctctccccgctcactcattcctctccccgctcactcattcctctccccgctcactcattcctctgcccactcactcattcctcttctcgctcactcattcctctgctcactcactcattcctctcctcactcactcattcttctcctcactcactcattcttctcctcactcactcattcctctgctcactcactcattcctctcctcactcactcattcttctcctcactcactcattcctctcctcactcactcattcttctcctcactcactcattcttctcctcactcactcattcctctcctcactcactcattcttctcctcactcactcattcctctcctcactcactcattcttctcctcactcactcattcttctcctcactcactcattcctctcctcactcactcattcttctcctcactcactcattcctctcctcactcactcattcttctcctcactcactcattcctctcctcactcactcattcttctcctcactcactcattc

SEQ ID NO: 8047 - DNA, 6000 bp, Homo sapiens
ccaaggtgggcagatcacgaggtcaagagatcgagaccatcctggccaacatggcaaaaccccatctttactaaaaatacaaaaattagttgggcgtggtggtaggcacctgtagtcccagctactcagaaagctgaggcagaagaatcggttgaacctgggaggcagaggttgcagtgagccgagatcatgccactgcattccatcctggtgacagagcgagactccgtctcaaaaaaaaaaaaaaagagtgagtggagagctctctgctggggaagtccaggcagtggccctgggagcacagcacaggagcctcccaaggtggaggtgggttggagaaagcactccttgtggaggcaggaggtcactgggaggagaaggcatcagtggagtgtgccagccaggagtaaccatactggaagagcctgaagtaagagggaatgggggctgggcacagtggctcacacctgtaatcccagtactttgggaggccaaggtggatggatgacgtggatcaggcgttcaagactagcctggctaacatggcgaaatcctgtctctactaaaagtacaaaaaaattggccgggcgtggtggcacatccctgtaatcccagctactggggagtctgaggcaggagaatcgcttgaacccgggaagcagaggttgcagtgagccacgattgtgccactacactccagcctgggcgacagagcgagactttgtctcaaaaaaactattttttaaaaagagggaatgggggagccttatagaggatcagggcttcaaaccctggtgcgtcagtggcagctgaacagatctgtggagttaggaccagccccgggctgtggccctgagcagaggctcttaatgggggtgacggtatggggatggggctacccacaaataagccctgcccctggcgctctgataaccacctgcccccagccacccaccagagcgtcactggcacagcaaacaccactttcaaagtgttaggtggtatccctttgctgagggaggagaggggctcttccctgggcatctgtggcatgtggcccagctctagtctggcctgtgagcccttcttgatgacctcttcctgcaggtatacttgtcactcatccccatcatcagcggtgtcctgctggccaccgtcaccgagttgtcttttgacatgtggggactcgtcagcgccctcgccgccacgctgtgcttctcgcttcagaacattttctccaaaaaggtatttggtcaccatcagcggacatgcatggggtttcaggggtgtgcgggcagcaaactggtggcattgggaaaacaggcggagtagaaatttctttgctattagagcagaaaaatcttgattgccattctgctgattttctgtttgtcattttgctttttaaatagtttgtttttctggccgggcgcagtggctcatgcctataatcccagcactttgggaggccaaggcgggcggttcacttgaggccaggagttcaacaccagcctgaccaatatggcaaaaccccatctctactaaaaacataaaaattagccaggcacgcatctgtaatcccagctactccagacactgaggcacaagaattgcttgaacccaggaagcggggcttgcagtgagctgagattttgcatcactgcactccaacctgggcaagagtgagtctccatctcaaaaacaaaaaaaagtttttctattataaagttaatgtgctcaataagaaaaaaataaagaaaagctcttttattgagaccaaggctcactgtcgcccaggctggagtgcagtggcacaatcatagcttactgcagcctcagtcttcgaagctcaagtgatcctcacacctcagcctcataaagcactgggattacaggcattagccaccaggcctagctaaaaacttcaatttaaaacaagattttaaaacttgttgaagcctagtgcagtggctcacatctataatcccagcactttgggaggccaaggcaggaggatcacttgaggctaggagttcgagaccagcctaggcaataggaatagagtgagaccccgtctcaaaaaaaaaaattgctcttaactcctgtgataatcacacacttttcaggtaccacagttaatgcagtctctctattggaaataccacttatttccaacttttcattgtaatgtagaaacaatcacgtgtgtgatgttttcctgtctcagttatttcattatgataggcttacagttctcaggttagagggtatgaaacgttaatcactcttaatatggtttgtctggtcgtattttagaaaggttataccaattcagcctcaaaccagtggaatttcagagtgcctacttcacttcatcctcaccagcactgagtgttactgttttatttttgttttcttttctcagtcgtttatgcgtggagcatggtgcttgtttcaggcctgtgctgtgtatgtcctcacaaatgcacttgcaggtttggtgtccaagctcagatgtcagggttaatgtccagtcactgtgtttggggcctgagtcactggagccctttttgccacatatagttttaatcaccctctaaagaggctttccctttccaggtcttgcgagattcacggatccaccatctccggctgctcaacatcctgggctgccacgccgtcttctttatgatccccacctgggttctggtggacctctcggctttcctggtcagcagcgacttggtgagttgtacagcaccaagaacacgccattttcttggctagttccagaataggtgctttgttgaggagctgtagctgcatgttaacattgtggtatcttttgggcacctgacagccagcgctttcagcagtcagtcctctgtaatgcctcacggtgacgatgcacgccatcgaggaagtgggtttcctgtgtatttccttctctggtgtgcttgatcccaggtgctgatagctgctgtgtgtgcgccagtagcgtcaaggaagagaaggtgactctttcacctcctgacagtatagtccagatagcacattgactttttatttttactcattttttattttaaatgtttattttttagagacagaacctcgctctgttgccagggctggagtgcagtggcacaatcatggctcactgcagccttgacctcaatccggggctcaagcgatcctcccacagcctcccgagtaactgggactgcaggcgaataccaccatgcctggctaatttttttttgtttgatttttgtttttttactgtttttggagagacagggtctcactatgttgcccaggctggtcctgaactcctggcgttaagagatctgccttggcctcccaaagtgctgggattacagatgtgagccactgtgccttgccagccctggaactttgaaaactatgcactggccaaaaaaaaaaaaaaaaaaaaaaaaagccgggcgcagtggctcacgcctgtaatcccagcactctgggaggccaaggcgggcggatcacgaggtcaggagtttgagaccagcctggccaatatggtgacaccctgtttctcccaaaaatacaaaaattagccaggcatggtggctcgcacctgtagtcccagctacttgggaggctgaggcagaagaattgcttgaacccaggatgtggcggttgcagtgagccgagatggtgccactgcactccagcctgggtgacagagggagactccgtgtcaaaaaaaaaagaaaaaaacatgcgctgcctgggtgtggtggcttacgcctataatcccagcactttgggaggccaaggtgtgtgaatcatttgaggtcaggagttcgagaccagcctgaccaatatggtgaaatcctgtctctactaaaaatacaaaattagccaggcgtggtggtgcacgcctgtaatcccagccacttgggaggctgaggtgggagaatcgcttgaacccaggaggcagagtttgcagtgagccgagatcgcaccactgcactccagcctgggcaacaagtgtgaagctccgtctcaaaaaaaaaaaagaaagaaagaaaactgtgcagctcagttcctccctggtctctgtttccatttactccacgtcgaatctttttgccacctgcagggtctgccttcagagaatgtgttataaatgaatgcaagtgcctgcggtgaggaggaggccagtgcgattcttccagactcgagttagaaaggaaaagtaaatatttattgaggtcttaatgtggtctagctggatttgtgacatttcttatctttaatccttggctccacctgctgaagtagtggatattacctctattttcccaatcagtaaaccatggctcacttttctaactttcgtttcacattgatgagctgtaattcttctgtgaagaactttccatcttccaggactagtttgttaccttgaagtatggtacgagaaaggcagtttaatgcttaactgttccttttgatgactaattttcaggatagagagttggagcttactccaaatgttgaccagagttgagggtttgtttgggggtagggaaggggttctctttttttctccagcatcattgtgaacttttatgtgtttgtcagttgcatgaattattcgttttcctagtcaaattgtcctgtcttggccaggcgcagtggctccagcctgtaatcccagcactttgggaggccgaggtgggcagatcacttgaggtcaggagttcaagaccagcctggccaacgtggtgaaaccccatctctacagaaaatacaaaaatttgccaggcatggtggtgcacgcctgtaatcccagctactcaggaggctgaggcaggagaattgcttgaacctggaaggcggaggttgcggtgagctgagatcgtaccactgcactccagcctgggcgacagagcgagactccatcttaaaaaaaaagaagaaaaaaaaattgtcctgtcttagccattggagcccttctgattggctccttgcccttctagcactgtgggtcagcgtttctcccagcgggatgcccgccttcaccttgtgtacttcccatcccagagctgcagtcagcccctccttcaggactccaggtgccgttagtggggagcggtatttagagacacaatccaggtgccatgggtgctttttgctgctgggtggtcattgttgttaggcctttactgtgaaaaattaggaagtacacacttggggcagcagcaaagagttcctagcaattagcgtcactttcagttgaacagtccagatctttgctgttttgaatttcatatttagatctcgtcgctggtatgcttggttccgctcctcgtttcttagttgcttattctacccgttattcactgatgttattctactgtacactcactcatataattgcttcagaatgagcattctcacagcacaattgcaactggagtgctgagaaaaggttagtatttctttgcaggctgggtgtggtggctcacacctggaatcccagcactttaggagaccgaggtaggtggatcccttgaggccaggagttcgaaaccagcctggccaacgtggggaaaccccatctctagaaaaaatataaaaattatctggtgtggtggcgtacgcctataatcctagctactaggtaggtggaggttgcagtgagctgagatcacgacactgcactccaacctgggtgacaaagtgagactgtctcataaaaataaaaaaaaagaagaagtctggtcatgattcctgtactctccctgtcccctccctgaccatggataacatttcttaggctcctagttcacctgttccatatttttgcaaatataagcaaatttgcatgtataatcaccctctgtccttattacacacagagtagctttttattttattattttattttattttattttattttttgagacggagtttttctgtctcctaggctagaatgcaatggcatgt

SEQ ID NO: 8048 - DNA, 6000 bp, Homo sapiens
tgacagtcctaggttcccagtctggctcccccactcctgcactgtgtgacccgacaagtgacttaacccctctgtgcctcagttttctcatttggaaaatggcccagtgacatagggtccctggaggaatcaatgagtagcaagctcagagcctggtgctgggggagacttggatggatgggagtcaagacaatgatcaagacgtgaataataaccaccagttgaaagttgcttccaaaagacaaaaagatgtgaatattttgtttgtttgtttgttttcagatggagacttgctctgtcgcccaggctggagggcaatggtgcgatcttgtctcactgcaacctccacctcctgggttcaagcgattcttctgcctcagcctcccaagtaagctgggattacaggcgcccaccaccacgcttggctgattttgtatttttagtagagataggatttcaccatgttggtctggctggtcttgacctcctgacctcaagcagtcctcccatctcggcctcccaaaacgctggattacaggcatgagccactgtgcctggcctgaagatgtttttttaaagtggcagagagaggtgaggcaaaatcggcagctccctgcaaaggctcccggggaagctggaccacacagaactctcctggcaccactcccggacccttcggtccccgcaccatctgctttccacccacagctccctctgtgcctgctgttcccctgggagtggttcccacccagaggagtggaggttggggaggccccgaccccctgaaactgccctttaaaggtaatatttatggtatacccgtctgcgcttgcccaggctgggggatgctgcctccccaacaagctttagccccaccttgaggaaatcccattttggagaagacatagcacagcaggagcacccccatactggagggattaagagagacccgaagcagctgggtgctgtggctcatgcctgtaatcccagcactttgggaggctgaggcgggaggatcacttaagatcaagagtttgagccaggtgcggtggctcacgcctgtaatcccagcacgctgggaggccaaggtgggcggatcacaaggtcaggagttcaagatcagcctggccaacatagtgaaaccccgtctctacttaaaatacaaaaattagctggatgtggtggcaggcgcctgtagtcccagctactcggtaggccgaggcaggagaatcccttgaaccccggaggcggaggttgcagtgagccaagaccacaccattgtactccagcctgggtgacagaatgagactccgtctcaaaaaaaaaaaaaaaaaaggtggccgggcgcagtggctcatgcctgtaatcccaggactttgggaggctgaggcaggcagatcacctgaggtcaggagttcgagaccagcctgaccaacatggagaaaccccgtctctactaaaaatacaaaattagcaggatgtggtggcgcatgcctgtaatcccagctacctgggaggctgaggcaggagaatcgcttgaactcgggggcagaggttgcggtgagccgagatcgtgccattgcactccagcctgggcaagaagagcgaaagagtgaaactccgtttcaaaaaaaaaaggccaggcgcagtggctaacacctgtaatctcagcactttgagaggccgaggtgggaggatcacgaagtcagcagatggagaccatcctggctaacacggtgaaagcccgtctctgctaaaaatacaaaaaattagccgggtgtggtggcaggagcctgtagtcccagctactcgggaggctgaggcaggagaatggcatgaacctgggaggtggaatgagcggagatcacgccactgcactccagcctgggcgacagagcaagactccgtctcaaaaaaaaaaaaaaaaaaaaaaagagtttgaggccattctggccaacatggtgaaacaccatctctactaaaaaatataaaaattatattagtcgggtgtggtggcgctcgcctgtaatccagctactcaggaggctgaggctgtgagaatcgcttgtatccaggtgacggagcctgcagtgagccaagatggcgccactgcactccagcctgggccaccgcactccagcctgggcgacagggcaagatcctgtctaaaaaaagagagactcaaagggagaagaggggttggaggcacacagagaggagagctaaggggcttcctggagtagggggtgtcaaacaaagcctgcaggcacatggaaaacaccagtccatgcccagcaaacagcacgtgcaaagggaggtgagactcagcctgctgggcaccaagcccggttggaagttcgatgcccctggaattaaatgggagagaagtcagcatggaccacatggcaccagccccagggcttccaggaggaggaggaggaggaggagaaggagaaggaggaggaggaggaggaggaggaaaataagtggaagctgtccatgagaaagcaggatcaccttggagggctgaacctagaggagccaccccagtagcggcagagacaaaagtccagatacaggctctagcccttctctgccgggggatgctctgtttgtgggacctggtgttttgaaattcggtcatgtgtaaagcaaaggtccaagtaggagatgataaatgtaataagataatagtagtagtagtaataacagctcacgttacccggtgcctgcacacgttatgcgtgaggctgagtttaacccaaattgggaaggtctccacctcctccctggacccagggctgtcgcaaactggccgcccgcgggccaggccggatcctttttcagacctttcctgcacacagccaacagcacgcctcacattgtcaccaccggagaggacgccctgggctatgcgtctggattggccggtcagcacccgtttgtgaatggactctttggcctttggcctccaggaaatctgattggctcgcatcagcgatctaccccctgattggctggggtgctcctggaccattaacaaggtttccagtcaaaagagaccccaaactggggctgatgaagacaacaccttcacgtgccagattggttagaatttctctggcttcctggtgggtacttccctctttgggcctcagtttcttcctttgaaaagtggaactaataatagcactgaccactcgggctgttgggagaattgaatgcatgagagggcttagcctgttaatatgaacggttattcccactttactattattttattattattttaatcttcttccacttggacctttatttttatttttgagatagggtctcgtgatcatggctcactatagcctcaaactcctgggctcaagagatccttcttggctgggcgcggtggctcacgcctgtaattctagcactttgggaggccgaggtgggcggatcacctgagatcaggagtttgataccagcctggccaacatggcgaaaccccgtctctactaaaaatacaaaaattagccgggcgtggtgacatgtgcctgtaatcccagctactcgggaggctgaggcagggagaattacttgaacccgggaggtggaggttgcagtgagccgagattgcgccactggactccagcctgggtaacagagcatgattctttctcaaaaaaaaaaaaaagagagagagagagagatccttctgcctcagcctccttgagtagctgggactacagtcatgagccaccacacctggtacacttagactttcattccatgctccttcctggcttcctgccctttttgattcccccactcctgctcctagccctccagaggagtcttcccagcccctcaatatgggcatgtcctctcctgctccagcaccttccatagctccccatcaccctagggggaaagtctaacctcttcaaaatcagcactgaaggccctggaagcattaagtcctggccatcagcctctagtgctaagaaataggttcaagttcttgtttccccatataaacaggtaagaaaggctacatgcctctgggcctttgcacgtgctgtggcctctgcccggaatgccctcattcagtcggggaatccgtgctcatccctccaccttcgtggagggacgcctgtgctgggttggtttggagaggaagccggaactgcgtgggttcaaatcctgtctgactctgtcacctatactttgtgaaacccggacagtggctatgcttctctgaacctcagtttccccttttgtaacatagaacttaccatcaggaaatgtttgacccccccaccatggaacaggccccacttcttgacgtcagcagcacccccattcgcctacccggaggcggtttctctattttaagaggctgcgggcgggttggcatctaactggggctggaggcgggactgcccccccaccaacaccacgctgctcgccaatcccgccccgccccctcctttccgcccaagtcccccactcttgcctctggcctcagcgcctccagttctgccccacccccgcgcggccagagaccgggtgtctctgatctgcagctcagcccgtgccttccctgaccactcccgacctggcttcccatcacctgctgagttcgcagtcccgcagctaccggtgcggctccaggttggagacccgccggccccattcctctcaccccctcaacccgcccggagctaacctcagtccccgacccccaccccacctgctcagtcctccctaggttccagcttctgtcaacctctttcatttccctaaataccgccccccgctgcaatgcctcgccacccttggctgcctcctctaccccagggctcccagcaatgactgggtcaggcgcctccttcacttgctgtgagtcccttatcacaactgatcactccgtggggtcaccgctgctctggcgtctacctcccccaacaggttggggtttctaggagggcagctccagaggttgcagaacactccgctgcctctccagagccaggcacacagcaggcgctccataaatgttcgttgggtaagtgctgaatcccaggttccctacctgaaaacttggtggcttcttaagggtgtggtctaagtcccagaggaaaatggccaaatcttaattcctgtttttcttttcttataatggggacactgaggcccagagaagtcaaagggtggctgcccggggtcatgtagtccctgtgtggcttcaaacttaggcttctgctgtccccgacgcctgtgtccctacctcctgatgacacagcctcctaaacataaactcagtaaaaggaggaccctatggctcattggaaaactgaggcccagagaagcaagggtgccctccccccaggtcacactgctggttggcagcgccttgtgccgtaagagagctggttgagggcgcagatcgaatcccagctaggcgacctctggagagtggctttccgggactagagcctcagtttccttattctgacaaatgggcgcctgacagccccaacctccccaggtcgtcgtagggctgagctgagggtgtacagtggtgcagcgacgacccaaggaggtattaatacatatgaactcatattaatacatcgctagtaataggactaaaacaaccatgaacatatggtgagctctctggctgctgttgctagcattattattagaacagctggtggggaggggcagagccctcagcctcttcctcccacgccatcgcttggagcctcagtttccctagatgtccaagggggcaccttcccccttcccaccatgagaaaaagcactttgagaagcgggtggtcaaaaagaagcgatctgagcgttccccaccctctgcctcagtttccctacagcccgtgaaggccccgcccctcccggcacctttcaggccgcgtccacttggccgcgccctctgccttccgcccgcccgcgcaggggcctcacctggagcccgcggcg

SEQ ID NO: 8049 - DNA, 6000 bp, Homo sapiens
gcagctgcatgaggctcactgctggctgggctcctccatccctctgctccttataaaagaggccccaagagctcccctgctccctctgctgtctactgaggacacagtgagaagacggtcatctgcaaactaggaagtgaatctgctggtgccttgatcttggacttcccagcttccggaactgttgttcataagctaccccagtttacggcatatttgttatagcagcctgaacaaacatttggagacatctgctctctacccagggctgctcccaccacagggcctttgcacatgctgttcccactcctggatgctgttccccacatcccttcctccttactccctaaggggttccttgatcatcccattgaaaagttgcttctgcggccaggctcagtggctcacgcctgtaatcccaacactctgggaggctgaggagggtggatcacctgaggtcaggaattcgggaccagcctggccaacatggtgaaaccccgtctctactaaaaatacaaaaagttaactgggcatggtcccatgcgcctgtaatcccagctacttgggaggctgaggcaggagaatcgcttgaacccgggaggtggaggttgcagtgagccgagatcgcatcactgcactccagcctgggcaacaagagcaaaactccgtttcaaataaataaataaataaataaataaataaataaataaataaaagtttcccatctcatttcctgcccttatttttctttgcagcattcccaccacctgcacttgatatattttcccgatggattctgcctgttgtctgtttccccaactacagtgagaggtggggggagggggggctgggatttttgtctgttttattcactgctgtgtctgtggttcatagtacctggtatacaacaggaacttcataaaggcttacagaggaaatgaatgagtctttccttataggttcatagagatttataatttcattttcagaactttgtggcatgctaggatggatgaactgaactgttactaatgtaaccaatcctttaagttatttcctttttttttttttccttcttcttgaggcagaggatcactctgcactctgtcaccccaggctggagtgcagtggcacgatttcagctcacttcaacctctgccttccagactcaagcgatcctcctgccttaggttcccgagtagctggaactgtaaggatgtgccaccactcccagctaatttttgtgtgtgtgtatatctatctatatatatatataaaaatttttttttttggtagacatggggtttcaccatattgcccaggctagtcttgaactcctgggctcaagcgatcctcctatcttgacctcccaaagtgctgggattacaggcatgactcactgtgcccggcccattttattttttttcatgtaacaaacaatgctgcaatgaatcactttgagcctggagcatctttttgccttctctctctctctcttttttttttttatatgaagtctcgctctgtcaccaggctggagtgctgtggcgcgatctaggcttactgcaacctccaactccctggttcaagtgattttcctgcctcagcctcccgagtagctgggattacaggtacatgccaccacgcccagctaattttttgtatttttggtagagacagggtttcacagcgttggccaggattgtctcagtctcctgaccttgtgatccgcccacctcagcctcccaaagtgctgggattacaggtgtgagccaccacgcctgactttgccttctcaaaaaaacaaacctgcaacatacacacaacataaaattgaacattttagccaatttatttatttattattattattttgagatggagttttgctcttgttgcccaggctggagtgcagtgccgtgatctcggctcaactgcaaactctacctcccaggctcaagtgattctcctgcctcagcctcccaagtagctgggattacaggcatgcgccaccacacccggctaattttgtgtatttagtagagatggagtttctccacgttggtcaggctagtctcaaactctggacctcaggtgatccgcccacctcagcctcccaaagtgctgggattacaggcatgagccaccgcggccggcccagccatttattttaaattattttttagagatagggtcttgctctgctgcataggctggagtggagtggcacaatcacggctcactgcagtcacaaccttctgggctcaagggatcctcccacctcagcctctgaagtagctgggactacaggctgaagccaccatgcccagctaatttttaaattattattattattattattattattattattgagatggagtctcgctctaacgcccaaactggagtgcagtggcatgatctcagctcactgcaacctctgcctcctgggttcaagcgattctcctgcctcagcctccctagtagctgggattacaggcacgtgccaccatgcccagctaatttttgtatttttagtggagacggggtttcaccatgttggccaggctggtctggtactcctgacctcgtgatccgcccaccttggtcccccaaagtgctgggattacaggcatgagccaccacgtccaggctgagccacatttttttattcgttagtcagttcacactgtaaacatgcaaatattcaggcagggattcccagaagtggacttgctgtgtcagcaggcacatgagtttatcattccggtggcctgtgccagggtgccctccaccagtgctacaccatggacgcaccccacagcctggctggcacagaatgtcattgcattgttggatttttgccaatttgattggtgaagacaaacagtttgtgatttgcagttttcttattaagtgtgaacttttttttttttttgagacaggtctcactctgttgcccaggctggaatgcagtggagtgatcttggctcactgcagcctccacctcctgggttcaaacaattctcctgcctcagcctcctgagtagctgggactacaggcacataccaccacacctggctaatttttgtattttttaaagtagagacggggtttcaccatgatggccaggctggtctcgaactcctgggctcaagcgatctgctcacttcagcctcccaaagtgttgggattacaggtgtaagccactgcacctggcaagaatgagcatctctggacatgttgaaaagcagtttcccgctttttcttcaaggtctccgttcaaagcctttgaccatttcttggagtttggcgatgtgaaggacagaggccgaaaagaggggaaaacgtgggggagtggactcccagcctcccagatcccggagaagcctctgtgcatttgacagctgtggacatggtgtcacacgcagttaaggtggcacagtgagtcgggctggcataggttgtacctggtccacctgacaccaggttcaggtgaggccttctcccagcccacccctcctcagtatcatttttgtcactactacccctccagtctgcctcaggcccccatctgcttctgggacctcagcctcctccccaagttgcccaccccagacaccaggctcactccagagggacttcttgagccagtgcccctctgcccacgcacctgccttggctccacatggacctcttcccccaccaccaattccttctatcctctccactcctaaccatgctatcccagccagctacattttcccaagctgctgggagccctcctcactgtcccctccagcatagaggtgccactgtgcaagaactcagtgggagaggcttggaggagcttggagagccaatgataggtttggggaatcttagtgaactcctactcatgcgttgaagccccaactgtaatgcctcctcctccaggaagccttccaggaccctgtctttccctctggaccttccttaactgcatgggactaggagtgtctatgtccagctctgtcctctcttaagatagctccttgaggacctggtcagggctgaggcctcttgggggcccagcgtgggtgatgcttgttgaatgaataaatgactgcatgagctgggaaccagccaagctgagatcaagaagcgagttgatgaggtggcagtcggttggggtgctaatagaggacatgaagtcactgggttctagcaagagggaagcgggactctggtccacccctccctcttgccctccatccacctctggtgagaaccttgaggccctgcaagggggcggatctctgtcttcattcttcccctctgcactccacccagacaccagttcctcttccccctgagtcgctgggtgcagagccagaggaacgccagcgaccccagcagcgctgcggacggtgctggccgtggccgctgcggcccccgtgtccaggtgggccaggacgcagcctctgggcgccgtcgcttttccagcatcgcagaggcaaaagcgtggcagtgggacccaaaaggtaggactgaggctctagaacttgcacctgtgcagggactgcaaaccagacctgggaggaccctttcagcagcccccactccaccctatcccaggacttcccagcgacccgccgttctgggagataccgggagcgtgatcagggggcggggccgtttccaaggcaaccgcttatttgcatagggtcccgtcctggccaacgagggcgccccaaatgttcaggacatagaagaaggggttaactggcccggatctcctcctcgccttccaagcccgctaagcactggggttatctacccattccccagaaggggagactgaggcagcccaccagccaaaggaggcgaccagactggggctgcgttttaccatttcagaagcggcttgagctggtctgagctataataataaacactggcggtggaggcgagggcgaccacagggctgaggtcagggctaggattccggtgtctctacgtaggttgcttgaatggggggcaccctggcatggacgctgctgttgccgctgctgctgcgggagtcagacagcctagaaccgtcgtgcaccgtgtcctccgcggatgtggactggaacgcggagttcagtgccacgtgcctgaatttcagtggcctcagcctgagcctgcctcacaaccagtctctgcgggccagcaacgtgattctccttgacctgtctgggaacggcctgcgagagcttccagtgaccttctttgcccacctgcagaagcttgaggtcctgaacgtgctacgcaaccccttgtctcgtgtggatggggcgctggccgcccgctgtgaccttgacctgcaggccgactgcaactgtgccctggagtcctggcacgacatccgccgagacaactgctctggccagaagcctctgctctgctgggacacaaccagctcccagcacaacctctctgccttcctggaggtcagctgcgcccctggcctggcctctgcaactatcggggcagtggtggtcagcgggtgcctgcttcttggacttgccatcgctggccctgtgctggcctggagactctggcgatgccgagtggccagaagccgggagctgaacaaaccctgggctgctcaggatgggcccaagcccggtttaggcttgcagccacggtacggcagccggagcgcccccaagccccaagtggccgtgccatcctgcccctccactcccgactatgagaacatgtttgtgggccagccagcagccgagcaccagtgggatgaacaagggtaagtaagccactgagacacctgccaaagtggtgaataataaggctccacacccagatggccgaggttcaaatcccagctctgccgcttgaaggctgtgggatcttaggtgagtagctttacttctctgagcctcagtctcctcacctataaaatggggagaggactggacatggtggctcacacctgtaatcctagcactttggga

SEQ ID NO: 8050 - DNA, 6000 bp, Homo sapiens
gcttggaccttgtatgggaaagaattaatattggagaaaaaactgaaaaagtaagtatatcgaactgtatcatgggacagaaacatgtcattcctatttttactgaagattatcttatttgatactatgtgattattaagtcctattacatttcctttctccttttacgaagtcatgtatcttaataatatgcagccgggcacggtggctcagcctgtaatcccagcactctgggaggcccaggcaggcggatcatgaggtcaggagtaggagaccagcctgcccaacatggtgaaacaccgtctctactaaaattacaaaaattagccaggtgtggtggcgcatgcctgtaatcctagctactaagaaggctgaggcaggagaactgcttgaacccaggaggaggaggttgcagtgagccgagatcacagcattgcgcctgggcgacagagcatgactccatctcaaaaaaaaaaaaaaaaaaaaaaaaaaaaaaaaaaaaaaaaaaaccagagccgggcccggtggctcacgcctgtaatcccagcactttgggagtccgaggcgggtggattacgaggtcaggagttcaagactcagcctggccaagaaggtgaaaccccgtctctactaaaaatacaaaaaattagctgggtgcagtggcaggcgcctgtaatcccagctactcgggaggctgaggcaggagaatcgcttgaactccgagggcagaggttgcagtgagctgagatcacgccactgcactccagcctccagcctgacaacagagtgagactccgtctcaaaaaaaaaaaaaaaaaaaaaaaccagaatatgcagtgggtggccgcagcgggtcacacctgtagcactttgggaagtcgaggcaggcagatctcttgaggccaggacaggagttccagaccagcctggccaacatggtgaaaccctgtctctcctaaaaatacaaaaattagcaggcatggtggttcatgcctgtaattccagctactaaggaggctgaggcaggagaatcatttgaacccaagaggcagaggttgcagtgagcctagattgcaacactgcactccagcttgggcaagagtgagactccgtcccaagaaaacaaaacaagactaggactgggcaccgtggctcacacctgtaatcctagcactttgggagactgaggcggccagatcattagaggccatgagtttgagaccagactggccaacatggcgaaacccgtctctactaaaaacacaaaacattagactgggagcgctggctcacacctgtaatcctagcactttgggagaccaaagtgggcggatcacaaggtcaggagttcgagaccaacctggccaacatagtgaaaccccatctctactgaaaatacaaaaaattagccaggcatggtggcacgcgcctgtagtcccagctacccgggaggctgaggcaggagaaccgctggaacccaggaggcgtaggttgcagtgagctgagatcgcaccaccgcactccagcctgggcaacagagtgagactccgtctaaaaaaaaaagtacaaaaattagccggagcggtggcatgcgcctgtaatcccagttacttgggaggctgaaatgggagaatcgattgaactcggaaagtggagtttgcagtgagcggacatcgcgccactgcactccagcctgggcgacagagtgagacttcatctcgaaaaattaaaaaaagaatatgcaacaatataagctacaaaatttaaatatccaataaattttaagtttaaataaatttgctgtatcagaggacaaaaagaaacataaaatagttactgtttgtcacacatactgtttaatcctactaattggtactgttaagtagtcctattgtggttttgttcaaatagcatttatgcaacagtacagttaataatatagaactatataatttcttttttttttttttttcagacagagtctcgctctgtcgcccaggctggagtgcagtggcgcgatctcggctcactgcaagctccgcctcccaggttcaggccattctcctgcctcagcctcccgagtagctgggactacaggcgcctgcaaccacgcccggctaattttttgtatttttagtagagacggggtttcactgtgttagccaggacggtctcgatctcctgaactcgtgatccgcccgcctcggcctcccaaagtgctggaattacaggggtgagccaccgcgcccggcctagaagtatataatttcaagtaaacaccagtttttcattttttatgttaaagtggtaatttctttttttttttttttttttttttggagacagagtctcgctctgtcgcccaggctggagggcagtggcacaatctccgctcactgcaagctctgcctctccagttcgcgccattctgcctcaggctccggagtagctgggactacaggcgcccgccaccacgcccggagaattttttttttttttttgtatttttagtggagacggggtttcaccgcgttagccaggatggtctcgatctcctgacctcggcctcccaaagtgctgggattacaggcgtgagccaccgcgcccggcctaaagtggtttttgtaattcatttttcttttttttttttttgagacagtcttgctctgttggccaggctgaagtgcagtggagcaatcttggctcactgcaacctccgtctcccgggctcaagcaattctcctgcctcatcctcccgagtagctgggattacaggcatgtgccaccacgcccggctaatttttgtatttttagtagagacgtggtttcaccatgttgggtcttgaactcctgatctcaggtgatccacccgcctcgcctcccaaagtgttgggattacaggcgtgagccaccgcgcccggctagtatttgtaattcttatctatcacattaaggctcttgtccggtgtggttgtgttccggggcggtccccgaccccgcccctcacaagccccgccccccgcaccgggccccgcctcctgaactccgaagctcccgaccccgcctccgcagggtccaggcttcgcccctggtgacaggtggtgctggtgtagtcaaggaggagggctcgctttttttggttcaggttgtcatggtggcgcccaagcccgccttgccggccttgtcttttccggtctcagtccggcgtggcagcggaggcaggcaccgttaggtcttccagtccctctctgtcatggcgacgcccagcctcttcttccggccacagcctgtcatggcggcacccgaagtagtccctgccggggccagcctgttctgttgccctggctcttcctagtccaggctgccatggcggcgctcagggcttaccggaagtaaaacttcggaagtgaggcgttcctctgcccggaagtgagcgcggcgctaggaaagatggcggcagcggcggcggtgggcaacgcggtgccctgcggggcccggccttgcggggtccggcctgacgggcagcccaagcccgggccgcagccgcgcgcgctccttgccgccgggccggcgctcatagcgaacggtgacgagctggtggctgccgtgtggccgtaccggcggttggcgctgttgcggcgcctcacggtgctgccattcgccgggctgctttacccggcctggttgggtgccgcagccgctggctgctggggctggggcagcagttgggtgcagatccccgaagctgcgctgctcgtgcttgccaccatctgcctcgcgcacgcgctcactgtcctctcggggcattggtctgtgcacgcgcattgcgcgctcacctgcaccccggtaagtgtgtacacgcgagcccgacccccagcacggtcgagcctcgccgtgggtcccagctgcggccttcctgtcggtcaccatcgcgacctgggccactcatctgcctggcctggattcccaggggcaccctctacactttggcgcaggcttaatcatgaccccactgctgacttgctgtgcatgcctggtgcgggttatttcctttttctgaagtcctccctgttatggtcatttagattcagtgatgtaatacttgtaaaaggcttagcgcagggcccagcatacgtcgcccaggtcaggtaggagttgtttatactagttcccatattagcgactactcttgttctggaaacggccctaccttccatctcatctgtctcctaccttggttttcaaagtgtaaggcgagatcactgggataggtttcccccatctatgaagcttagttggttcttagactgaaccaagtcttgctgtccagtgcttagtggtcttccatactgtgatggaaaggagcatgaaatgcagttaattacagtgttgaagagaggcagaggtgtttatgagcgagtcatttacatgatgtctttccgcaaaatgagggtggtgatactgagttctgtcggggatacaacagcaagcaaggtcgcgctcctgacccacagtttagagttctgagtgaccaagtgtcgtcggaggagttggtgactgtgagcttccctgggcctgaagcagtgactgtgtcgtctctctctgggcctgcctcaggtgacaccagcaggtttggagccatggacactgaggtatatcaggaagcttcccctctgattccaggagtgtgtttgcctcaagaagaggaaaagggaacagcatcaagggctacagaaagacagaagccccccaccctggctggctctgaatgtgggtagaatcctcattctcctctcctgagagacaacctgttctgtccttcaaaaagacttatctatcccaggggaggagctcaacgtggtagctttgaggtagtacaatgaaagacaccaatgagggacaaaataaaggaggggttaaggggactgtggcaccgctcaaacttcagctgccttttgacctgcagctaagcagcttagctcttaacttcctctccagggatggagaagtgggaggagctgaacagccatcagccaggagaggtggatctgggtttgattcagatctcagaaagggccgcttctgctctctgagtttcagtttcccccttctgtaaactgagaaccgtaactaacaactactgggtgccatcttgagaagcggagatgatatctgcagagtgcccgccctggggccatcacagcgtatagcctcttgtacctttcttccgtgacgtcacgtttgtagttatgtgattgttgttatttgctgcctgctttggaggcccatgaaccacccgtgcggtggcgctttgtttctgcgggtcatcattgtgctccccccatctccatgcagctcgtctccatgcagctcggtctagcagagcagcagaggaatggatggcggttcacggggtccagggagcactgaacgagttccattcaacatttctgtgtcttaggtgctggggaaacagcagtgaacaaaacaggcaaatccccctgcctttgtggtgttactgggagggagaactcatagtcagcagttgatgccaaacagagatgacatctaacatcaggacaggatgggacattgccgggaactttagatggggcagccagggaggggctcctgagaaggtgatgtttcagcaaaagcctgaggcagcaagggagctgtgtgactgtgtattccgggcagagaaaacagcacatgccaaggccctttgctgaggcacgatcgagccccatgtgcgtgtggagctgtggagtgtagtgagcagggttggtggaagaggcagagctgagcaggaggccgggggcctgtgatggggcgggggcttggctcacgtgaattgaggacgtactgggtgggtgcctggcagcgttcttcctatttgagttcatgtcaccttcagcagagcagagccctgggcattaggtgctgtctgtgcacccagcttcccagctttttttgttgttgtttttgtttttgttttgt

SEQ ID NO: 8051 - DNA, 6000 bp, Homo sapiens
gaaatgtgaaacacagacatttcactctctggccacaacaactagtaccccaactcccccactgcttcattgccaatggcatgaggggtatactggccaactaggtctttggttaagcttccaaaaagtgcaaacactacagaaggtcaagtctccctcctattaaaagacttttttttctaacattttgaaatcctttgttacatgtttacatggaagtatttgaagaaacacaagagagtacaagcagtttttctaatgtttcataaagaaaaacaggtggggcctagcagtccaaagtggtgattaacagcatgaaacttacattcacagccaggcatggtagctcatgcctgtaatcccagcactttgggaggccgaagtgggcagatcacctgaggtcaggagtttgaaaccagcctgacaaacatggtgaaccccgtgtctactaaaaatacaaaaatgagctgcgtctggtggctataatcccagctactcgggaggctgaggctggagaatcacttgaacccaggaggcagaggttgcagtgagccaagatcgcaccattgcactcgagcctgggcaacaagagcaaaagagcgaaactccatctcaaaaaaaaaaaaatttaccatcacacaagaccatactaagactctacactcattagctgtgaaatgcagaagcaagtcacttatgaccggctttgggggaacttatctaactcatttgcaaaatggagatgataaagctaacctcagtcttgcaatcaggagttcaattaagattatgctcataaaaagcttcctgcagttctgggggttttttcaagcagataaatggagctgggataggactgttttaatccaaacacagatgagcacaggaaaatatcacatgttcacgtgtatgcaacatggcccacaagtctgcacacacacaccagaatgaacacatgaaaacatccacatactggccgggcacggtggctcacacctgtaatcccagcaccttgggagtcccaggcgggcggatcacgaggtcaggagatcgagaccatcctggctaacatggtgaaaccccatctctactaaaaatacaaaaaattagccaggcatggtggcaggcgcctgtagccccagccactcagcaggctgaggcaggagaatggtgtaaatctgggaggcagaggttccagccgagaccatgccactgccccccagcgtggggacagagcaagactctgtctcaaaaaaaaaaaaaaacaaagaaaaaaacatccacatacttatatgtagtcacccaattgtgaatgtatacacacaaatatgaatatgcagcattcatcttgttctacacagaaatacacatcgtagacacccctaaatcatgtgtgcacacatgctgtatgcagagacagacacagattggcaagcattgagaaacagtgccacaccctgtcaggcacacacacacatgtgcatgtgcagacataagttggaatggatacccattatcaagcacaaacatacacaccacaaagcctggtgcacacataaattcatgtatcaacatgaacgtgctgaaacatacatgcacgtagacactaaaagcatgcacccagaatgacacacacacagttgtataaatgaggataaacatggcagaggcatccaggagaacccactggacaaaatggcacaaaacaaagatgcacgagcacacagggtgattgaggggaacactgacttgcagggaaggagaaagagaaagatagaaagatgggatccaagacaagcatagacagacaggtgggcaaagtcctgtgcagggctccagggccaaccagaataacctgagagtctaatgctggcctgtccttccgcagatactgcctaactcagcaccacactccaggaggccatgaaggattaatttcctattcacagctccatggggtaaagcttggctgtgctgaggaagggatggcgaaggaggttcccaaagactctgtccctttcctccttcccaaaggaaaagatttgtgagctttagactagagaatgtaaaagcaaggaatgtgcttagggaacatctcatcaatctgcttcatcctacagattaaagagaacaactaccattcattgagcacttactgccatgtacctcatctgcattaacacatatacttctcccctaaatagccaaagaggtaggagctgttcttggctccataagactcagagagatgaagtcagctgttcaaagccacacaacaaagaaaggataaggttaggattccaatccaggccttaatcattgcaccatccattcagaaagggaaactgaggcccagcaaaggaaagggatcttcctgggctcgccactaactcactctgaaagcctgttcccaagacactgcccactgggacaagtccctcccacatgatttcagacaccattctctcactccatgctctagggtaatcaacaagtccaaaattcattgacctctatgtccacaaatactagagttctcccaacctgtctctccccatcccctccctggccaggtcatggcaacctgctgatcactcagtgcacttcttagtgccaaccccactgagaaacaaactcctcagatttctgtctcccacctttttaagaaacaagaaggaaaaggaggagccaggcccaggtgcaggctggtgaacaggattagagggattgatatctgccaagctggtgctaatcttcctttccacctcttcccctccaaaatcaacaaacaactttcctctctctgccttgttctctgacctttgttccctccacacaggtctcagagctcagcatcctagaacagtttgagcaagatgtcagtcctgggggtgccaacctcacccacctccacttgtccaaagttggtgacccagaggacaggtgcaaccctaaatggtccaaccaccagagcctgtcctgtggccatctggggcccctctcagggtctggctgaggctcatctcagacccacataggaccaatatcagcacctgcctcatgctcatgtcagagcccactgggaccaacctcagaccctatatggtgccacccttatgccctcctgaagcaggacactcttatgccctcaatgacacctgagacaacacacagagccctcttggcaccaaacatgacttcaatattctcctggtgtcaagttcagtgccaacttgtttcccatcctcgcatacacctgggggcagtcccaaagccaacacgatgcctttccctccctggccatacctgatgctgatatcagaacccgccaatgtcatcagtgtgtccactgctgatgccagtctcagcactcacctcctgctaaggctggcccgcacttgactcccagggtgatctaggccagtcaatgaaggggggcgaggagaaagttcacatcccagctccctcacttactccctgtgtgacctcactcaagagggtttatggagtctagatctgctcatcttcaaaatgaggatgatcacgatgaaccaacctcactgttacaaagattcaaccagatcatacacacctagacttaatcttcccatatatgaccatgctcaccaaagggtaactgtcctgtttactaaggaagaatttccctgaaggaaggacaggagggctactcatcccttctccactcacacccaccccaggatctgcctctgtgcctaacactggagtttaccccaatctcttctgcgactgttccctctgcctgctaatagtagtagcccctgacaaagcaggaatcgcccttaaaggagacttaactcaccctcaaatgtgatcttctcttcccaaacactccctttccactggcaggaaaaccaaatccagaaaggggaactaagtacacagagcaggagagatgggagttcagggccactcacacatgtcccctgcccactgtctgttttctgtcctctgtagatctttatataaaatgagaaacataaacaacaatcataatattaatagggatgatacaatcaatctagtgggtttccctgaggatctgggttggaaaccagcggacaacccttgggacacttgagatttttccaccatttgggggttgttattactatttctccagacctagccaatccctctgccaaccgctaactccaggtactcttctccaggtgtggggaaagttcccctgaaatatggccctggtcttccacccctttcccaaccagagatgggcagtggaggttccatggcacccatcctggcctcactctgaggttccaatgaggattctgggcatcaagagatagctctgggcaaaagcaaaatcaagtcagcccctgggcccattgctgggctgctgggctttctgggagcacctgctggcttgctacacactcctcctcccagaaactccacacccacagccctgggtcttcctagccccgagactttcaagtccatatgcctggagtcccccctcctgagacccttaaccctgcatcctccgcaacagaagacctccagatgcacagccacacttccatctcaccctaataaaacccagacctttggattcctctcccttggaatgcccaaatccacaactttggggtgcattctcactctcagaccccaaatccaaagcccaagtgctcccctatgcaaatattccaaactcttcagttctacagtttatcggttgccccctcctaaatccacagccctgcggcacccctcctgaagtaccacagatttagtctggaggccccctctctgttcagctgccctggggtccccttatcctcccttgctggctgtgtcccaagctaggtggcattcatggtggggcgtgtagttgggaggtgaaataaggtgattatgtaattagccaaagtccatccctctttttcaggcagtataaaggcaaaccaccccacccatcaccatctgtcatctcactaccaccatgctggcctcagggctgcttctggtggccttgctggcctgcctgactgtgatggtcttgatgtctgtctggcagcagaggaagagcagggggaagctgcctccgggacccaccccactgcccttcattggaaactacctccagctgaacacagagcacatatgtgactccatcatgaaggtgtcccaaggcaggaagatgggtggcacagggtgggggctgcctagttggctggggctttgtggcaggggattgaccagtgtggaccagagtcttaggaaagggagttttggagtttcagcatccgggtcctagccaggaaagacaggatcttgggatgtccagctccctgactgtgagaacctgggggtgaaggatcccagtacttgacatctcggtgctgggccccattcagagtgggggctgctccctctaaccactcccactcgcctccatcagttcagtgagtgctatggccccgtgttcaccattcacttggggccccggcgggtcgtggtgctgtgtggacatgatgccgtcagggaggctctggtggaccaggctgaggagttcagcgggcgaggcgagcaagccaccttcgactgggtcttcaaaggctatggtgagggggtgcccaagatggggaaggtggccaggcggacacgatggtctcagtgttgccagccttctccctgactctcctgcccactggaggctatggcagaacccccggtctggtcttatctccccatctcccttcactgtggcctctccatgtgtatccctcacctgtctccagcgtccctgtcgtgattcctccctgcctctctctgccccacctccttattctctctcactggagtctcctctttcccctctctctccatctctgaggacatcctgggtttctgttttccagccctggtcctctgtcttcatttgtctttttgttgctctcagcttctgtgcttctccatgtttctcctctctcc

SEQ ID NO: 8052 - DNA, 6000 bp, Homo sapiens
gtgtcacacactgttatacatcatcatctccagtttacatatggaagaagaaacagagtcacagaagtaaccggtgttccagggaaactaattctagaatctgtgttctcaacacaacactcagtccaagctcctcccacctcagtggtacagcccccagcctcaaaacctgtaaataccatacttggccgggcgcggtggctcacgcctataaccccagcacttagggaggccgaggcaggcggatcgcttaagcccaggagtttgagaccagcctgggaaacatagcgagaccccgtctctacaaaaattaacatttagccaggcgcggtggaacacacctgtgatcccagctactcaggaggcttaggtgggaggatcacctgagcccgggaggtcgaggctgcagtgagccgtgatcgtatcactgcactccagcctgggcaacagagcgagaccctgtctcaaaaagatatatatatatatatatatatatatatatatatatatatatacatattttttttttctttactgtttttagttcgacccctcccctctggggcttcgcttattttctcttccaggccccgcccatccaggattcaggcacacagctccagacccttctaattttcgcagacctggaatcgcctggaatccgaccccacccagttatatttgaataattccctgttgctttagccctgcccacgtttgagctcctccgcgtgccccaaaagtttctgaatcgtttcattcggccccctttctcgctccctctgcaaatctaggctcggaccctacctcagagcattagaatctttccaccccctcctcaatggcaccccgagcaccaccccaacccacccagggatccacgctctcatcctctctgccgtggctcgttcaccatcctctcccaagtccctcgccagactccaggcctccttccctcttcccctaaaggctgcgccctctgcgatctaggccccgcccttcaggccgctttcccctccttcctggctccgtagcccaccctcttggttccgcccctttagtaagaaggccacgcccctccgcctgatcctcggcgtttccccgcccctcaccctccctctggtaccgccccgcccgtcttctggccccgcccccggccgcgcgctgcagtgccttccccacctcggccccgcccgcccccgccgagccgagcaccagggcggcggcggcggcggcggcggcggcggcggctggagcagcccgggaggaggaggcggcgagaatggcagcggcgtcgtgggcgcggcggagatgagcgcccgcgaccccgggcccagggcggcacagccggagtgggcgggggtcccgatgcaggcccgaggggggccatggggcaggtcctgccggtcttcgcccactgcagtgagtagaggaagactggggcctggtgtgggccccagaggttcaggtggggtactccccggtgtcccctcggcgcttgcccgcaggagagccgggatggggggaggaggcataggagacaaaggaagctctcccctcccccgcgctctggcggcgacgggggtagcctgacccggaggacctggacgaaacagggcggaggtgagggggcactgagacagcaggcggggggcgcgctgcgctctgggacgtaccgcccggccccgcccgggagcgaggacgcgcgcggggagctgtcccctggctctggtgctggccgcagctggcggggagggggttgaacggagggtagagccaggatggaaaacaggggtctggctcccaatcacttgccttcgcatcccatccccgttttctgtccaagaggcagccccgacctcgcccaaactgtccaaccctgtcccgggaaaacagccatccgtggtttgggggcaaggactcatgggttcttagcggtctttaccactggttaatggtaatcctggggaagacccacaccattccaggcctcctattccccagctgaggaaacgaggtgagggcacagggcgtcagatttcaatttccaaaccgcattgagcatcatctatgtgcaaagctctgaactagctctaaggggctggattcccagctgaaaacgcctagcctcacaatctctgagctcacagctataacagtccatgtctaccgttctctgtcccacacatgggggttctgacagctggggatttcaacacccttagatctagccatttccatgtctcgcgtgtccagatgccaaaattctaagaattggtgatttcagcattttcgagtatcatcccaacattctatgatcttgtcgttaacttcagattacaaagggaggaccacctcgtctgtctctccccaccgcccttacctctctgttctcacctcccactcctctcctcctcagtcactcttctccagtcatatcttcgcacctctcagttcctcagatgccaagcatggtgcctggctcagggcctttgcactggctttcttctctacctggaagacgtccctgaacatctgcatggcttcctcacttccttcagatctctgctcaaacgtcatcttatcagagaagccttcttgaccaccctatgagaaacagcaccccttcactttctcttcccctacccttctttactttgctccctatgctcatctgcacccgacgtcatatattcacttgtttattgtttgtctatcccaaagagtgtcagctctaggagggcagggattttgtctgttttcttcacagctgtatccccaggacctagaacagtgcctggcacatagtaggtgctcaataagtggttgttgaacgaatgaatgaattgaaacctcctaagattcctactttgaagactctaagattaagattcctggatttggacttcaaagactctgagcttcatcaggcagtgatgctaggttttagagtctgtgtgcagaatgttctaaaaatcccgtgattcaaatattctaagattccaggactgggacacttctgtgattcggacagtctaagcttctaagagtcttcgattctttccctctcgcagaagaagctccgtctacagcctcctcaactcctgattccacagaaggtaagtggtggggagcatgtgaaggggctcagggctgggcagctcagggacctgctgagggaaacaaggctctccttcacccactgcaggagggaacgacgactctgattttcgagagctgcacacagcccgggaattctcagaggaggacgaggaggagaccacgtcgcaggactggggcaccccccgggagctgaccttctcctacatcgcctttgatggtgtagtgggctccgggggccgcagggattcaactgcccgccgcccccgcccccagggccgctcagtctcggaaccacgagaccagcaccctcagcccagcctgggcgacagcttggagagcatccccagcctgagccaatccccggagcctggacgacggggtgatcctgacaccgcgcctccatccgagcgccctctggaagacctgaggcttcggttggaccatctgggctgggtggcccggggaacgggatccggggaggactcttccaccagcagctccaccccgctggaagacgaagaaccccaagaacccaacagattggagacaggagaagctggggaaggtgagatgtccgaggtgctgggaccaaagccaagaggggtgggtggtttctccttggggcacctccaagaagaaagctcacggcctcctctctctaccgtatcagaactggacctacgactccgacttgctcagccctcatcgcccgaggtcttgactccccagctcagtccgggctctgggacaccccaggccggtactccgtccccatcccgatcgcgagattcgaactctgggcccgaagagccattgctggaagaggaagaaaagcagtgggggccactggagcgagagccagtaaggggacagtgcctcgatagcacggaccaattagaattcacggtggagccacgccttctaggtaagcaacgtgtatgaagatgctgcattggcccacagaaggcaaaaggtgagaggattttgaattaaagggaccaacctcgcaaaggaacagtacatagtggaaaagggaagagatagacgtgatatcacatctggctagacgtgataaactccgctttttaaaaaaatttccccggccgggcgcggtggctcatgcctgtaatcccagccctttgggaggccgaggcgggcggatcacttgaggtgaggagttcgagatcagcctggccaacatggtgaaaccccgtctgtactcgggaggctgaggcaggagaatcgcttgaacctggaaggcagaggttgcagtgagccaagatcgcgccactgcactccagcctgggcgacagagcgagactccgtctcaaaaaataaaaataaaataaaataatcctccctcttctggagtgctcctcctagtggctgattttggacaggccaaatccctgaaaaaatacagttctctccttatttagatgtggccgtagaatatttataagtaaactctgtgccttttaaaaactcttctttttggccgggcgcagtggctcatgcctgtaatcctaaacactttgggaggccgaggcgggaggatcctttgaagccaagagtgcaagaccagcctgggcaacatagggagactcgatctctatttgaaaaaacaaacaaaaaccctctttttcctgaccacatctattggccagttgtaaaatgacccagccttactttaaaatatgctccgcctccaggaacagctatggaatggttaaagacatcattgcttttggctgtttacaagacggttccaattttggaattgtccccacctctgtggacagccattggctgggtccaaaggggccccaccccccctactcctgtcctccgggttctactgaagtgggcaaaatccccgagaagcagcggtgtccccagcctctcactcggagccgatatggggagtaaaggtgggcttgcggaacgggctggacgggggctgaggtcggcggaacggggtccaaactcgcccttatctcctgcacatccggagcatttttattactgatctgcttccgcagcgctgcaggctggggctagggggccgaggggcagtatagggaggacccagagggagcatggggtcccttctccttcgagccagcactttggggcccaggagcagggaggaccccctcccccagcctcggccccaggcagcgctgtcactcaggggccagacgggccagaacagctgcggggaggccccctccccccagcgtgcctaaacttagcccccgcctcaggcgacctggcccctcccccatccaccggcgccggccactaggagcctgcctgggagggccctgctatggggagggaggggctgccctatttggaggtaaatgagaggagatgcattggaaggagacggaagtgaggggtgagcctctaagagggaccggtcggaggggtcagttggagggagtgtgggaggatagagaggatctggaaagaaatagaaaggtactgagttcctggttttcaggactcaaaggaaagcagattactaaagtttctttttctttttaagccacagagtctccctctgtcgccctttctggagtgcagtggtgggatcatagctcactgcagcctccaacacctgggcacaagtgatcctcccacctcagcctcccaagtagttgggactagagccacaggccaccacgccctgctaattttcttattttgtttgtagagacagggtctcactatgttgtccaggcctcaggtgatcctcccgcctcggcctcccaaagtgttgtgattacaggagtgagcctaaagtttagacagatgagatgaaggttggggtacaaaggtcactggtcagggctgaggttgggtttagga

SEQ ID NO: 8053 - DNA, 6000 bp, Homo sapiens
cctcaagtgatctgcccgcatcaactcccaaagtggtgggataacaggcgtgagccactgcgcccggccgtattatctcatttgaacccttgcaacactcaaggcggtatgacttattattattcccatttacacatatgaagactgagcctcatagaggttgtaaattacctgaggcctcacagctgctgtaggaggaagcttctgacattaccactacaatctttgagcaagcatgaaagcctgaaatgtcacagaacaggctagagatgggaaaggaatgaggatttcaacactgtcaggtggagtaaggaatcataattcattgttaacctcccaaacggccactaacagagaatttggggaggcagcagagtgggtgcggttaggggcttgggaggtgggcatgcacgtgtcatcctctctaggtgtggcctcaaggtgaatgacttcctctgcctctggggttcaagcgattctcctgcctcaggcttccagtagctgggattacaggcacgtgccaccacaccaggtaatttttgtatttttagtagagacgggtttcaccatgttggccaggctggtctcgacctcctgacctcaagtgatccgcccgcttcacctcccaaagtggtgggattacaggcttgagccacggctccctaaataaatacatcaattttatttaaatcttacagcaatcatatgagacaaaagcttttaacacctgcactttatattcgaggaattaaagttctcagaggcgactaaagaccaaactcagggctgaggagttccaaagctgagttgagttgcaaatgaatcaccgaggaccaccggagctttctagcgaccctcgcaccagggaacgaacccctgtggtttaagggctccaacccacaacccagttcctttggcgggaaacagcaccctcccaaggccccgccccttcctggccccgccccgtcgtctctgggcccggctcctggagatgggtattattaatctgccttctatgggggacctggcccatctcgggtatcagccccgcccctactcgtccagtctccgaacgctctgcagccaatcggcgcccgagggtcggtccccgccttctcaagccccgccccctacccttatccctggcagcttccgctaaacgggctcagagccacgcggcacgcccgggaggctttctctggctggtaaccgctactcccggacaccagaccaccgccttccgtacacaggggcccgcatcccaccctcccggacctaagagcctgggtcccctgtttccggaggtccgcttcccggcccccagattctggcatcccagccctcagtgtccaagacccaggcagcccgggtccccgcctcccggatccaggcgtccgggatctgcgccaccagaacctagcctcctgcagacctccgccatctgggggcactcaacctcctggagccaagggccccacgtcccacccagagaaactctcgtattcccagctcctagggccaaggaacccgggcgctccgaactcccagctttcggacatctggcacacggggcagagcagagaagcctcagcgcccagcctggggaatttaaacactccagcttccaagagccaaggaacttcagtgctgtgaactcacaactctaaggagccctccaaagttccagtctccaggtgctgttactcaactcagtcctaggaacgtcgggtcctgggaaggagcccaagcgctcccagccagcttccaggcgctaagaaaccccggtgcttcccatcatggtggccgatcctcctcgagactccaaggggctcgcagcggcggagcccaccgccaacgggggcctggcgctggcctccatcgaggaccaaggcgcggcagcaggcggctactgcggttcccgggaccaggtgcgccgctgccttcgagccaacctgcttgtgctgctgacagtggtggccgtggtggccggcgtggcgctgggactgggggtgtcgggggccgggggtgcgctggcgttgggcccggagcgcttgagcgccttcgtcttcccgggcgagctgctgctgcgtctgctgcggatgatcatcttgccgctggtggtgtgcagcttgatcggcggcgccgccagcctggaccccggcgcgctcggccgtctgggcgcctgggcgctgctctttttcctggtcaccacgctgctggcgtcggcgctcggagtgggcttggcgctggctctgcagccgggcgccgcctccgccgccatcaacgcctccgtgggagccgcgggcagtgccgaaaatgcccccagcaaggaggtgctcgattcgttcctggatcttgcgaggtcagctcccgctcccccgggaggtggggaagagtgttacggatggcgggagtggtcacgtggacaggacggggctttggggcccctggagcagagacttccctctagagtcttaggaaaactcgacaggatattgaggggaggctccagccctcgggagtgtgagtctagtctcctggggaaggggtttctaaatctgggggcctgggtacataagtggggtcttatagagggagaagaaagtgatttggggagacataggagggtctgcctaggggagaaagacactgaggggaggggaccccaggaggaacttttgcggggggaatctttgcgtggtcaagggccccaagatggggcttctagatataatttggggccagggttggagagtttgggtaaggagcccctggaggatctgagatctgagtaactcccaccaggccctcttcccagccctggggcacccccacaccacgtgtcactcggacataaccaggctctgtttttggcctccgcttcccgcccatttcagctggggtctggccgcttcccctttatcttttagatcagccctgccacccctgcctttccctcccgtttcctcctctgtctgggccaccccctagcaggcagcccagaagaggaccagttagaaaggggagcagattcttttccttctcctggcctctgccccgcgcccccaagaatggcctcccccactttgaggagggcggggggcagaggcccccttgcgcttgcctttagggcttgctcattcagtgtctccacgttggggacttcctggaagttgggggaaggaaatgatgagtcacggaacagggttctccagcctctggggcgtcagtgcaggctgagatgcgagactggggcaggcttggtgtcccgagttgaagcctgggagcaccttctggctgggggagattagctgggtcctggcccagcctgggcctgggtggtacaggcggaccttcaggcaggcacacccactccgaggctgtttatgagcacaggcctcccctgcgtgccaaaacagctgtagctcacacttggcctgccacacaggcttataaccaaatgacatacagctggacacattcacgcagacactcagctgaggctgtagcatctcgacaaacacatggccagataccagcggtcatacacacgctcactgtgtactaagacccctgtagcacagccattcagtgatgccaccagccacgccaacatctaaacacaggctcaagagcacacaatacacactcacatacacacctatgtggtcacacaccaataaactcatgctttttttttttttttttgagacagtctctgttgctcaggctggagtgcagtggtgcgatcttggctcattgcaacctctacctcctggatttaagtgattctcgtgcctcagccttccgtgtgccaccacgcctggataatttttgtgtttttagtagagacggggttttgccatgttggccaggctggtctcgaacccctgacctcaagttatctgcccacctcagcctcccaaaaggctggaattactggcgtgagccaccgcacccggccaaactcattcctctaccatgacgttattttactgtaccgtgatgcatgggtggccatccatggacactgtcccatactactgaaccttaacctgcacccaaactattaacatttgacagattgtatatgggcacatggcgttggctgtacaccagtcattggtgagagggagcatgtggagtgcttggggctatggagccagctggctgggttcaaatcccagctctgctatttcccagctgggcaattttctttacccttctgggcctcagcttccttttctgtaaaatggggtaatagtgattatccccaaggctgtcgtgaggatgaaatgggttaatttgtgtcaagcacaggccaaaatgcctgcctgccacacggtaggtgctgtagatggcttagctgctatatatattttttgagagagtctcactcggtcccaggctggaatgcagtggcttgatcttggttcactgcagcctcaacctcctcgggcttgagtgatcctcccacctcagcctccagagtagctggaactacaggcacatgccaccatgcctggctaatttttgtattttttgtagagacacggtttcgtcatgttgcccaggttggtcttcaactcctggctcaagcgatctgtctgccttggcctcccaaagtgctgggattccaggcaagagccatggcgccttggccttagctactattttcatcttaaggcagacactgtcacacaagagtaagggtagccttgtaaacacagatgcatattcatgagatatgaagccgtcccttttctccctccccgccaccgcctcccaacacacccagatcctcccccatactctcagagccgctggcaggccctccaggaggaagtggctgatgcaagctgtccagggtattaagtttgctgcatggggtggagctgaggcccggggcgacctgccctggcctgccgtgggaggccagcattcctcaccccgaacccacaatgcctcagggctagcacgccagcctcttggggctgaaggaggctgactccccaagtcctgcaaaggggtgcaagcctagttccaaccctgccgggctgaggcatgagtaggggctgtatttgcgtgcaggcgggcccccaaagcttccactcgctgccttaaaacgccaacccagcctctcagacaatgctgccctcccactatggtatctaataaccctctgtgtgtctgtctctgcagaaatatcttcccttccaacctggtgtcagcagcctttcgctcagtgagtcctcaggggtgtcctgaggggatgggggtggacagggagggatgccagccagggggagcccttgctacctgattttggttagttcctggaaaaatgcatgtcaatgagaatacgggctcagagcctcctgtgagttttaattctagctgtgtgactctgggtaaatgtgtttacctctctgagcctcggttttccacctctggaaaatgggggtattgatcatcctgccccatggggttgccagcagatgaaatgagatcacattgaaaggatgtggaagggcaggctttgagcattgttagcttggcatggggttgggaggccctggtaacgatggacactgactcttcccaaccccacctacagtactctaccacctatgaagagaggaatatcaccggaaccagggtgaaggtgagagcagtgggaggcagcgggggctctacctctttgcctattgctataattttttggttttatttctgccttagtctttgctgtggaatttgattgacactctgcagtccttccccaatttctgtcttttctgccttctggataggtctctactttgtcccctcttttcccaccccaggtgcccaggctcttcctttctccctcaccccccaaccccattccatgctgccctctccctgcccccttccatccaccctcaacctgctcaaactggcagccagccagaggtttttgttgttgtttttctgacacaggatctctctccatcattc

SEQ ID NO: 8054 - DNA, 6000 bp, Homo sapiens
ttaggatagttttagatttgtagaaaaactgcaatgacagcaaaaaaaaattcccacataccccagtttcccctatgattaacatcttatattagaatggtacatttattaccacgtatgaaccagtatggcacaatattattaactaaacttcatagtttatttagatttccttagtgtttttgtttgttttgagatggagtctcactctgtcacccaggctgtagcacagtggcacaatctcggctcaccacaacctccacctcctgggttcaagcaattctgcttcagcttcctgagtagctgggactataggcgccctccaccaggcccagctaatgtttgtatttttagtagagacagtgtttctccatgttagccaggctggtctggaactcctgacctcaggtgatccacccgcctcagcctctcaaagtggtgggattacaggtatgagccaccgcacccggccaatttccttggttttttaactcaatgcccttctgttccaggatcccaccgaaggtaagacattacatttagcagtcacgtctccttggctgtgatggtttctcaggctttccttgttttgatgacttgacagtgttatttgtttgagacggagtctccctcttgtcccccaggctggagtgcagtgaggcaatctccgctcactgcaacctccacctccagggtacaagtgatcctcctgcctcagcctcccaagtagctgtgattacaggcatgcaccacctcaccgggctaagttttttgtattttcagtagcgacggggtttccccatgttggacaggctggtctcaaactcctggcctcaagtgatcctcctgccttggcctcccaaagtaccaggactacagatgtgacacactgcacccaccaacagtgttgaggagtactgggcaagtattttggaggatgtggctcaactggaatttgtctagtgtttttttcatgattagattgaaagatcccagaagtaaagagccattttaatcacatgacttatcaatgttgaggttaacctcaatcacctagatgtcaatgtcaggtttctccactgtaaatttaggctttttctcccctttcttgtaccctcttctttgaaaggaagtcactatgcacagtccatacttacagaatggggaggtatccttcaccttcttgagagcagagtatctacgcagattatttggaattcttctgcacaaactatttgtctattctcccccctttatttatttgttctatattcatctatatgaccataggctcatggatactttatgtttgggattataatccaatactactttattttgatgctcaaattgttccagctttggccattgggagttctttcagttggctcctttggcataccccctaattttgtgtgtgagcacacgtgtggaatacttccttcctttctggcactacaaagttatactgaggtgagctatgattgtgctgctgcactccagcctgggcgacagaccgagaccctgtctccaaaaccaacaacccaaagagtgagaccctgtctcagaaaccagcaactcaattttctgggacagcaggaggtgtgtttgagcctaaacttttttttttagagacagagtcttgctatgttgcccaaggcgggacttgaactagactcaaactcctgggcccaagcgatcctctcgcctcccgagtagctgggattataggcacgagacaccgcgcccatcttcgaatctgaatttttttttaacacgctctcttcagctattttttttttttttctgagactaagtctcactctgtcgcccaggctggagtgcagtggcacgatctcggcccgttgcaacctccacctccccggttcaagcgattctcctctctcagcctcctcagtagctgggattacaggagtgtgccaccacacccggttaatatttgtattttagtagagcggggtttcgccatgttggccgggctggtctcaaactcatgacctcaagtgatccgcccgcctcggcctcccaaagtgctgggattacaggcgtaagccaccgtgcccggccctcttcagctattttttatgaaaccagagttagagaacctcttaagtttttgtttgcagtctctcttcaccggtctccccaaagcagttctagtactggccgacagagggagcaagaaaaagcagaacggtttccttttcccacaaacgcctttccaagtgaagaaaccggcgagaccagccgcgggggcgggactaagttctgcgcagaactgtcaaacccgggcgtgggccccgagctgtcacgtgagtgtctgcggtcagctgactgtgccagagttccgcggggagggcgagtgggggaccccccgccccagcgcgagccgagggctcctgctgattggtggaggaggatccagcagcaacaccgtggggcggggcctcggcggggggtactgccattgccttccacagggtcacgtgggaggtgaggtacagagcgctggggagagagtggagcgccgttcgccggtatgtgcgcatgcgttgaggtctcttgacgccgattggggggtcacgagtcacgggcggcgtgcggcggctggtgggggcgtgtccggcggagcgggcgcggcgttacgaggccgctggttggccagcgctagtcacgtggttcctggccgcaagcgacgcgcgccggtgcgacgtcaacgcagccgggcgagttttaccgatctgtgttccgcggcccggccgcggctgagtcttcccagggtcagggtcaggcgctttgctgagtccctttgtggccgccatggacaattccgggaaggaagcggaggcgatggcgctgttggccgaggcggagcgcaaagtgaagaactcgcagtccttcttctctggcctctttgggtgagaaccgggctgaggggtcggccgggacctaggctgagaggacgaaggagtcacgctcggaggtggcgggttagggcacgcagagctcgggccgaggggacggagaggaacctgcaataaggtgacatggcctgaggcggcagaggggacgcaggctgagggccaagagcctgggccggggcaacacggtttgaggagagacggtctgacatggcggaagggatttgggctgaggacacacggaccgaggcgacactatcttgaggcgaggaaggggacccaggccgaagacaggccagcgggcgggggagaacctggaccgagggagtacgtcctgaagccttggaggggaccggcctggggggacggagggagtccgggagagaagccaggtccagaggcttttcggagctctaggggagtctgtttgaaggctctcaggcggcagtgatggggcctggggctgaggacgcctgcccgagggactgaccttttcaacccctggagcagtggatttgcgtgggccctgggcggtgagggtgaaggctgaagggggctgacaccaggcagaggggctcagggctagatgatcctaggagcggtgagccgcgtctgaagtgtggggggtgcatggggtgagtacggccctggttagcagtgactagtttaaggacagctgaacggaggaacccgggatgatggagtcaagactgtggaggtctcagcactttgggaggccgaggtgggcagattatctgaggcggggagttcgagaccagcctggacaacatggtgaaaccccgtctctactaaaaatacaaaagttatctgggcctggtggcgggtacctgtaatcccagctactcgggaggctggggcaggagaatcacttgaacccggaggtagaggttgcagtgagccgagatcgagccactgcactacagcctgggggacagagcgagactctgtctcaaaaaaaaaaaaaaaaaaaaagaaagaaagaaagaaaaaagcctgaggaggcctgggttgaggctggagactcctgggtgggggaatgcgtggtggtggcttggccaaggagatggagggataacagggagagacagggggactgagagaaccaaaacgggggatcaaattcctgctgtgtgatcctcgagtaatagggatgacagagacatgctgagaagagggatgggaaaaggcctgggagacagaactaacacatatgacgtggcataaaactcacgttagctcctaaaagctgacacgaccatcctgtgataaattgtagtggcttagaagtgccaagagcccaagtagctctgccacttacttcatgactttgggtaaattgtttagtctccctgctaaaggagatcacaaatcaaacctacctcccatttgctatgagtgttagaattgagcctggcgtggagttacatctctgagagtgttagctgttgttaatgtgacttccagaaggaaacaggttcggagcgtgcagagagctgatgggggttcaaggtggacgcccgagcggagaggtctgggaggggtcaggagagggagagactgagaaacatgagtgtgctaagaggagctgaaagggaacagaaaagggatccacgaagacttagtagggttgagaggagcatgaggctctgggcagaggaaggagaagggagtttggcagggggcggtggtgtgggaggtggtgggatctgtgctgatgggacgacccgaaagggtcaaggggaggttgtggaaactgagaggagacctgggaaaggactagtgggcttgtagagagaacagtgtgtggtggccactcagaagcagagcctggggacggtggtgggactgggaacatctgcagaaggctggagaagggggtttgggaggagggcctggggatgggaagagactgtggtaggagcctggcagaggctggtaagacacgaaggagagggatctttacaagagaggaaggaacaggaaaagggctctaggccacgccccttgtttgaggttggataatgtttagcaaaataacttgaagaacatgatggcgaattgcctggtgtggagaaacatccggggctgatggactggattgattaggtgaaaaatgttttattttagaggctgcgaggagagagagggtgtgtgtgtgtttctttttcttcacaaggggagaagttcaagtgctgtgtttgggggtggggccacgagctgggtttttggtgatagttttcctgggtggctctgggtgtctggtccctttggcccagggattagtgggctgttggactgtgtgcttggagggagcagctaagtcagccccaaggcatttgctacctgattgggaaggcaggatgaacagcaaacaccaataaagtggaattacctactgtaaggaggggctcgatgatgtcattcctgtgactgtctgagctcagaggaagcagcgtgaaccagggggaggctcttggtgaggagtgagctgggccccaaggaatcccaggacttgctggggagtggggccggggagggtgctctaggcagcagggatggtgcaacagagatctaccgtgacgggaggttctgcctggaaagacagggaactgagatccagagggatcagaaatggcttcctgggggagaggccccaaccctggggggatgaacatgagttctggggtgctctctggcagggagcagcactccaggcaaggattattatggagcatgccttaggaagatggaacacagggagttccacgttagaccataaaggtggaagcggcaggtgaggccagacaaggaaggtctggtgagcaagggctgggcctggaggaggcactgaagatctccgaggaggctaagggaggcccatcctggcgagctcctgtttgccttctagaaaggactgcagcagctggtgtgggggagagtgacagcaggaggctgttgcagtgccggtaatactagcagatgctggttattaagtgctcgctctgactcagaccctggcctgggccaggctcaacct

SEQ ID NO: 8055 - DNA, 6000 bp, Homo sapiens
ttactggcgtaagccactgtgcccggcctaaaaaaattttttaatgaaaaattttttaaaagaaagatccccttggaaatatctatttcttgaatctatttcttgagagggagtaacaggggagtccaccttctagggcagggaagtcatttgttgcctgggatcacgttctggataagcctgtgttttcttcgtaggagtgcactgccccctcccccccacacttttttttttttgagatggattctcagtctgtcacccagccggactgcagtggtgcgatcttggctcactacaacctctgcctcccaggttcaagcaattctcctgcctcggcctcctgagtagctgggattataggcgcctgccatgatgcccagctaaattttgcatttttagtagagacagggtgtcgccatgttggccaggctggtctctgaactcctgacctcaagtgatccacctgccttggcctcccaaagtgctgggattacaggcgtgagccaccgctcccggccagcactgacccatttttagaaggtgatgctttacattggaacaatttgaccactattgatggaggcaggtggtattgatccttctatctattttacatagctgggtaccaacagaacttgattggtacaaaagaggaagaaaggattggtggttgaggatcagtgggaagttactgcactaatagaaatgtaacatgttgtctgggcacagtggctcactcctgtaatcccagcactttgggaagccaaagcaggagtaacacttgagaccagaagtttgggaccagcctgggcaacagtgaaatcttgtctctacaaaaaaggacaagaaattacccagatgtagtggcacctatctgtagtctcagctacccaggaggctgaggcaggagaatcccctgagcccagggaggtctaggctgcagtaagctgtgatcacaccactgcactccaggagggagagtgagtaatgtgttattggaaatattcatttatgtgcagtgatcgggtgaattatccttatggtgtggccaactgatggttaacaatggtacagccaagctaaacaagtacagctgggaccaatggcaaaaccttgtctctataaaaaatgaaaaacaaaaagaaggtggtgtagcttattcgacagttccatttttacggtcacagaaagatccaattgggttaggcagcttgactgtgtatatgggtgagaaggtaagactctcttcaggaaagagcttgtatggaagaattcattcctccttgtgggggcaaggagatggggagagctcactgtagtaagaggattgcatatattataacagccattcctctggacaaggctggagaacacgaaggtctcttttgggaaggtggtcaaattggaaggacatattcttccaggtggcagttcaaagtaagcctgggcaacatagtgagacctcatctgtataaaaaacggaaaacaggctgggcgcggtggctcatgcctgtaatctcagcactttgggaggctgaggcaggcggatcacgaggtcatgagatcgagaccatcctggctaacacggtgaaaccctatgtctactaaaaatataaaaattagctgggcgtggtggcgggcacgtgtagtcccagctactcaagaggctaaggcaggagaatggcgggaacctgggaggcggagcttgtagtgagccgagatcgcgccactgcactccagcctgggcaacagagagagactccgtcttaaaaaaaaaaaaaagaaaaacagaaacaaaaattagccaggtgtggtggtgtatgcctgtcattctagctacttgagaggctgaggtaggaggatcacttgagcccaggaggtggagtctgcaagtctgcagtgaaccaagataatgccactgcactccagtctgatgacagagtgagagaccctgtctcaaaaaagaaaaaaaaaaaagagattaaaaaaaaaaggtttcatttgaattgttcattccttggaggcaggaataccaggtgaatctattgtaggaattcatttggtttgccgattcatggagtggctgtgaagtgaaagttcactgtaggtgccaagaaagcatcccttcctgggttagggagcaggagagcccattgtagaaagggggcttttattttgggtcatcccattccttcagacaggaatgaagaacaggagagtctaccttcagaaggtggtaagactggaaagacccatttttctacaagggtagatgagcaaatcttttggaggtaggagtctttttggaaacacccattcatggggtaggggtaatggtagaatttagtgtagaagggggatctatgcatatcaagatgcctgttgtctcagacatggttggcgaatggaagggggtcagattgagtggttctacatttatggaatggagatgagagtccattttttaggacgaggtcttctggaatgcctgtcttcatttgataaatgagatggaacactccatggtaagaggttgtccgtgaaggcatttatttatccgtggaatgaccagaagagcccactgtatggagatctttttggagatgtcctttttggggattggaatattgagaacgtccattgatggaaggggggttatctctttgaaatcctccgttgggggagtgggagtaataggtgagtccattgtaggagtccattgtaggaatattgagaacatccattgatggaagggggattatctctttgaaatcctctgttaggggggtgggaataataggtgagtccattgcaggacttaactcctgcaacctccacctcccaggttcaagcgattttcccgcctcagcctcccgagtagctgggattataggcatgagccacctcacctggctaattttgtatttttagtagagagagggtttctccacgttggtcaggctggtctcgaactccctacctcaggtgatctgccggccttggtctccactgcgcccggcctcttttttttgagtctcactctgttgcccaggctggagtgcagtagcctgatcttggctcattgcaacctctgcctcctgggttcaagcgattcttgtgcctcagcctcccaagtagctgggactacagtcatgcgccaccatgcctggctaatttttgtatttttagtagagacaggtttcaccgtgtctggtcttgaactcttgacctcaggtgattcacctgcctcggcctcccaaagtgctgggattgcaggtgtcagccactatgcccagtccaagggaatctctttaaaagtacccattcattgcttgaggaatattgagaaaaactattattggaaggggaaatatatctggaagcctttaccatggtggggtgggggtgaaataatggacaggtgggaccagggatggggaaaaggagatttccttggaaaggtccattctttgagggtgagggtagttgcacagttcattttagaaatagggatctccttgaaagcatctaatgcttgagggaaagaaatggtagagcccatgttaagaaatgggtctctggctgggtgtggtggctcacacctgtaatcccagcactttaggaggccaaggcaggcggatcacaaggtcaagagatcgagaccatcctggccaacatggtgaccctgtccctactaaaaatacaaaaattagctgggcgtgatggtgcgcgcctgtagtctcaactactcgggaggttgaggcaggggaatcgcttgaacccgggaggcggaggttggagtgagccgagatcgtgccactgcactccagcctggcaacagagcgtgactctgtctcaaagaaaaaaaggggggtctccttgtacatagccggtcttcgggatgggtgttatgggaccatccaccatacaaagtgcctgggaagagtccactcagtggcgttgcgggtgcttagagagtcctttgagatccagatctccttggagtgtctattcaaagtcggtggggggccgggcgcgatagttcacgcctgtaatcccagcacttcgggaggccgaggtaggtggatcacctgagatcaggagtttaagaccagcctggccaacatggtgaaaccctttccctactaaaaatacaaaaattagccgggtgtggtggcaggcgcctgtactcccagctactcaacagactgaggcaggagaattgcttgaactcaggaggcagaggttgcagtgagccgagatcgtgccactggactccagcctggaggacagagcgagactccatctcaaaaaaaaaaaaaaaaaaaaaaagaagaagaaggaaaaaaaaagttggtgggaatagaaaagttgttgtagaaaacagagagaacagatctgaagatatggattgaagtgatgtccttagtgcatcctcgtttcccctccaggactttgtggtgtatgtgatgacgcgagagcagcacgtgtttgggcgaggtgggaactcgtctggccgcggggggtccccggctccctatgtggacaccttcctcaacgccccggacatcctgccgcgtcactgcacagtgcgcgcgggccctgagcacccggccatggtgcgcccgtcccggggcgccccagtcacgcacaacgggtgcctcctgctgcgggaggctgagctgcacccgggcgacctcctggggctgggcgagcacttcctgttcatgtacaaggacccccgcactgggggctcggggcctgcgaggccgccgtggctgcccgcgcgccccggggccacgccgccaggccctggctgggccttctcctgtcgcctgtgcggccgcggcctgcaggagcgcggcgaggcactggccgcctacctggacggccgtgagccagtcctgcgcttccggccgcgcgaggaggaggcgctgctgggcgagatcgtgcgcgccgcagccgccggctcgggagacctgccgcccctcgggcccgccacgctgctggcgctgtgcgtgcagcattccgcccgtgagctggagctgggccacctgccacgactgctgggccgcctggcccggctcatcaaggaggccgtctgggtgagcgccccccaatcgccgtccagccccaccagcgccccaagtcccttctccagcctcccttccctaccttcaacccttttcatagctgggctggatactactgttcccatgacgcctcgggaaggatttggggttttgggttttgtttgtttgtttgtttgcttttgtttttgagacggagtctcgctctgttacccaggctggagtgcagtggcggtcttggttcactgcaacctctacctccggggttcaaatgattcttctgcctcagcctcccgagtagctgggattgcaggcgcctgccagcacgcccggctaattttttgtatttttagtaagacggggtttcaccatattggccaggcttgtctggaactcctgacctcgtggttcgcccgcctcggcctcccaaagtgctgggattacaggtgtgagccaccacacccggtgttttggggttattaagcaaggggcccccccatagaatgctgggagatgtagatccactgcacttagagggaagcccaaactcaccttaggagagctcacctaagcacgaactcaccttaggaagaaaccattatgggagatggtgggggagagatcccactggatgagaagttgacagagatcagtgtgagaattcaccgcagcccattgggcttggagcttggatagcagtgagcgagttcattcttggaggcgaggaagcacaaatccactggacctacagatggaagttccagaaagaaaccattcagagtgggggaaacgttccatcctattgagctagggcctaaccagagaggtttaaggagtttcttgggggtaaaaattggagaagaggacctgaaggagctagatcactcataatcatagggtgtgtatgttt

SEQ ID NO: 8056 - DNA, 6000 bp, Homo sapiens
aaccctgtctctactaaaattacaaaattagctgggtgtggtggcgcacgcctgtaatcacagctactcgggtggctgaggcaggagaattgcttgaacctgggaggcggaggttggagtgagccaagatcgcgccactgcactccagcctgggtgacagagcgagactccgtctcaaaaaaaaaaaaagaaaagaaaagaaaaaagtgaggcccagtgggaagccaggaccctcggaccacgtgaggggaggtgtagaggggattgtccgggccaagggagacaaaacagctgccatgtcttccctcagacactcacacatgctcattcttatcctcctctggaactctttattatctcaagtaagaaaaataaaaaaataaataagataaataacctaataaataaagaggagatgtcatagtaaacagcctctggcttcaggaagcgtagctggggcttcggccctgggaaggtcccaccatgctcagagggtccgaggagcccacatcggggggctggggggccaggattccgggtggctccgggagtgcggggggcaggcctggtagtggcaggaagcgagctggtcctcggggtgcagggtcccggtgtggggacttgttccctggcaggtgcagcgggaggccgtgggcttcggactggtaaacattgtatccgtcctcaagaagcagctcccggaagctgcaggcctcagggtcaaagtggagctaggggacaaaaacaggatcagagacagggttcctctgttttcctgatgtaagacccaggatccaggccccagccctgcctccctcagacccaggggtccaggcccccagcgcctcctccctcagacccaggggtccagaccctagtttctcctccatccgacccaggagtccaggcccccagcgcctcctccctcagacccggggttccaggccccagcctctcctccctcagacccggggttccaggccccagcctctcctccctcagacccggggttccaggccccagcccctcctccctcagacccaggggtccaggcccccagcccctcctccctcagacccaggagtccaggcccccagcccctcctctaggaaacaaaacagcaaggcaggttttgttttttaccccagggctctcctgcagggacctgcctcccagttcagacttcacagagaacattccagccctcggagccatcagtgctctctcaggccaggcggggtgtctccctagcactcaaggtcctggtcactttactggccatggcttccccgagtgtccctgtgcccagcatgagccgtgcacacaggggccgtgtgggcaggagcaggggttactgaatcacgagactcccaataacctgagcctcaggccgctccagcatccacacatcacatgattgaggtcactggcgccccggcctgggcctcagtttcctcatcttgcaaacactgatgacaacttcaacctccaaatgttgcagctgggggcgtgcagagcaaatagaatcaagtctggctccgggggggatgagcaagacaaggcaccccaggctgtgagggcgacatataggaggagcatggtgggtggtgaggagggtcctggaaactcaccgatccatacagggccccatctggccgctggcacaggaacctggatgtcttgactcccaagatttgaataactcccggcttcaaggctttcagctgcaggagacctaaggggtgaaagcgataaggtggttcgaggacctctcccacccgggactgtcccaccacccgactctgtcccaccatccggctctgtcccagccctgggagtccaagcccacagcctacctcctccctcagacccaggagaagcccaagccaaagccccctcccaactcagacccaagagtccaggaccccagcccttccttcttcaaacccaagagtccagacccccagcccctcctccctcagacccaggggtccagacccagcccctcctccctcagacccaggggcccagatccccagcccctcctccctcagacccaggagtccagatccccagcccctcctccctcagacccaggggccaaggcccccagcccctcctccctcagacccaggaatccagacccacagcccctcctccctcagacccaggctctggcccacactcactttcggggctctggtcagcagcgccccccaccgtcccatcctccctgatctccaggtgggcttctgtctgctgggcatcatctgtgtagaggtaccgctgccggacttggcccccgaattgcaggagaggactggagtcagggatggggtgtgcctggcaggctcccagcagaagaccagccagcacagaaacccacagtcctgagtgctcgaacccggtctcgtccgagtccatcaatggctcgggtcctcaggtgatctccggggtgtgagctcggagaagctgagtggtttagaattggtgccagattccagttgtccaggtgagtagactcaggtggcctgagtgcctggctcctctttcggctggatcctcagctgacagaacacccttgttttttgggatagatgcagaagctccagaatttatacccagacaggcccgcccaatcaccctccctgcgcctgaaccatgatatttgacccatttggcaggagctacagaattccatcgtggcaagggcagcctgaatggatgatgtaacctggggtcctttcaatggagggccagactcctgggtctaggggatgagggaggggaggatcgggttagctgggacccaggtgaaaggggctgggggcccacattcctgagtctcagagagaaggatctggggtctcaagcacctgagtcggagggaggaggggtgctgggctcctggaaaaaccacctcttggaccatctatgcagatcacgcagaacaagagaaatttctgcgccccatctgaatttctaagtttggggggagggcgtgatctgacactgaggttccttgatcctcagcaaggcggcaattgctgtatgaaagaagcgaccgcatctgagacacaagtatcctgccttggaagcctctcacctggccgtgggccaacctcaacctcatctgtccctgctcagatgctcagaccctggacatcccagcctcctcctccctgatgcaatcctggtgtttctttcaccagagaagccatcccaggcccaggcaggtgctcctgaaataacctggggggaggggtggctgaaagtccctgactggagttggcagccaagccaggccctggagtgggcacccagagggaagacaggttggctaatttcctggagcccctaagggtgcaagggtaggccttctgtgtctgagggaggagggctggggctctggactcctgggtctgagggaggaggggtggggggcctggactcctgggtctgagggaggagggtctgggcctgtactcctggatctgagggaggaggggctggggaacttgggctcctgggtctgagggaggagggagctttggtctggactcctgggtctgagggagtaggggctagggatctggactcgtgggtgtgaggaaggaggggctggggtcctggactcctgggtctgaggaaggaggggcagggggcttggactcctgggtctgaggaaggaggggccgggagcctggactcctaagtctgagggaggagggtctgggggcctggactgctgggtgtgagcagaagggtctgggtgctgggagtcccgagcctggggagatgatggttaaacttctgggaatcaagtcaaactcctgagtctttgacattgatgtatcttgaatgggagggtcagtctgtggggaaggattacccaggtgccgaggcaagagactgaaggcacaaactgtttcagtataataaagaaaatagttagaataagaatagttatcatacaaattagatatagagatgatcatggacagtatcaatcattagtgtaaacattattaatcattagctattacttttattctttgttgtataactaatataaccaggaaacaaccggtgggtatagggtcaggtactgaagggacattgtgagaagtgacctagaaggcaagaggtgagccttctgtcacaccggcataagggcctcttgagggctccttggtcaagcgggaacgccagtgtctgggaaggcacccgttactcagcagaccacgaaagggaatctccttttcttggaggagtcagggaacactctgctccaccagcttcttgtgggaggctgggtattatctaggcctgcccgcagtcatcctgctgtgctgtgcttcaatggtcacgctccttgtcctcttgcattttcctcccgtactcctggttcctctttgaagttcgtagtagatagcggtagaagaaatagtgaaagcctttttttttttttttttgaggcggagtctcgctctgtcccccaggctggagtgcagtggcgtgatctcggctcactgcaatctccgcctcctgggttcacaccattctcctgcctcaccctcccaaatagctaggactacaggcgccctccaccacgcgcccggataattttttgtatttttagtagagacagggtttcaccgtgttagccaggatggcctccacctcctgaccttgtgatccgcccgcctcagcctcccaaagtgctgggattacaggcgtgagccaccgcgcccgcccgaaatagtgaaagtcttaaagtctttgatctttcttataagtgcagagaagaaaacgctgacatatgctgccttctctttctgcttcggctgcctaaaagggaagggccccctgtcccatgatcacgtgacttgcttgaccttatcagtcatttggacgactcaccctccttatcctgcccccccttgtcttgtatacaataaatatcagcgcgcccagccattcggggccactaccggtctctgcgtcttgatggtagtggtcccccgggcccagctgttttctctttatctctttgtcttgtgtctttatttcttacaatctctcctctcctcacaggggaagaacacccacccgcaaagccccgtagggctggaccctacgttagcctgccctgctcggggttggcgatgctggaggtgggccttggaccagagaaaatgctttaattaggtgacaagcgggcagaggcctttgtctctggcgccggcagccacggcccccgctgacggcgtgggaaacagaccctgttccactccggtctccagccttggaatggttgccttcgtgcagtgcaggtctggaaagtagcagtttggcacgggaccctagaattccccaaaaggagtgactaggggctgggattctggaatttgagtgtggacggtgaggcggggggtgtgggagatcggagaccctggtgggcgcgggagcacctgcaggctggaggccctcgcgcgctccggcggcagcctggcaaacaggttctccatcccccaggaggacgcggcagagggcggacgatcgctccactcgccgggaccaggtgcgggggccctgcccagccgctggggcgtggccaggctcgaagcacccaggtgtcgggggccgactctaagccctggcaccggaagagagagggcggcggattggacctcccggctccagcattgcaactgggcgctccgtctcctggtccacgcaatgatgctgcggctgctcagaagccaggtagcctgccctgggtgaagccttcgcgcaggtcaatgacggggcggaggggcagggcgcggtcccctgcatccccgatctggggagcggtgggcccaggggccatcgccttagcccctggcgctggggctcggcgccaagtgacgggcggggctccaccttccagccatccgcccggcccgggagggcggacgctgcgagactcccggccgcgccctctccttcctctcc

SEQ ID NO: 8057 - DNA, 6000 bp, Homo sapiens
gatccacctgcctcagcctcccaaagtgctgggattacaggcatgagccaccacatccagcctataacccatgaatatttagaatgttatttgtttccaaagtattgctttttctctaaatgtcttcttattgttggctgctaatttaattgaacttctaatcaggaaacgttacctgtagtaacagtttggatgcttactttgctgtgtaaaaatgatagagacggctgggcacagtggctctcacctgtaatcccaccactttgggaagctaaggcgggtagatcaagaagtcaggagaccgagaccatctgggccaacatggtgaaatcccgtctctactaaaaatacaaaaaaattagctgggtgtggcggtgcacgcctgtaattctagctactcgcaagcctgaggcaggagaatcgcttgaacccggaaggtggagattgccgtgagccgagttcgtgccactgcactccagcctggcgacagagctacacttcgtttcaaaaaaaaaaaaaaagatagatatttctgatcaatatgttttcataaataagtattcctggcctcgcacagtggctcacaccagtaatcccaacactttggaaggccaaggtgggcagatcccgtgagcccaggagtttgacaccagcctgggcaacatagcgaaacctcgtctctacaaaaaaatacatattaaaaaaatttagccaggcaaggtggcatgatcctgtagtcccagctactcaggaaatggttgtggcagaatcacctaggcctcaggaggtcgaggctgcagtgagctgggatagtgccattgtacttcagatggagcaacagagagagaccttgtttcaaaaaaatatatataaagaaatatgcattcccactttgttgctatatgtatattccagaaacgtttctatacaaatttacataatatataaacaatcgaaacatcatatttgcgcatgagattgaacatttgtgccatgcaaccctcacgaatattttgttcacttaatctatcaaagtctgatcaatatttcttcaaatcctccactgtgtctcaattgatgctttgtaaattttaaggacatgtggttggttgagtgaaagtgtataactttctcttcttcacagattgctgatttaaaagtatgaaatatccgggcgtggtggctcacgcctgtaatcgcagcactttgggaggccgaggcaggcggatcatgaggtcaggagatcgagaccacggtgaaaccccgtctctactaaaaatagtaaaaaattagccgggcgtggtggcggtcgcctgtagtcccagctactcgggaggctgagccaggagaatggtgtgaacccggcaggcagagcttgcagtgagccaagatcgcgccactgcactccagcctgggtgacagagcaaggctccgtctcaaaataaaataaaataaataaataaataaataaaagtgtgaaatatcatctatttttcttttcaaaggctgtttgtgttagtattggtttgctattgctgccataacaaattacacgtattgagcagcttcagcaacacaaactcattatctcacagtcttttaggacaaaatcaaggccataacgtggctgcattcctttctggaggctccagagacgcgaatccatttccttgctctttcagattcttagtagaaatgcatatacttgtatatacacagattacagatagatctatgcttattcgttttttgtatgtactgttgacttattcacagtagcatctcatcttctccatttggggttcattattccactccctgatttacattgtttagtattgctttcagaaagagcccagatgcaaacatgtctgcagccttgcagctcaagcgatgcctgcttctctgtctctgtctctctccgtgtgtgtgtgtgtgtgtgtctccctctccctctctctctctgtctcaatctctctctgtctctccgtctctctctgtctgtctcaatctctctctttctctgttgttatcatagtacctgataaaaggacactgaaaacgccctccttattcctcataaggccaccgcctgacctgacgggtcacgagtgccccgagtctccttatgttctaggatttatccacagctgacactgcaactcggtcctttaataataactaggccaggttgcggtgagccgagatcgcgccattgcactccagcctgggcaacaagagcgaaattgcatctcaaaagataataataataataataataaataattataatagtaataattaggcccagcacagaactctctcctcacagttaaacgcttgtggttgtttctcctgtatcttctggggctgctgtttgctctttggaactccagtcccgacgagcttgtcattcattcaagggtaatttacattttctctggtagttttatgattattttaaattaatgcctcatggttttcactttaccatgatcgagatattcaatttagttataaactgatgttttctcttcagttctgtaaaaatttcaaccattagctcttcatgcatatcatgaactaacatccttcttccttctttcattctgaaaccgtgacagacacgttctttcttctcattcaacttcgtgtatatatcaatattttctattgttcaatttctgttctttccatgatacagtctggaaaatttcatgaatattttatcccaatgtatatatttattatttcagctgtcttgccctggattaaattatgctttgattttgttatgtttgcatggtaggtatatatggttagtaaattgcttctttttttgagacacagtttcgctcctgttgtcccagctgaagtacaggggcgcaatctcagcacacagcagcctccatcttccaggttcaagagattctcctgcctcagcctcccgagtagctgggattacaggcactcaccaccacgcccagataattttttgtatttttagtagagatggggtttcaccatgtcacccaggctggtctcgaactcctagcctcaagtgatctgcccgcctccacctcccaaagtgctgggattacaggcatgaactaccacgcccagacataaattcctttttaatggcgttaatttaatatagtttttcaccttcacgatgtctgtctaatgcatttcaacaactgtctattttgtcctcatatggttgtcattcctgtggggcggctcctcccacgcacctgacctttcataaagggtttctcccacggctgtccaggcatcagcctgatgaaggggattgttgccgctgctcctgccccactcccccaaactcagtgtcagctcaagattgtgcccagcagggatgggaccaatgccagcctcacactcacctgtggggcagacgcccatgtctgaccaccgtggattgaatctgtttctcacacacaggggaggggctgagcgctgaccgtggcctccagtgagtgagcagagaccccccagcgcctgtccacacacacgggggagggggagccacagcttccagcctcacccagagccctgacccctccctgcctgggaggacgtggggttcctcttctgtcccacatggaggtgggagcctcctcctccctaatgacgctcggtggtcccagacacctgtggccactcagcattgaactctgctcatggaaggggatgcgtctcaatgtgaggaactgtttttcctctttctctgcctgtggctgtgatgatctgcatatttcagacgtatcacaaggagaatttcatggtatttggagccgatgtgggctcttgagtgggggcgtcaatcatcctcctcgactgtggagcccagcaccaggatcctctcccgtccccaccctcctgtctgaactggtctggaaattcaccatggctgagcctcccatgtcctgggcaccactgacccccacagccactgtgatgagtggggttcatgacagcaggctcagaggtgacattcatgtccaaagtcacataaaccctagatgataatcaggaattaaatacaaatcagctcaccttccccagaatcagattatagattacaatgaaacatatatatatatatttctctttatcccctctatttctcctttttagacaggatcttgctctgtcgcccaggctggaaggccaaggggtgatcatagctccctgaagcctccgcctcccgggcccaagtgatcctcccacctcagcctcctgagtagctgggaccacaggcatgagcctccatgcccagctcacttttttcttttctgtagaaacagggtcacagtctgtttcccaggactgtctgaagctcctggcctcaagccatcacccgccacagcctcctgaagtactgggattccaggcatgagccaccacggtagaccctgcatttctctgtgctcactgctacacgcagctcagcctggactacacagccaggtgtcaggtgcgtctctgctgatctgagtctgcctgcagcatggacctgggtcttccctgaagcatctccagggctggagagacgactgccatggtaaggaccccgtaacgctgagctgatggacgggctgaaggagggagggagaccccatggggaggctctgagagggaggaggagcccacggtcaccctcgcctcaaaggggctgactcaggaaggcaccaggtctatttgcggctgtgtccccgtcctcagtgagataaagataaatcaggcagacagtggcccgggggcagggagaccccatttctctctgaaatgcctgcagagagcctggtgcctgcccccacttcagccctggggaaatcagagccaggttcctggggtggcagttcctcttcctgtgggctgaggatgagacaaccccatgacaagaaggacccagcctccgagcggccacaccctgtgtgtctctctgtcctgccagcactgagggctcatccctctgcagagcgcggggtcaccgggaggagacgccatgacgcccgccctcacagccctgctctgccttggtgagatttcaagatggggagggggagatctgagtcttggaggaaccccaccccacacacaagccctggtccatcaggagacctcaaaagctcaggaggcacccgggcggggacctgctcaggcttcagggcaaatgcctcacagggaactctcttccagggctgagtctgggccccaggacccgcgtgcaggcaggtgagtctgtccccagctgtcccaggtccctactcctcactgggacagggggccacccatgggcagctgggggaggagacagtagttctgggtgactgatggggatgatggggaagtcctggggctgggagctgggatctgagcgtggggatgtcttgggatccagcctctgatttccatctagggcccttccccaaacccaccctctgggctgagccaggctctgtgatcagctgggggagccccgtgaccatctggtgtcaggggagccaggaggcccaggagtaccgactgcataaagagggaagcccagagcccttggacagaaataacccactggaacccaagaacaaggccagattctccatcccatccatgacagagcaccatgcagggagataccgctgccactattacagctctgcaggctggtcagagcccagcgaccccctggagatggtgatgacaggtgagaggacactctggggtcccagccccaggctctgccctcaggaagggggtcggctctcaggggcgtctccctctcacagcccagccctggggatgatgtgggaggtgggagccccatttaacacggtgcctctttctctcctaggagcctacagcaaacccaccctctcagccctgcccagccctgtggtggcctcaggggggaatatgaccctccgatgtggctcacagaagggatatcaccattttgttctgatgaaggaa

SEQ ID NO: 8058 - DNA, 6000 bp, Homo sapiens
gtcccaggtcgctcctgctcactggggacaacgggccacccccagccacctggggatggagaacagcatctctgagctgactgatggggacatctgggcgggtcttgggactgacagctgggatttgaggaatgcattagtatcttgggacccaacctgtgatttcatttcaaggctcctcactaaacccaccacctggactgagccagactgtgtgatccctgggaggaggcctgtgaccacctggtgtcagggtaccctggagccccaagagcaccagctggataaagagggaagctcagtgtcacagaacattaaggaaaccactggggcctgggaacaagaccaggacccatatctcacacaagccagagcacaatgcagagaactgtcactgttattatcaaagtgccacaggccggtcagggcacagtgacccccctggtgctggtggtgacaggtgagaggacactcaaggcgcccagccgcaggctctgtcctcaggaagggggtcacttgcgccctgactttactgtcttttagggatgtcccataaaggggcagaagtgctgaagctctcaacctctgggtggcgtctgcatatcgtgcagaaccatctgcaaaccaggcttgagtcttcactttctctgtcaacggagcatagagaaatccccatgagattataggtgcaggctggaaggcagaaggttgtgtagcagggacaggaaccatgggcatttggccccctgctttgtgtaaattgctcacactttcagggcctgagtggacatgatcttattatacagcttgcatcggctaacacacacttcacatttcatggtaccttggtgacctgtgcccaagcatccagtctctcctaaggctcaataatggaaaaaaatataatattttcctttttttttttttttgagatggagtctcacccttcttgcacaggctagagtgcagtggcatgatctcggctcactgcaatctccgtctcctgggttcaagcgactctcctgcctcagcctcccaagtagctgggattacaggcaggtgccaccatgcccggctaatttttttatttttagtggagacagggtttcaccatgttggccgggctggtctcgaactcctgacctcaggtgatctgcccaccttggtctcccaaagtgctgggattacaggcatgagccactgtgcccggcaaaaaaaaatatatgtttttcaaaaggagactagctatctgtgaatgatgataggattttgctccacaatcctaagtgtctaagccccaattcacctataggaaggagcttgtcaaaacctccaaacagcatctcgatctgccactgacacttcaagcaccatctgttccactggatcatatggcccaggtggcagaagagcttgtgcaggacctggatctgttgcagagccttcccctattccacaccccactcaaaactttttttttttttttgagatggagtctcacagtgttgtccaggctggaatgcaatgggacaatctcggttcactgcaacctctgcctcccaggttcaagcagttctcctgcctcagcctcctgagtagctgggattacaggcgcccgctaccatgcctggctaattttttgtatttttagtagagacggagttttgccatgttggtcagactggtctcaaactcctgacctcatgatccgcccacctcggcctcccaaagtgctgggattacaggcatgagccactgcacccggcctccttttgagtcacttagtaaatgggctaatggagcacacccacatgagaaatatgttgctttcaaaatccaagaggtagggccaggcacggtggctcacgcctgtaatcctagcactttgggaggccgaggtgggcggatcatgcagtcaggagttcgagaccagcctgaccaacatggtgaaaccttgtctctactaaaaatacaaaaattagctgggcgtgagggcgggcacctgtaatcccagctactagagaggctgaggcaggagaatcgcttgaaatcggttgcagtgagcccagattgtgccactgcactccagcctgggcaaaaaaagcaaaattctgtctcaggaaaaaaaaaaaaaaaacccaagaggcttactaggtaccatggttcttttggttgtaggaagggccagatgcaacaacttaccttttgctttagaagttacatctcaacattttccatatcagtggactcagaaattgtgttgaggcggaaggctccaatatttttgtggaatttatttctcaccctctgtcatgcaaatgtgttactaataaatttggaataggtgctacttcttgctttcctggtccaaatagcataatttctttttttaactttattttatttttatttttgatatctaatttaatttaattttatgttctgggatacatgtgcaggacctgcaggtttgttacataagtaaacaaacgtgtgctgtggtggtttgttgcacccatcagcccatcacctaggtattaaacccggcacccattagttatttatcctgaggctcttcctcccttttccccccaacaggcccaagtgtgtgttgtttccattcctgtgtccatgtgttctcattgttcagctcccacttatgaatgagaacatgcagtgtttggtttttggttcctgtgtttgtttgctgaggataatggcttccagctccatccatgtccctgcaaaggacatgatctcattcctttttatggctgcatagtattccatggtgtatatgtaccacagtatctttatccagtctgtcattgatgggcattccaaccagcataattttatcaatgtaatgattcagtctaacattttatgaaaggagatgataatgatgattatggtgagaactaaactatgggatagaactaaacagttggtatgtgcctgaggtaggacagtgaatgtatattgctggctgtgcctgctcaaggaaaatggtttctggtggtctttattagcagtgctggataagaaagcatggtggctcacgcatgtaatcccagcactttgggaggccaaggcaggaggatcacttgaggttaggagttcgagaccagcctggtcaacatgatgaaaccccacctctactaaaaatacaaaaattagcctggcatgatggtgggtgcctgtaatcccagctacttgggaggctgagataggagaattgcttgaaccagggaggcggaggttgcagtgaaccgagatcacgccattgcactccagcctgggcgacagagcgagactccgtctcaaaaaaaaaaaaaaaaaaaaatagaagaagaagaaggagaaggagaaggtgaaggagagggagagggagagggagagggagaaggagaaggagaagaaggaggaggaggagggtgtggaggaggaggaggaggaggagggtgccactgcactccagcctgggcaacagagtgagactgcatctcaaaaaaaaaaaaaaaaagaaaagaaagatagatcttctagactcttccaatttagatgaggccgtcttgaatgacaactcctctctaacattttaaccttcctaaacatttgaatctctttctccgtagtaaaccaaggcaggtctggcatgttgagtctaatcactttgggccacctttggtggaaacctccaccctaatgaccccttgatggtcccaggcacctgtggcgactcacctctggcctctgttatttaatgtggatccatctacacttggagacttccacgcctctttttctgctcatgatattgatgttctgcatatttcagaaatacttcacgtacatttctccattagggatcccagatatgagatcttgagagaacacatcaatcatccaacgctatgatcctatcatatcccaaacacttcatgtgctgacctggtctggaaatgaagcacagatgagcctctcccatgtgtcaggaaccactgaccccacaaccactgtgaccagtgggatttgtgacaacaagctgcaaaggaagaaactgaggctcagagatggttcattaccgcccgaggtcacgtaggcagtgaatgataaccagtctctgaataaatatcagcttcctcccccactccccaaatcaaagctcaaatataagtcattgttcccaaaacgttgaacagggattaaggtgcagagggacggccaaggatgcaatgggcaccgaggaggcaggaaagactcagaggtttgttcccagggacgtcaggggtggacgctgtagccaaaaaaaaaggggggggaagtaaaaaaaaagggggggattactattgattagaaagaaaacctatagtccagggccacaaagagggtcatgacttcctctctttattccctgcatttctcctctgttctcactgccacacacagctcagcctgggctgcacagccaggtgtcaggtgcgtctctgctgatctgagtccaccctgcagcatggacctgcatcttccctgaaggatctccagggctggagggacgactgccatggtaaggaccccacaacgctgaactgatggatgggctgaaggagggagggagaccttgagggaggctgtgagagggaggaggtcgccctcacctgaaaggggtgactcaggaaagcattggttctttttcctgctgcatcccaggtcttagtgagatgaagacaaggcagacagacagtggctgggggtcaggaaagaccccatttctgtctgaaatgtctatagaggagttgggcccacccccacctcagccctacaggaaagacagccaggctcctgggagggcagttccacttcctgtgtggctgcagatgacaaaaccccatgagaagaaggaccgagcctccaagtgtccacaccctgtgtgtcctctgtcctgccagcaccgagggctcatccatccacagagcagtgcagtgggaggagacgccatgacccccatcctcacggtcctgatctgtctcggtgagatttgaagagggagggagcttctaacctaggagggacctcaccccacagccaaactcttgtccctaaggagaccccaggggctcacaaagatcccagggaggggaggacctgctcaggcttcaggggcaaattcctcatagggaactctcttccagggctgagcctggaccccaggacccacgtgcaggcaggtgagtctgtccctagctgtcccaagtccctcctcctcaccggggacaaggggccacccctgtgcagctggggatggggaatagcagttctgggctgactgatgggggtgtctggagggtcctgcagctgagagctgagatctgttgggtgggaaatgacttagaatctgaactctgatttccttccagggcccctccccaagcccaccctctgggctgagccaggctctgtgatcacccaagggagtcctgtgaccctcaggtgtcaggggagcctggagacgcaggagtaccatctatatagagaaaagaaaacagcactctggattacacggatcccacaggagcttgtgaagaagggccagttccccatcctatccatcacctgggaacatgcagggcggtattgctgtatctatggcagccacactgcaggcctctcagagagcagtgaccccctggagctggtggtgacaggtgagctgacactcagggatcccagccccaggctccgccctcaggaagggggtcagctctcaggggcttctccctctcacagcccagccctggggatgacgcgggaggtctgagccccatttaacacggtgcctccttctctcctaggagcctacagcaaacccaccctctcagctctgcccagccctgtggtgacctcaggagggaatgtgaccatccagtgtgactcacaggtggcatttgatggcttcattctgtgtaaggaaggagaagatgaacacccacaatgcct

SEQ ID NO: 8059 - DNA, 6000 bp, Homo sapiens
gcagctggacccaggctgctcagggatcagaagcctgtgggattccacgtgggctccagtggggccttggtacagtctccaggagcaaactgtgggcctctggaggcccagaggggacaggcgctctcctgtgggcaggatcctaagggcccacagcagaggtgtagatgccagggacccctcactcactcaccccttccctgtgttagggaggctctcactcattcaccccttccccgtgttagggatcctctcactcactcacaccttccccgtgttagggatcctctcactcactcaccccttccccgtgttggggaatctctcactcactcaccccttccccgtgttggtgaatctctcactcactcaccccttccccgtgttaggagcctctcctggctcccaccttttctcttctcttctctccatgtcctcatgtttctcaggtgaaccccagcatcctcttggaagatccacttgacctgttggtatttactcgctattttgggtcctcttagtgagtaggcagactccagccctttccattcagccaacttgaacctcagcccccagtcattttcttgcactttttactcttgggaaatccagtcccaatgtgcttgtctttcattggacaataattttcattttctccagtagttttaaaattactttgtatctattctaggtatcttttactctatcatagttaagacattgatgttatttatgaatttgttcacgttaaactcatgttctttcttcatttctataaaaatgtcaaccattttctttgcaagtatttactgaataacatactccttatttccttcattctgaaagtgtgatccaaagagagatatctgtttcctcttttcattccatttcttgtgtgcattaattatcttttctatttttttcatttctagtttttctctgatgactaatgaaaaattttagtaaatattctacaccaatacaatgtttatcatttcagctgtgtcttgttctggatgaaattatttctaaatgtgttaatataatttactattttcacatcacaatagcttcctaattcatttctacaattgcctgttttttctctaacggactctttgatttttattcctctggggtgggtttttctcccacacacctgatcttccatatagggtttctccccaggctgactcaggaaggaaagctgatgagggcattgctgtagccgctcctgccctgcggtgtccatgctcccaagcttagaatcacctctgtgttatgcccggcatggcggggtccatgtgagcctcacactccagggtcagagatgcccggtccaacaatgataaagcgcatctgtgtcatgcacacccgggaaggtggctcagtgctgagtgtagcccgggtcactgagtcatcccagggtctgtccacaaacacagaagagggggagtcacagtctctaaggtcccacagtttcctccacttttttccttgttctgagagtgagacaaagggccatgactgttctgtgggttggacagatgcatgtttccacctgcaggctggaacccaagctgaggtcttgagcatccccaagtactgataaagcactttaggttgtttctagaaaacactgaaaaattaacccttttgctaaaagtgtagaaacaagccctcccctgaaccaaattcctgaaactctcaggttaaacttcgtaaccccatcccttcactgcagactcccaatagaaaagttacaggtgcaaggatgagatgactttggtcaaactcagaccccacagggccaggaaggcctgaaggagaggaggcccatgcttccacgtctcagataagaactgtttctaaggacttttaaaaaacccataagaaactcttccatgtccttcagccccttctgctttgacaaggtttatcactagatgttctttaggacgtcaggaattcagataagatgctctcaagagaaccattgaccagcaacagcatctcctccaatggactgacagcaactctggctttgaacctgtggaaccagggaactctgtttccaggcagctctgtcaggctctcccttgttgctgataagaacttcctttacctctctatgtacagagagctctctctacggtgcttttcctctactctcacgtcacaggaatcatcaacacagaaaaagacttctaggaccagatgtatggggtttttttccccagacgcagtagcgaacagcagctgggtgtcctctaagtcagctctggtgctgtctacccagagacagtcccggatcccacagattgaaggcccattccccaaaactgcccccaacaccattcccaagtccagacctccagaacttctgactgactggcttcaagttggggatcccatgccccactcttcggtttgattaatttgctgtagcagctcacagaactcaggaaacactgacatttcctggttgaatacaaagcacactgcagaggacacagatgaagaaactcataggaggaggcatgggggaagaggcccggggcttccataccctccctgggcgtcgccctccaggagccttagcatgctcagccacccagaaactcatgaaacccagtcctctggggcttttatgaaagcttcatgacatcagcatttcctcccacaaggaacagggtgagactgtcttctgggagggtcttaagatccactatcagaaaggcagggaacattcgagtcttactttgggttaggtgaaggaagggcaggaggaggtcagaggcctccgctgaggcccagcacagccaatgttataacaaaagactataacaagggctatgggagttacaagccaggaactgcgggtgaaaaccagcatatatcacaacatcacacttccctctctggacacactgtggcttgccatgccatgcactccatattgtaatccttgcttctcactcccaaataaactcaaaatccaggcaaccctggagcaatgcagccttgaattccaggggtctcttatatgcacactttttccaaacaaacggggatcaaaactatagcatttgtgagaaacaagacttgcgtatatgaacggcagacttttcctatatgcagacccagcagagacaacgtcagggctggagtacgagcaagtgttggtacatgtagggggtactgaaacgaattgcctgtgtatcccaagaaacaactgtactgagagatcatattttctaggggtttatttttggttttgtttttattttaggttaaagctttggatagaatacccagtgtctccttgtccatctgaagaacatgctgctatgtggaagcacatccttgagatccacaaggagacactgggcaagaagacaaggatgccccactgtgcagaggtccccctaataaatgctctatgaacaccctggtgtttagtgcttctttccttggaattccagcaggtctggacagtttggtgcactcccttgagggaattcccctgggctgcttggggtccactccagcctcaggtgtagctagaggacgcagcctcccaccttggtctggagccctgagcccctcactgtcattgcagatcccggggttcctctcccggctccactcagtggtggaaacctccaccctaatgagcccttgatggtcccgggaccctgtggcatctcacctctggcctctgttctttcttgtgagtccgtctacacttggggttttcacatgtctttttctgctcatgaccttgatactctgggtatttcagaaatgctacacatacgtttctccattacggtcagatgtgacatcttgagtggactcatcaatcacctacagaatgtggagtccaacagcaagatcctctcacgtcccaaagcctcaggtcttaccctggtctggaaatcaagcacaaatgagcccctcccaatgtcccaggcaccactgaccccacaaccactgtgacgagtgggattcatgacaacaatctgcaaaggaagaaactgaggctcagtgatgggacattacaaaccaaggtcacgtaggcagcggatgataaccagtcatcaaataaatatcaactccctcccccactccccaaatcaaagctcaaacataagtcattgttcccaaaatgttgaccaggaattgaggtgcagagggacggctaaggacgcaatgggcaccgaggaggcaggaaagactcagaggtttcttcccgggggggagggagtggacgctggagcaaaaacatttaaaaaggggaagttaagaggggactatttggttgaaagaaaacccacaatccagtgtcaagaaagaagtcaacttttcttcccctacttccctgcatttctcctctgtgctcactgccacacgcagctcaacctggacggcacagccagaggcgagatgcttctctgctgatctgagtctgcctgcagcatggacctgggtcttccctgaagcatctccagggctggagggacgactgccatggtaaggaccccacaacgctgtgctgatggatgggctgaaggagggagggtgaccatgtgggaagctgtgagaaggaaggggaagccactgctaccctcatcaggaagggcagacacaagaagcaccagttctatttgctgctacatcccggctctcggtgagacgaggagaaaccagacagacagtggctgggggtcaggaaagaccccattacagtctgaaatgtctgcagagggcccagtgcctgcccccacctcagctctaaaagaatgagagtcaggctcctgggagggcagttccgcttcttgtgtggctgcagatgacaacaccccatgagaaggacccagcctctgagtgtccacacagggtgggaaggaggggaggctatttctctctgtgtgtctctgtcccgccagcaccgagggctcatccatccgcagagcagggcagtgggaggagacgccatgacccccatcgtcacagtcctgatctgtctcggtgagatttgaagagagaggggagcttctaacctaggagggacctcaccccacagccaaactctggtccctaaggagaccccaggggctcacaaagatcccagggaggggaggacctgctcaggcttcagggggcaaatccctcacagggaactctcttccagggctgagtctgggccccaggacccacgtgcagacaggtgagtctgtccccagctctcccaggtccctcctcctcactggggacaaggggccacctccgtgcagctggggatggggattagaagttctggactgactgatgggggcatctggagggtcctgggctgagagctgagatctgttgggtgggaaatgacttcgaatctgacctttgatttccttccagggaccattcccaagcccaccctgtgggctgagccagactctgtgatcacccaggggagtcccgtcaccctcagttgtcaggggagccttgaagcccaggagtaccgtctatatagggagaaaaaatcagcatcttggattacacggatacgaccagagcttgtgaagaacggccagttccacatcccatccatcacctgggaacacacagggcgatatggctgtcagtattacagccgcgctcggtggtctgagctcagtgaccccctggtgctggtgatgacaggtgagaggacactcagggatcccagccccaggctctgccctcaggaaggaggctctcaggggtgtctccctctcacagcccagccctggggatgatgtgggaggtgggagccccatttaacacggtgcctccttctctcctaggagcctacccaaaacccaccctctcagcccagcccagccctgtggtgacctcaggaggaagggtgaccctccagtgtgagtcacaggtggcatttggcggcttcattctgtgtaaggaaggagaagaagaacacccacaatgcctgaactc

SEQ ID NO: 8060 - DNA, 6000 bp, Homo sapiens
aaaagggtgtcctccccattttattttattttattttatttatttatttgtttgtttattttggaggcagagtttcgctcttgttgcccaggctggagtgcagtggcatgatctcggctcactgcaacctctgcctcctgggttcaagcaattctcctgcctcagcctcctgagtagctgggattacaggcatgtgccaccacgcccggctaattttgtatttttagtagacacggggtttctccatgttggtcaggctggtctcaaactcccaacctcaagtgatccgaccacctcggcctcccaaagtgctgggattacaggcgtgaaccactgtgcccggcaatgtcctccccattttagagctgagtggatgtcatcacatcattccattagtgtgcatatccagaagcatatctagatcagccaaagcaacagagacactgaagagattagtagcttccaggccctggagggtgacaggcaatagggagagacggcctaatgggcgtggtgtctgctttaggggtgatgaaagtgttttgcaagtagatagaggtgggggctgcacagcgttgtgagtgtgacaaattgctcacgttcaaatagctatttttttttgtggagacagagtctcgctatgtcacccaggctggagtgcaacggtgcgatctccgctcactgcaacctccacctcccaagttcaagcaattctcctgcctcagcctcttgagtagctgggaatacaggtgcctgccaccccgcctggctaattttggtatttttagtggagatgaggtttcttcatgttggccaggctggtctccaacgcctgacctccggtgatccgcctgcttcagcctcccaaagtgctgggattacaggcgtgagccagtgcgcccagcttaaaatagctaatttatttatttatttatttttgtgggggacggaatcttgctctgtcgcccaggctgggagtgcagtgatgtgatctcggctcactgcaatctccgcctcccgggttcaagtgattcccttgcctcagcctctcgagtagctgggactacaggcgcccgccaccacacccgggtaatttttttttttttttggtactttagtagagacggggtttcaccatattggccaggatggtctcaatctcctgacctcgtgatccacccacctcagcctcccaaagtgctgggattacaggcgtgagccactgtgcccagcctaaaatagctaattttttcactgggcacagtagctcatgcctgtaatcccagcactttggggggctgaggtgggaggatcacttgagtccaggagtttgagaccagcctgggcaacatggcaagaccccgtctctattaaaaagttaataagttagtcagatgcagtggtgcatgcctgtgatccaagctactcaggaggctgagacaggaggatcacttgagcccaggaggtcaagggtgcagtgagccgagatcatgccactgcacttcagccttcgtgacagagagagatcctgtctcaaacaaaacaaaagactaatttttgtgtttaaaggaattactaaatgattggctggagagttcctcttcctgtatttgaaccccggctctgccacttattagctgagtggcctggggaatgggacttcacctcactcagcctccatttccccatttgtacaatggagctagtacatccgacttcttaggtttgggaggagtgaagaaggcccatcaggcacttagaacagagcctaacagatggaaggaactccaggcagttttgttgttgttgttgttgttgtttttgagatgggagttttgctcttgtcgcccaggctggagtgcagtggtgtgatcttggctcactgcaacctccacctcctgggttcaagcgattcttcgcctcagcctcccaagtagctgggattacaggcatgcgccaccatacccggctaatttttgcatttttagaagagacggttttgccaggttggccaggctggtctggaactcctgaccttgggtgatccaccggcctcagcctcccaaagtgctgggattacaggtgtgagcaggcatagttattgtcatcattcaaacacagatccctccaatcagccatgaccccggaccctcacactcctgccccttggtctgacccttcccttgttctgcctagtgctggcgtgggtcgcacaggaaccctcattgccctggacgtcctgctccggcagctgcagtccgagggtctccttgggcccttcagctttgtaaggaagatgagagagagtcggccgttgatggtgcagactgaggtgaggcagtccctcagcaacacaggacgggaggcagtgggacgagggaccctggggctccacgcagctcagacctggggggacgcctctcactcccgtgcctgcttcccaggctcagtacgtattcctgcatcagtgcatcctgcggttcctccaacagtcagcccaggccccagccgagaaggaagtcccgtatgaggatgtcgaaaacctcatctacgagaacgtggccgccatccaggcccacaagttggaggtctaagtgacgagggggctgggtcggcagcccaggcatcctcaagctctggacacccacttgagcccagattcctggaagagcagagggctgggctcccagactcctgggtgctgtgggaggagggggctggtatcccaaactctggtttccccaggagagagtggtctggtgggcttcagatgagtcctatgggagctggggatctggattcctggttccctgaaggaggagagggatgatagcttggattccctaggtctttccaggatgcagaaagaaacaggctggggcctggattctgaggcaggaaggaatttgggtctggagttctggctacttgaggaccaaaggcaggaaggatcctgccttgattttacttcagaaaccaaatcagtcttctataatctggggtcggagggagtccctgtgcccaaggtctctctgcaccccaccatccacatgtatttttccttctatcccataatttattaaatcactgttctccccagagacagttgtcccatggatttctgggtctggaaataatattggattgggagtagggatgggttcctggtatctagggatcgaggcgaacgtccaggaggggactagagggacccacacatttgcacatgaaaaaatgtaggtttgggtggttgagtctctcagagaaggcagtgtccagacgtctgtgtccagggtctgggcagtatggacagggctcgctggagctaggtgcttggggacttgccttctgagcttttcttttactcttctctgttgttgttgttgttgttttgttctgtttttgtttttgtttttgagacatggtcttgctctgttgcccagactggagtgcagtggctcactgcagccttgacctcctgggcccaggtgatcttcccacctcagcctctagagtagctgccatcacaagtgcgcaccaccacgctggctcatttttgtagagacgggattttgctatgttgcccaggctggtctccagctcctgggctcaagcattcctcctgcttcggcctcccaaagtgctgaggttacaggtatgagccaccgcactggccgcctcctgggactggtgttaggggaacttagagggcgatgtctgggggctgatagctggggactttgatgctgaaccctgcagagtctgggtctccaatgggggtctggggtctcctaggtcctaggactgagtatcctggcatgccgttctttgggctatacagggtgtgtgtcgtgtgtgttggggcgggaggagtggagtggtctggacggccaacgactggaccagaaggcagaaaatgctaaagcaccaggataaacatctgtgggcgtcatcgaggttcccgggtggaggcgggaggaggggcggggcagggctttccgcctacccgagaccaaatacgggcacacacaatacacaccacacacgcgcgcacacgcacacgggcacacacgcgcgcacgggatcctgctccgctccgcggctcccccgccccggagagctccgcgatcagcacccgggacagcgccaccgcccacgtgcagggggtggggtccgggcggggctggcgcctcggcgtctcccgggagtgtcccgtccagccgccgagcaggtaggagctgctgggacccccgccctcagcccatccgcatccgcatccctagaggaaaggggtgtgcgagtgggggctggggcactggggagacaaccagagggagggcagcagcctgaagcggagagacagggatctggggacgcgagacaggtatggagaagacaaagagccgagggcggggagtggggcgcaggcggaggggagagggagagaccctggagacagaggccaggcgatagggaagagagacaggcgggttggggaggcagacacagggaagacgcctatgtggggtcaagaggcagcgtggagaccgaggcggtcacgagagcagcacggatgcgtggagagaccaacaggccaagaaggatgagggggctcagcacaggcaccgggcagcccccgacccgccctccagcaaaattggggagagggaagagggaacctgcgtctcagctcccaggaccaggtgcggagggagcagtcggctgtgggcgctcggaccacaggctgcccgctccccacctcgcgggacctcaggatcccagtcgggctattggggggttcccaggcaccggtgggccccggagcgagcctgccccgccgggactccgcgtctgtgcgtcagccccgcccgttgtcctggcaacaacccgttgcccgggcaaccagctttgctctcaccccgcttgagaggagcccggctgttgctctgggcaacgcggtctgctggttcccacgtctgccttcgcccgcttccggttcagaccctgcggaggggcgaggacgaggcagaagtcagcgggatgcctgtggggccgtggaggaagagggtatccctttaggatggaactaggtcctggacaccccctctcaagtgcggggaggctgatactacaactcccagcatgactcgcggtggctgtccggtttctgcgcggctgttcgcgcaaaggcctcatgggagttggagttctttgttgtgcgtggggctcaaaggacgtctggggtgggaatgggggactagggtgcttgagtgtctctgcagaaaagactccaggaccccgccaccatgttcccggagcccccaaccccggggcctccatcgcccgacacgcctcccgactccagtcgcatcagccacggcccaggtgagcaagacccgggggtggggggccgagcagagagaaagcctggccaggattccgaggggcgggattcggacgggtgtactcgggcaggcgggctggaaaatccggctgggatcccgggtcgtcatcctggactggaatgcgaacgaaatggggtaaaaggaaggaacagatttgcaaaaaaaaaaaaaaaaaaaaaaaaaaaaaaatcgaaaccggatcaaggggtgttgcatggaatgggatcttagaattggaaggtccacctagctcttcttttacagataaggaaacaggcccgatgaggagcagggcttcttgtaaaagcatcaggagttgagcagaaatggggggcggggtcgggtaaggaaaggcagaactaacaagcaagcaaatccagatggtgtcagcctgggttggggcatcgaatctctctataggccacattaggtggaagaaaaacacaggaagaaatgcaatgaaaatggctggagggaaaaggaggccagcattccagcttccacgtgtaatcaggactgaatcagcctgcgtgctgcccaggcctcaatgtgtgttgtctccacccctctgcagtgcccccctgggccctggcca

SEQ ID NO: 8061 - DNA, 6000 bp, Homo sapiens
tggtgtcactgcactccagcctgggtgacagagggaaactccatctcaaaaatttaataataataaaataaaaaaatagaagtgtgtggcacctcccgtcctctctctcttgctcctgctttcgacatgttatgtgcctgctccctcttcaccttccgccatgagtggaaaagctccctgaggccttcccagaagctgagcagatgccagcaccacgcttcctgtacaacctgcagagccgcgagccaattaaaactcttttctttataaattacccagtctcaggtatttctttatagcaatgaaagactggcccaatatagatgggggaatttctaggggcttccatttcttcttcccaccatcaaagctttcacactacagatcagggaagccaaagcattgtgtctgccattttatgagaatgtcgatttcaacttcactctcaaggcctgaggaaggagccacacagggtctttagagtcccgttgacccactgtgtgatggtctttaggtgaaccctccgttcgttacctgacagccccaagcacaccagtcagaccatgattcacggtgacctgtgtgtgcctccaaattaggattgattcagagtcagagtccagtagccttttctctttctctaatccccagcgaccatggatattggcctttaggagaaactgggaggaaggtttacagtatgtactttgactagtatcggtgagtcctccctgagggaaaagcatccgctacatggaaggggttccaagactgagaactggctcaggactggtaacaggtgtgaggctttaggggtggacgtcgctggtgcttcacccagatctcctttgcaggcactgagcactcattcttaagcagtgttggctgcttgcagatgccacattctcaagagacttggtcttggctgggcgcagtggctcacacctgtaatcccagtactttgggatgccaaggcaggcggatcacacgaggtcaggagttcgagaccagcctggccaacatggtgaaaccccgtctctactaaaagtacaaaaattgaccaggcacagtggctcacgcctgtaatcccagcactttgggaggccaaggcaggcggatcacgacgtcacgagatcgagaccatcctggctaacatggtgaaacaccatctctaccaaaaaatataaaaaattagctgggcatgttggcgggcacctgtagtcccagctacttcggaggctgaggcgggagaatggcgtgaacccgggaggcagagcttacagtgagctgagatcgagccactgcactccagcctgggcaacagagccagactctgtctcaaacaaacaaacaaacaacaacaacaacaacaaaaagtagctgggtgtgatggcaggcgcctgtaatcccagctactcgggaggctgaggcaggagaatcctttaacccgggaggtggaggttgcagtgaggcaagatggtgccactgcacttcagcctgggtgacagagtgagagcgagatttcatctgaaaacaaaacaaaacaaaaaaaacaaaaaacttgctcttgacctgagaggaacgtgttttactaggaaagtcatgaaactctcacccctggagaagcccatagacaaagattagaggttaaaagttcagatcctgtctctgtgatgggatccctctgaagtgatagcctcacttggctccttcctctgccccatactgctttcatcactctctgtcttctgaaagcaaaccctcaaacagttcatgagcatctgaatccctgcctcaggctctgcttctgggaaacctgagcccaggccctctgctgccccactgtggtgactctggttcctgctcaccagacctagagatggtatcattacatacaccaagcaacgctctcttggtgcttctcatcacacaggtaagaggaattgaaaagaactcaggtgatgagggtcgtgctaatgggactctcattagtggctccgtggaaatttctgttcttaaggggaaaagaggagcacggccgagtctctcctgaggttgctgctaagatgttggctggggctgcattcatctgaaggagggactggagttggagggcccgagtccgaggtcctacaggttttgtttttggtttgccttccccatacacaggcagctgctccaggaggactttggaagctggggaatgtgggtcattttgtggagtggttgatttttttattgtttctttttgttttttgagatggagtatccctctgtcacccaggctagagtgcagtggtgcgatctcggctcactgcagtgtcccctcctgggttcaagcgattctcctgcctcagcctcctgagtagctgtgattacaggcatgcaccaccatgcccggctaatttttgtatttttagtacagatggccaccatgttggccaggctggtcttgaactcctgacctcctgcctgaggtcatccacctgcctcgggctcccatagtgctgggattacaggcgtgagccaccatgcccggccgaggagttgggttttgaagagaaagcaagtagggtgtggtaggacggtgggtgtggagtcaatgtaagtgatgcatttttttatagacagggagggtgagcatgtttataagttggggatctagatgggagggaagagagatagagggaagagacagtgaggaggaggaggaggaccaggagagagagagagacatcaaaaagtataggggagacagctgggtgtggtggctcatgcctataatcctagaactttgggaggccaaggtaggaggatcacttgagtctaggagttcgagaccagcctgggcaacaaagcaagaccctgtctcaataaaaaaaaaattttttttaagatatagacgagaaacagagaaaggttaaaacagaaacccaagcaagtgattggcatgaattacatccggtgcccactgaaaggaaacttctcgcaaccaaacctttgtgtatacagatggggaaactgaggctctcagagacagagaaactgacttctcaaagtggtggtgtgagaacttatttatttatttgttaattttgagacagagtctccctctgtcaccccagctggagtgcagtggtgcaatcacagctcactgcagcctccacctcttgggctcaactgatcttccctcttcagcctcctgagtagctgggaccacaggtgtgcaccaccatgcctggctaatttacttctactttttatagagacgggatctccctatgttgcccaggctggtcttgaactcctgggctcaaggaatcctctcgtctcagcctcccaaagtgctgggattataggcgtgagtaaccatgctcagctgttttgtttgctttttttttttttttttttttctttgagaaagagtcttgctctgtcacccaggctggagtgcagtggcgctatcttgactcactgcaagctccgcctcccaggttcacaccattctcctgcctcagcctcctgagtagctgggagtacaggtgcctgccaccacagccagctaatttttgcattttagtagagatggggtttcaccatcttagccaggctggtctcgaactcctgatctcaggtgatctgcccacctcggcctcccaaattgctgggattacaggtgtgagccaccgcgcctggccattgttttgctttctgagacaggggctcactctgtcacccaggctggagtgcagtggcacaatcgcagcttactgcagccttgacttcccagtctcaggtgatcctcccacctcagcctcccggtagctgggactacaggcgtgcactaccatgcctgggtaattttttctctctttttgtttttctttgtaaagatggggttttgtatattgcccgggctggtctcaaactcctgggctcaagtgatcctcccacttcagcctcctgagtagctgggcacacaccaatatgcccggctggggtttctattcttcatttccgcactatatgtgagatgaaggcagtccacgtgtgcacatagtaagtcaacaaaaacaccttgaaaagccctgggtgtcaggccccttctgagcacaggtggcctagggatgaactaaaaataaacatgactaatatttatcaactgtttaaaatgggccaggcattgttccaagactttccacgtagtaactcatctatttctcttagcatatttacaagggtgcccattctttagagatgaggaatctgagtcactgtggatttaagtcatttgctcagggtcacagatggatatgcaaattagagagtctggggtgtggaagacagtgcacagggtcctgaccaggctagaaaggccccaggcccggcatgggtcatttccaagctgaatcctaatggagcagtgggtaggagactgttagggggaaagtaggcaggtgcatctggtgggggagacagtctaggcaaaggccaagaggcaggagcccgctgggctcattttgtgagagctgcaggggcttgtgggagacggagaggggaaaggcgtcagaggctgaatggaagagcgtgctccagggacgaggggcatgaggtctaagccccaggctgctcttgatgtgtgatcacccaccagggaggcgagggagtcagctggcctttctctcagcaccccctgctctcatcctctgccccacgtcccgcatccgtgcagcagtggggcgcggcacccggtacctggggtgcagagggagatttcgggggacaaagtggagtgggctgggggctggagaaaggatgggaggcatctccagtgtcagagctagaggcagcggtgagggaggaaggtgagggccagcggggcagggttgggagctgggttccacttcctcctcctccccttcccgccctggcctctggcttcaccaatgatctggtaaaggggaaattcttgagtgtaaagtccagcaggtggaaggactaggcctgggactcctgggtccccggcagtgtctggaggcatggctggggctggcgggggcctcggggtctgggggaacctggtgctgctggtaagtgctccccgcccagagcgggctcccaaggcagggactcccaggtctgagggagaaggagctgggtgcctgcacctcgatcttgaggaagtaggtgctgaagatcccctggagaaggaagagggcttcaggcttggcagagactgtaggagagtcttacacctgggctcttagatactgtcgtgtctgctgcgggggacaccagcttcacccgggcccttagacattgtcgtgtctgttgtgggggacaccagcttcacccgggcccttagacactgtcgtgtctgctgcgggggacactggcttcaggcaacacacagctgtgctcacggacaggaagcagcccctcctccctcaaaccaagagtccagaccccagcccctcctccctcagacccaggagtccaggcccccagcccctcctccctcagacccaggagtccagaccccagcccctcctccctcagacccgggagtccaggcccccagcccttcctccctcaaaccaagagtccaggcccccaacccctcctccctcagactcaggagtccagacccccagcccctcttccctcagactcaggggtccagacccccagtccctcctccttcaggcccaggagtccagacccccagcccctcctccctcagacccaggagtccagaccccagcccctcctccctcagactcaggagtccaggcccccagcccctcctccctcagacccaggagtccagaccccagcccctcctccctcagacccgggagtccaggcccccagcccttcctccctcaaaccaagagtccaggcccccaacccctcctccctcagactcaggagtccagacccccagcccctcttccctcagactcaggggtccagacccccagtccctcctccttcagg

SEQ ID NO: 8062 - DNA, 6000 bp, Homo sapiens
ttttagagtatgaggctttgtatttcttttaagtttattcctgttttcttctttctgttactattgtaaatggaattttcttgaaattgttttcagattgttacaagtatatgaaaatacaataggtttttgtatgttgatctttcatcctgcaaccttgctgaactaatgtatgagttctgatagttttagtggactccttaggattttctatgtacagaatcatgtcatgtgaatagagttcattttccttcctttcaaatctggatgattttaatttccttttcttgcctggttgccctggctagcctccgggacaatgttgaacagaagtggcaagaacaggcatccttgttttgttcctgatcttagggggaagcattcagcgttttgccatgtaagcatgctgttagttgtggggttttgtagatgccttatgttaggttgaggggcttcctttatactccttagtcgttgagtattttagtttacttttaactatatacagatatattactttccagttaaagtagtcagttactctgttaagacaaaaatattgggtcagcattttagacatagtatatagtcccatactgcatctttgggtcagcgatggaccacatatgacagtggtcccgtgagattataatcctctatttttgctgtatttttcctatgtttagatacacaaacatttaccattgttagaattgcctgtagtattcagtactgtaacatgctgtataggtcggtagtctaggaacaataggctataccacagagcctaggtgtacaggaggcgccaccatccaggtgtgtgtaagtgcactctagaatgttcacacaatagcaaaatcgcctaatgatggcgtttttcagagtgcaccctcgttgttaaagcttagttttagtgttactttgcttaccccttccccggttgatcagcacgtaggttgcttggattttcttcatgctcacaggtgtgtgttagtcaacattcagccagtgtttttggagcagctatgggtgcctggtggtttctcagggctgaggatacagcagtggcaaaactcagccatctctgccttcttggagtttctagttggagggagagagtagtgtgaagcctctgtccagagggtgggcctgctggtgggaaggcctgtcactgtggtgaccgtgtgaggtgacggctgggaggtggcttgagagctggtgagtgggtctgtctgctctggttgccatggctgaggctcagcccacttccccagggcctgccctccacggatgactggcgacggacggtctccttacggccgcattctgtccctgcccgcctgtgttcttgccgttggctcagaactccctctcccagcctctcctggtgtcgtcacaccccaggctccctggacccttctgtgacctgcctgtcatcccagcccgctctccttgggctgaccctgggctgcagggaacaggatgggtgtcggccggtctgtcccacacagctagctgacgaggtggtttctggggcaggagtggaggcagcacagacagtgaggacgaagaagaggaggacgaggaggaggaggaagacgaggagggcattggctgtgcagcccgtggaggggccacccctctgtcctaccccagccctggccctcagcctccaggtgaatgaatgggcggtgtggtcaggtgtacacagggctgtctgcctgctactgagttcaccctccatcccgctcccccacctctatcccaggccccagctggacagccacctttgacccagtgcctacagatgccccgaccagcccccgagtctccggggaggaagagctgcacactgggcctccagccccacaggggcccctcagtgtgccccagggcctccccactcagagcctggccagccctcctgcccgtgacgccctgcagctcaggtgagaaccggatggaacgggctaaatggtgctggtatcccgaggccaggaggtggccatggggtccccgtcctctcataggctcgagtgctaaccctagctgcccccttgggctgcctctctcgcctaccaggtctcaggaccccacacccccctcagcacctcaggaagccacagaaggcagcaaagtcacggagccctcaggtgagccccgctttgccctgcccacccgcggccctgggcagagagagcagcctggccagctccgagcttgctgggagctgcagctgagatctcttatcccccacagccccttgccaggccttggttagcatcggggaccttcaggccaccttccacgggatccgttctgcccccagctcctcggacaggtgagcagcgaggtggggctgcctagtatcgggagaagtcttttctcctcttcgctgaggtgggctctgggttcatcttgtccctgagctgctccaggcctcctttgcaggacccccaggcgcagcctcatgttgtgccccagccccttgcactctgtaggctggttcttctcttagtagcctgggatgcttggggcccttgagccccagggttgggaagggctcgttggagggtgtgaaggattgggagggtgagagcatgcagaagaccctttggggctgtctcagccggcctcgagtacctcctccacagggacaggaggcgggaagaggggtgcttgtcttcctgtccagggctgtgctgtccctccacgctgagccagctgcgtcctcgggaggcccctccccgtggggcaggtggcagacacacacccagtgagccgacttcagtcgggtgggatgtgagggtgtcagcaggtgacggtgggggccacgctgacagccgcacctgcctctcacccacagtgcaaccagagacccctctacctctgtcccagcctccggggcccaccagcccccccagaccacagaaggggagaagagcccagagcccttggggcttccccaaagccagaggtgagcaccagggcagcagggcgggggggtgggggtggggctggtggggcaggaagtgacctctgcacatcccctctctcccctgacagtgcccaggccctcacgcctcctccgatacccaatggctctgccccggaagggcctgcatccccaggctcccagtgagtgtggctgcagcctcgggctgggtaggtggggctgggcctgctagaccctcacacgacatctccctctgtttccagatagctgcctggtgcggcagcggcggccaaatcttccgtcctcccgtggatctcccggggtgggggcagggcgggtcccacgatggcccccattgccctcatcaccctgacacccccacattctctcctctggacccccaggaggctggtgccagggagacaggcccaacccacccccatttgcactgagaagagaagttttggagcgttgcctcctagaataaagatacagagagtcaaatagagagaatggagagagagaaacatatattatatattatatagagagagggaggagagcgagagagagtgaggacaccgaactgggctggcggctccaaagcacagccttccctgttccgtcccagcgggagctggtgttaggggtcccaaggttgccacccacgtgcccagctgtcccacgctgcagcgcagacggccacgcccacacccggccttttagctcaggtccaccatgggggacggcccagcgtgggtgggggtgccagagggtcccgagtgggggccgtgcctttgcccagaccctgcactttcaaccaggccagtccggctctggggagcaggggcctccccggcaacagccccaggggccttgagggtctgaggtcccagccctgttgccaagtgaccttgtccccagctccctcctcccaggctggtgtgagtgtgcgtgcgtttgtgccgagcttctatttcatattgcaaatataaataaaggaaggcagtttacgattctgctggtcagaccttacgttctgggatgcggggtggggagcctgtattatccctgcaccccagaggctgggggtgctcctgacccagtctgcccccacactgtcctgccagagggagccctgtggctgcagaggccccaggctgggccaggcactggctgtgagggctcctgccaggtctaccccacctgtgggcagggccttgggcagaggatagaagccaccgacaggctcaaatccctgctcctgcccctgcttacccccagtaaccaagcccagcattgaggctgggtactggcgcccagtaggtctgagtctttcaggtagaaggtagaagtgtaggctgcgtgtgcagcgagtggcaccggtgagcggcgctgggaaaccggagcgtgtggaccgggccatgaggacagcgtcctcactggggtggcagttggcttggaggtcacctgggggctcgctcagctaacaggagagggtgcttgttccccgcattcgtggtggtccctcctggtcacccattgaagcagtgtttgtggtggagcccctgagggcttggtggggttgagcagaatgaggaaaggtttcatggagcagggagggagacggctagggcagcaagtgaaggacagactcgccttcccatccctccaggggcactcctgccagccagcccctctcccgcttcccatgatggggtggctgttggaattctgcaccccatctcttctgattgttggggcccaggacaaggggacaggcatttgtgggcctaacctccccaggcagataggaggaggaagccatgtcccagcaggctagggcagagggacccccagtgccaacagtgctttatcagcgggcgccaggcagggccatccccagggtgaggacaacatctccctgggccctgttatcagtcacagagtccacaggacgctccttgggttaacgtgtaaccatgagccctcccctccaccccctgaagccactcgctcccagattaggtcgctctggggctatcaggccagcatggacgctggcaaagcggggcagaccctgaagactcactgctcagcccaggtgagagccttctgagctgtgcctggggctggggggacagggccctggaaccccagcagccggcgggtctgggagctgctgtccttgagttggttgggccctgggaagctgggttctggcagcctggtccctgaatgggtccagcctgtacagctggggtcccaggtgggggtgggacaggagccatgagatctgagtcccaagaatgggggctgggctgggtttcggctcagtagctccccactccccaaagcgcccagatgtctgcaggtggctgagccccttcatcctctcctgctgcgtgtacttctgcctctggattcccgaggaccagctgtcctggttcgctgccctggtcaagtgcctgcccgtcctctgcctggctgggttcctgtgggtcatgtccccaagcgggggctacacccagctcctccagggagcccttgtgtgctcggctgtgggggacgcttgcctcatctggccggcagccttcgtccctggtgagtggaaggtgctgtgacgctttccagatgcccgtgtgagagaggccccagcacttggatgggagcctgggtgcagagggctcctgtgagagctccagtggtcaaaggcacagtggggggcgcagccgtgaccgaggcagctcacgctccagcgaggggtgggggcaggcggtgttagggcagtagctgaggtggcgcagagggcagtgaggacctgctggaggtactgcagtttgaagcagggttgctgaggaaggcctcactgaggaagtcacatttgggcagagctgaagggctgtatgcctgtgtggaggaagggcgagtgtaaaggctccggggcagggacgtgtcaggtgcttgtagcccagcaggccagggtggctggcgcagagtggctggagagctggaggccatggggctttggaggccaagggaag

SEQ ID NO: 8063 - DNA, 6000 bp, Homo sapiens
tatcatatgatgtaaccccttaatatcatatgatgtccagtctatgttcagatttctccaatgggctgttttggtttggttttgtttttagagacagagtcttgctttgtcacccaggctggagtacagttgtgtgatgttggctcactacaacctctgcctcctgggttcaaacgattctcatgcctcatcctcctgagcagttgtgattacaggtgtggaccaccatgcccagctaatttttttgtatttttagtaaagacagggtttcgccctgttggccagtctggtcttgaacttctggcctcaagtgatctgaacacgttggcctcccaaagtgctgagattacaggtgtgagctactgtgcccagccaattggctgtttttttgtttgtttgtttgtttgtttgtttttaacaattaaacagtctccccattgtatttgcttgtaggtctctgttcccctttcatctgcatttcttgttaaattggaaactttaactagaggtgttgttagattcagtttttttctttttcttttgagacagggtctcactctgtcacccaggctggagtgcagtggtgtaagctcggctcactacagcctccccctcctgggttcaagcgattcttccacctcagcctcccgagtagctgggactacaggtgtgcgccaccacgcctggctaatttttgcattttttggtagagatagggtttcaccatgttggctaggctggtctcaaactcctgatctttcaggtgatccacccccctcagcctcccaaagtgttgggataacaggtgtgagccaccacgcccagccccctatatcttattaatccatgtgtccatacgtcaatacaaccatacaaacattcaccaacccacccatctacctactcacctacttcctcactcattcattcattcatccacccacccatctatccatccttacacctatccatctttctctttttctttttttttttttttaagacagagtctcactctgtcgcccaggctggagtgcagtggcgctatctcggctcactgcaagctccgcctcccaggttcacgccattctcctgcctcagcctcccgagtagctgggactacaggcgcccgctaccacgcccagctaattttttgtattttcagtagagacgggtttcaccgtgttagccaggatggtcttgatctcctgacctcgtgatccgcccacctcggcctccctaagtcctgggattacaggcgtgacgatcctcacccagccacctatccatctttctacccccctgcctctgcatgtcactgtccagccatccatctactcactcactactctaactgtccacccatccatctactcactcactactctaactgtccagccatccatctactcactcactactctaactgtccacccatccatctactcactcactactctaactgtccacccatccatctactcactcactactctaactgtccacccatccatctactcactcactactctaactgttcacccatccatcttctcactcactactctgtccacacatccatcttctcactcactactctgtccacccatccatctactcactcactactctaactgtccacccatccatccactcactcactactctaactgttcacccatccatcttctcactcactactgtaactgttcacccatccatctactcactcactactctgttcacccatccatcttctcactcactactctaactgtccacacatccatcttctcactcactactctgtccacccatccatctactcactcactactctaactgtccacccatccatccactcactcactactctaactgttcacccatccatcttctcactcactactctaactgttcacccatccatctactcactcactactctgtcacccatccatctactcactcactactctaactgtccacccatccatctactcactcactactctaactgttcacccatccatctactcactcactactctgtccacccacccatctactcactcactactctaactgtccatccattcatctttccatccatccaccatatccatccacctgcccacccatctgcttagctgggcattcatttatcgtaatcaagagtgatttgagcttcgagtcagtgacaagccaaaataaaaattaaaaatgtggctgggcacagaggctcatgcctgtaatcacagcactttggaggccgaggcgggtggatcacctgaaaggtcaggagttcaagaccagcctggccaacatggtgaaaccccgtctgtacttaaaaaagtacaaaaattagccagctgtggtggcgggtgcttgtaatcccagcaactcagaaagctgaggcaggagaatcgcttgaacccgggagggagaggttgcagtgagcggagattgcaccactgcactccagcctgggcaacagagcgagactccgtctcaaaaataaaaataaaaaatttaatatttacagcccttatttagcattgctcactttataacaggcacggagctttcccggcatcctggagacaggatttgaacccaggcctgcctatgctcttctagtgagagcagtcctggctgggccaaggacacaaagatgaactcagtattgtcctgtatttcagggtgtgggggtgggtgagcacaggtgctaaaagcagcttcttacaacaatttggaagcatgacctgaaaccccctctcctgtcatctcccaggagccacctgtgttctggcccccaagttctctacttcctgcttctgggatgactgtcggcagcatggcgtgacagtgatcctgtatgtgggcgagctcctgcggtacttgtgtaacattccccaggtgaggctctaagattagggctccatggtgaacacccaagtatgaaatcccaggtaaaggtctcaggtaaagattcaggtactgaactcaagtccctcagataatacacctcatgcaagaaccccagataatgagtttcagacaaggcttccaataatggtttctttgatagctgtgctaccttgagcctcagtgtcctcatttggaaaacagggataatagcccctacccctatcatgagaatttccattaaaaattaattaattaaaattaaatttccattaaattaaagttctaggtaactactcttaggtgagaccccagatgaggcctccagtcacctctggtaacgtcccccaggcaaagctctgaggtcgcccctgcaggtaaccctctatttaagactccagtaactactctcatgtaagtaacccaggtagatcccttaggtagaggtcccccatcaccttccaggtaactcccaaggtaaggacccaggataacaccccctctaggtaaaggttccaaggcatgccccaagagcacctcctcctcacccttctggggacattcctgtagcaaccagaggaccggacacatacagtccgcctggcaatgggcaatggactacgggctgatgtgtgggagaccttccagcagcgcttcggtcctattcggatctgggaagtctacggctccacagaaggcaacatgggcttagtcaactatgtggggcgctgcggggccctgggcaagatgagctgcctcctccgagtgagtgtgcgggtacctggtgtgcagctgccctgaggctgagcccacaggacctatgtcaacactccaccctccaccccagatgctgtccccctttgagctggtgcagttcgacatggaggcggcggagcctgtgagggacaatcagggcttctgcatccctgtagggctaggtatgggggttgaggagcctttcctgggtggcaggggtggcgaccctcagtcttctgcttggctggaacgagctgctcaaaagcttgacgttggtgctcactagaggggtctgcagccttcatctggaccctgagccagtggcctgccttaccaccatctggggcctccgcctcagcttctcggctctgtccagctcccctgccttgatctcttgctctgatttactgggtctctgggtgtccatctgatttgttctcttgagctttctgtggaagacggcattccagccattggtcccttgtcctgtaccttctgttagtgtcttctcccagggccttgcaaggtcctggtcatatctattctcactgccatttgtctgtccgtcttccatcccttgttatccttttcctgtttctcatgggctccccataccgccttctctatacttctctctcattttctgtgtcgcttgtcgcagtctctcaaggtctctgaatgtctctctcatctctggatctccctgtctgtgtctttgggtctgtccttggcagggtgctgggtgatgaagagtccaccgttgttgaaaacctccagcagggggcttggctggtgggctccaggggttcttgttcctgctcctaccccaggggagccggggctgctgctgaccaaggtggtaagccagcaacccttcgtgggctaccgcggcccccgagagctgtcggaacggaagctggtgcgcaacgtgcggcaatcgggcgacgtttactacaacaccggggacgtactggccatggaccgcgaaggcttcctctacttccgcgaccgcctcggggacaccttccggtccgaggcagggtttctcggggcggggctggcgcggggccacggacgctttcagatcctagagggagtcaggctgaagaggcgggactttcctgtcgtaagagggcggaacttggagtcaggacttctcacgcgaaggcggggcttctcgattttcgagggggcggggctgactgggcctcctgatccccaaaaggggcggggcgggggcaagaggcggggcctctccttcccgggggcgtggtcacaagcgccggctccctccttgcagatggaagggcgagaacgtgtccacgcacgaggtggagggcgtgttgtcgcaggtggacttcttgcaacaggttaacgtgtatggcgtgtgcgtgccaggtgcggagggttctcattttaaacttccaacagctttgtgggtggaggggtcgttattctgattttacaggtggggaagtgctagggcccagagaggtttagagacttgctggctctcacagccagtgagcagagctgggcgaggctggagggtcagctatgggccctcgagatgggtcagccgagagtgaccagactgctctctaggttgtgagggtaaggtgggcatggctgctgtgcagctagcccccggccagactttcgacggggagaagttgtaccagcacgttcgcgcttggctccctgcctacgctaccccccatttcatccgcatccaggtgagcccagggtggcctggtgggtgggtggaagatcatagccagggggcgggtggatgtcacagtgattggaccatggtcactgccctgcaggacgccatggaggtcaccagcacgttcaaactgatgaagacccggttggtgcgtgagggcttcaatgtggggatcgtggttgaccctctgtttgtactggacaaccgggcccagtccttccggcccctgacggcagaaatgtaccaggctgtgtgtgagggaacctggaggctctgatcacctggccaacccactggggtagggatcaaagccagccacccccaccccaacacactcggtgtccctttcatcctgggcctgtgtgaatcccagcctggccataccctcaacctcagtgggctggaaatgacagtgggccctgtagcagtggcagaataaactcagatgtgttcacagaagtctgtatgtctgcgtggatgaaggagcaatggaggagtgcaggggctagtgccctgaagaccttattttagggtcttccctgtctcccagcaaagaacctcagccatccctgtgggatgaccctgtc

SEQ ID NO: 8064 - DNA, 6000 bp, Homo sapiens
ttgtcaccaggctgcagtgcaatggcgcgatcttggctcaccacaatctctgcctcccgggctcaagcgattctgctgcctcagcctcctgagtagctgggattacaggtgtgcgccaccacgcccggctaatttttgtatttttagtagagacggggtttctccatgttggtcaggctggtctcgaactcctgacctcaggtgatccgcccgccttggcctcctaaagtgctgggattacaggcatgagccaccgcgcctggcctcttgttttatttttgacacagggtctcattctgtgctcaggctggagtgtgcagtgacgtgatcacagaaaggaaacctcagagcagagttgggtcttcacatacggtggccaggaaggccccctgaagaggtgaaacgttagcaaaggcctggaggaagtcaggacctctaagggatgcccagctgtgcagacatctacggggtgtctggggagggcaccgctgtgcaaaggccctggggcaggaccgcacctggcgaggcggaggagcgaggaggaggccagggtggctgccgcagggtgaggaggggagagcaggaggagggagggcggggctgacccagcaggtcgtgaagggccctgaggacacggagaggacacagggttttaccctgagcagggtgggagccacggaggcctctgctggagcagaggagggcacggcctgaattgggtttgaaggaatcgactgagggtaggaaggtgggggtagggaagcccgggggaggcgagcacaccagcccaggtgggcaccacggggcctgggctgggggctgctgtgggatggtcaggagtgggtgggttctgggcctgtcttgaaggcagaactcacaagattttctgagacgctgtggggtgaaggggagtgagaggaggggagggtcctggaagggcgggtgcaacctcaacccagcggaggaccctgctgacctgcttagttgtttatggagggtcattgccgtgctctaccacgtaacacacgtacacacacacacacaggtgcacgtttacaccacgtgggtgcgcacgatgaggcacacacaggcaggcgcgcacacacacgcgtgctcacataggaacacgaagaggcaggagccgggcgtgcccgagccccgtggcgccctgggcatcccaaacaccgcctgcccagaacaggtgcgcagtgagtgcctgctgagccagtgagtggaatgaagctctacaatagtccagatgacagacatgactgctgtggctgctgccgatccaagtcccaccgttcttttctctagagacaaggtctcactccaccatccaggctggcgcgatcacagctcactgacggtggagaagggtgatcagagaatggtgggaatgaggcggccctgacctcctggggttagcgatcctcccacctcagccccctaaagcaccgggagggcaggtgtgagccacggtgccagccccaagttcccgacattctttcctaaaacacatcctccggctgcagatgagggtgcgacagctgggaggcagctcccaggaggccgggttcctccgatgacctgctgtttctgtgtccctggcacacggcacagcaggagagggggaggccaggtgtttgtggctgctgccaccggcccgtccagggtcagctcatgctcccagcctccgtgatctgccactccccacttccctgaggctgctcactgctgtcctttgtccggcggccagccccctgactcagactcacgcgccctgctgctgcccgcccctttgttcccgggagactctaacaaggaaggcttgttcttcccgcaaggacacagagaacctgccagctcccctccatcctcatccagagagagcctgctgtccccgtgggacagtgaggacaggaccagctctcaggctctgctgggcacccagcccatgcctggcaagtcctcatgttacagacgaggacaccgaagctcagaggaaggaagggcttgtattccgaggatttggggggctggagaggggtcctagtgggctctgctgtagcctgcaaggtcctacaagcccaggtccttcctgccctctctggctgcgttggtccctccggactcagcctctgcactcaccgtacattctgcctgatacacccggtccaactccctccccctccaggaaggccttgctcaaatctctccacctccaggatcttccttggaccactgattgattgattgattttttgtttctgttgtttttctgagatggagtcttgctctatcacccaggctggagggtagtggcgcaatctcggctcactgcaacctccgcctggtgggttcaggcgattctcctgcctcagcctcccaagtagctgggattacaggcgcccgtcaccacacccagctaatttttgtcttttttaatagagatggggccgggagcggtggctcacgcctgtaatcccagcactttgggaggctgaggcgagcagatcacgagatcaggagatcgagaccatcctggctaatacagtgaaaccccgtctctactaaaaatacaaaaaattagccaggcgtggtggcaggcgcctgtagtcccagctacacaggaggctgaggcagaagaatgacgtgaacccgggaggcggagcttgtagtgagccgagattgtgccagtgcactccagcctgggcgacagagcaagactccatctcaaaaaaaagaaggaaagaaatagagatggggtttcaccatgttggccaggctggtctcaaactcctgacctcaagtgatccgcccacctcagcctcccaaagtgctgggattacaggtgtgaaccgccatgcccggcctatcgggaccacagatttgatcctgcaacctgcctatcatcatgctgcctgcccccttccctgccttttccttcttcccagcagcactctccacgcctcacctattgcagcggcggctggagctgctcatgccagctcctgagcccactgtgaagttcgcggcgatctgtgagctggttggctcatgttggcagccacgatgggagtatttacaacacagggggcggcgtgcgctgcaagtgagggccttttcccttggagagccagctgttcaacatttctccgcacagcaccacttcggtattatgcccgaggtttatggcataactagcctggctcatggtctctcttccctgctgctcactagaatgtaagctccttcgggccgaggtcagcccaccttgcactctgctgtctccttggcacttaaaacaacgcttggcatacagcaggcactcaataaagatgtgctggcagggcgcatgacgtgtgcctgtggtcccaacactttggaaggccgaggcgggaggattgcttgagctcaggaggcggaggttgcagtgagtggagatcgcaccactgcgctccagcctgggccacagagtgagaccctgtgtcaaaataataacaagcatgaggcaggggggatcagctgaggtcaggagttcgagaccagcctggccaacatggtgaaactctattaagggaggagaccatccctcatattgtcttatgcccaatttctgcctccaaagaaagaagtaaaaactaaaaggcagaaatgaaatccacaggcagacagcccggcgctgtgccctgggcctggtagttaaagagcgacccctgacctactgggttacgttatctatagattccagacattgtatggaaaagcactgtgaaaacccttgtcctgttctgttccgatctgattgccggtgcatgcagcccccagtcacgtaccccctgcttgttcaatcgatcacgaccctctcacgcggaccccctgagagttgtgagccctgaagagggacaggaattgctcactcggggagctcggctcttgggacaggagtcttgccgatggccccggccgaataaaccgcttccttctctaactgggtgtctgaggagttttgtctgcggctcttcctgctacactatctctactaaaaatacaaaaaaaaaaggccgggcttggtggctgaagcctgtaatcccagctcctcgggaggctgaggcgggcagatcacgaggtcaggagatcgagaccatcctggctaacacggtgaaaccccgtctctactaaaaatacaaacaattagccgggcgtggtggcaggcgcctgtagtcccagctactcgggaggctgaggcaggagaatggcgtgaacccgggaggcggagcttgcggtgagccgagatggcgccactgcactccagcctgggcgacagagcgagactccgtctcaaaaaaataacaagtaaatcagtgtggaactaacgagcgccctcgtccctcgcgctgctgggactgacgtccgggtacccccaacgcaaccacggcctcccggtgaccctgacccgcgaagcgggccggaagccccgcagcccctactccagaatccgcgtcccggaacctggatccccgaccgggccctgcggccccgacccccgcagcgagcccagcgccggggaacaggacccggcttcccagtctccgcccggggacaccaggctccttgggcgaacggccaggcctcccgggaccagcgcgctggaagactcgcggcggggacgccccctcggccgccccgtgccgggccccacgcaagggcagccggggcgccccgcagtgggaacgcgaggagaccgaccacggggcgagacagccgccagggcgtccgcgccgcccgccccaagcccgcatcagcccgccacgaactcggaggaccgcgggctagagcggccccgccagcgcgcaaagccttgtgggccacacgccccggcgccccgcgctccgcggcatggcgggagttgtggttcagctgcgggggccgcgcgggagctgccgggagctgtgggcggggtgggtgcgcgcgcagtggcagggccagtgagctgcacccgcggaaaaggagggggagcggctggtcagctgcgccctgcgggtcgagaatgtcatcagcagggatggcggcgctttgagtgctgagcgcggccccgaccgggaccccctacccttgacccaccctcgcaggccgagccccgactcccgacccgccgtcgcagcccgcggccccgacctctgacccgccctcgcagcccgcggccccgacctctgacccgccctcccagccagaccctctacgcccgacccgccctcgcagcccatggcccatcggcccggcagtggacgcagagcctcggccccgttccctccccggaccccccggacccgctctccgtcctccctgcagagccgagggccttggcccagccccgcatcctccccgaccgtgctcgatccagcccgggtgtgctgcacccgaaacaggctcccgggggccgtcgggcctgtgggtgaccgtgcaggccaggatctcccccttcccagtcgtgacaaccacagatggccccagatgccacgttagggttagtgcctcctgggggcgggattgcggccgggggagaaccaccctcccaacccgttaggaactgcagggacggagagcgcgctcgggatgtccagcactcagcgcgggttgggtggcgaatggagagcgagtcgtcctcagaggccgccggcctgcaggcgagaaccctcccagccaggaggctgcggctctgcctgaaccccgacccagggcgaacacccacatttggcccctgcccggtgctgagagaggccagagcggcgtccccagaagcggagcgggagccccacgtccggcggccacgatagaaagaagaaaagaaatgggtggtagtaagtaaaataaatcgtatgaaacataaaacaaggccgggcgcgttggctcacgcctgtaatcccagcactgtgggaggccgaggcaggtggatcacctgaggtcaggagtttgagaccagcctggccaacatgg

SEQ ID NO: 8065 - DNA, 6000 bp, Homo sapiens
aatttacagacgcaggacagaggcagttaatcgtacagtgacaggtttcgtaacctcagccgagcttgtgagcttgcggccgcattgagaaagaacaggagcttacaaaactggcagagtattttacggggagcgggaaacggaaggaggagtctggttcttatctttgcacggggggagtgcagtgctgggaggcgtctgggcggcattccttggggttctggctttttaaatggtgttttcaaggccttgcctgggggctttgcctgttgctggctttggggcgagtcagctttatacgaaaaaggtattttccgtttcttcaatttccgctttattccctccttgatgctttttataaataaggtttaatagaaagcatcactattttttatttacttctacagggggaagtagctcttttcctggcaggggtggacacgtagttatgggatgagctcggtggtactcggcctgtccacacgagcgtctctggctttgtcgatattcttgacaaggaggggaagagacaagagtacgaggcggactcccagtatggccagaactactcctagtaaggttttaaatcccccgagggatgaaaaccaaccacgggggggcggggggaacctggagaccattccggtttccaggtttgtgttggaacatgagctaagtctcgcattctcgcaattaattcatgacgtcctcctcattgtcatcgatttttaggcaacaattagttaaattaaactctccgcatatccctccttctgacatagatctagcgagagcagcaagaacaaagggaagagtagcatgtttgtacctaggatggacaagagatgtttgcccagaggagggggttgagcaaagcgacaggttaatagtaaaacaattaagatgacaaggaaaattactgggcttaagatttctaactacatttacttccttgacgaagcttcggccgtgcgtagactggtcagcttccggggtgactagagcagggctgtggtcactttcactggcatctgggtcctgtcgtaggatcagccggtttggatggtctgggtcttgctggctggtccacttgtcctgggctgctggtttcagccgactgtggagatcgaaggcacagttcctgaaacattaacagcagtgggagtggacaggatcgcagtctaggcccatcccatctgggtcccaaagtggttggattctatttctttttttttttttttgagacgaagtatcactcttgtcccccaggctagagtgcagtggcgcgatctccggtcactgcaacgtccgcctcccgagttcaagcgattctcctgcctcagcctcctgaatagctgggatgacaggggcacaccaccacgccccgctaattttgtatttttagtagagacagggtttcttcatgttggtcaggctgctcaaactcccaacctcaggtgatccgcctgcctcggcctcccaaagtgctgggattacaggcgtgagtcactgcgcccggccgatcttctttcaatatactttccagtttcttgggcaaactaagcttttttgtttggagaataacgtgggacctctgggaggggaggctccgggaggagaggcacagccagggcttcctctttagaatgtggtgtccttattactgcccgttttgcctcctcgtctgcctttgtttcctttggcctccagtgttcctgccttttgtgcaccctgcaacgcagaacagctacgtctttggggcccacacggcatcctggagctgtaaaatttctttttttttttttttttttcatatggagtttctctcttgttgcccaggctggagtgcaatggcacgatctcggctcaccgcaacctccgcctcccaggttcaagcgattctcctgcctcagcctccctagtagctgggattataggcacctgccaccgcgcccggctaattctgtatttttagtagagatggggtttctccatgttggtcaggctggtctccaactcctgacctcaggtgatccgcctgccttagcctcccaaagtgctgggattacaggcctgagccaccacgcccggcctaggagctgtaaaatttcttctttgtattttatttctttgcccccagcagttaaaagttctctttcttggctgggcgtggtggctcatgcctgtaatcccatcactttgggaggtggaggcaggcggatcacttgaggtcaggagttcaagaccagcctggccaacaaggtgaaaccccgtctctactaaaagtacaaaaattagccaggcgtggtggcgcgtgcctgtagtcccagctactcaggaggctgaggcaggacaatcgcttgaacctggcaggtggaggttgcagtgagccgagatcgcaccactgcactccagcctgggcaaaagagtgagactccatctcaaaaaagaaaaaaaaagttcctctatgggatggtctttccaattttcttttttctttctttcttttttttttgagacggagtctcgctctgtcgcccaggctggagcgcagtggtgcgatctcggctcactgcaagctccgcctcctgggttgaggccattctcctgcctcaggctcccgagtagctgggactacaggcgcccccaccacgcccggctaatttttttgtattttagtagagatggggtttcaccgtgttagccaggatggtctggatctcctgacctcatgatccgcccacctcagcctcccaaagtgctgggattacaggcgtgagccggcagctgcatattttcttatctgtttattaagtctgtttaagaattccacgggcctggccaggcgcggtggctcacgcctgtaatcccagcactttgggaggccgacgtgggcagatcacaaggtcaggagatcgagaccatcttggccaacatggtgaaaccctgtctccactaaaatacaaaaaattagccaggcgtggtggcgggcgcctgtaatcccagctacttgggaggctgaggcaggagaatcgcttgaacccgggaggcggaggttggagtgagctgagatcgcgccactgaactccagcctgggcgacagagcgagactctgtctccaaaaaaaaccccatgggcccttcatgtttcctctgttgtacgttaaatgctcgggaagtattttgggtttgcagatctgattcccgaatccttgtaattatcccatctccgagatcgctcatgttttttaggtcacattgtcatcccacccaggatcttgggccaggaatttacgctccgctgaaaggacgttctgaccggggggtgttcacgctcccagactaacacagcggcctgtgaatcatggttctctctctcctgagacgagagtactgagggtagacattaattcagcccaagcgtacagctgtggccccagaaattggtcaatttgatccgcgaatccaaaagggtcatctaacagtggtttgagttcttttagatttctaacctctgaactggttaaagggggcatttacgaagtcaatatcccttcctcccggtggtccttccctaaaggggaaaagggctgaggcaggtctttttgagcaggaggcaaaaggaaagttctgtgggtttttgtttgtttgtttgttttttgagacggagtctcgctcttgttgccgaggctggagtgcggtggcgcgatctcggctcactgcaagctccacctcccgggttcaagacattccctgcctcagcctcccgagtagctgagtagctggaattacaggcgcccgccaccacgtccggctaattttcgtatttttagtagaggcgaggtttcatcatcgtggccaggctgccagtcctgaactcctggcctcgtgatccacccgcctctgcctcccaaagtgctggaattacaggcgtgagccaccgcgcccggccgaaagtttcgaatatccctttggcattgttctgtttcccgttggagctttcctgaggaaggggcatgttctagtggctgtccagcggggatgtgggtggcaaggtccaggtggttctataggggagggatggaggggcggaggagcgggtgggggaggggcggaggggcgaggggtgggtgggaggggcggaggggcgggttggggaggggcggaggggtggggtgggtgggtggggggggcggaggggtgggttgggaggggcggagggggtgggttgggaggggcggagggggtgggttgggaggggcggagggggtgggttgggaggggcggagggggtgggttgggaggggcggaggggtgagtgggggaaggtggtctagaggatcccacccttctttagatatggggcgtctctgctaaaaatacaaaaattagccgggcgtggtggtgcgcgcctgtaatcccagctactcaggaggctgaggcaggagaatcgcttgaacccgggaggcggaggttgcagagagtcgagatcgcgccgctgcactccagcctgggtgacacagcgagactccaacacacacacacacaaaagatatggcgcgtctcattcattcacaagttcctcttcaaaggtttggctcgttcagcgccctcgttcttcgtttcctacttccaaggccaacctgacttcctcaccctctgggcctccccgtctgagtctcagtaaacaagtttcccgccggtcctgatctgcagagatggcacctgccacccactctgcacatccccctcccgtcgccacgggctcttcccgccagtgtagccacattcctgcccctttccagttagcccttcgcgttcggcttagtctgcggtcctcttgcattgcgactccgagtttaacttccaacacacactttcaacctccaagagacgcccccacctgtgtcgccccaatagcgacttttctcaccgtggtcgccgcggaacttcaagggtccttcctacccgcgttgctgagagtctgggtttacgcgtcacctcgggcgggacccgatcctccgctcctgaggcccccacaatgaagcagtcggacgcgtctccccaagaaaggtaaccgccagcctctcctgaaacagaatgggatccaaatgggatatttgggggcggcgagtcggtcccgcaaagagaaaccagcacttagaaaatttctcagcgagaccactttacttgtacggaagggggctgcctgcgtgggatgcaatctccagagcacacgggacaaaggaagggagcttctgttcctctgtcctttccctgttggctggggttggacgcccacaatctaagctgatcccggttggctaaaacttaaaacttttttaaaatagggtaaacgcgccacctgcgaggaaagaagaagggggtaaggttgattgacaactttagacctggaagttgagtttctgaagaggaacttacttgtcccaaccaaatggtgcacaggacgtttatactaagaaattattcattttctgagatccagattcaagtgccctttaagtatttttatttgggcggaggaggtcacttcctcccacctaatttattaatacgttcatatatatatatatatatgtacatttttaaaggcagagatgtgcgtctcgccatgttgccgcgtctggtctcgagctcccgggctcaagcgatcttcccgcctcgacctcccaaggctctgggagtacagacgtgagccacagcggccggcccgtgtttaactcagataaaatctgggtaacacactttcaacgcttcaaccccctcgggcgcaccgctctgcgctcattgcaactttgaaagcaggaaggaagaaatgcgcaggctccagccgcgtccccgcaggccccactcccgtttcctagcaacgccgggtcacgtgcgccgccgcccggattccgtagcgtgagcctgccggagccggcgcgtacatgcgagcgtgtgcgcgcgtgcgcaggcggggcgaccggcgtccccggcg

SEQ ID NO: 8066 - DNA, 6000 bp, Homo sapiens
ctactaaaaagaaaaatccaaaaattagccgggtgtggtggtgggcgcctgtaatcccagctacttgggaggctgaggcagaagaatcacttgagcttgggaggcagaggctgcagtgagccgagatcgcaccactgccctctagcctgggagacagcgcgagactccgtctcaaaaaaagagtcataaacttagttccttaaaacagtgaaatcagttatctgacagttctggagaccagaaacgctaacatcaagctgtaggccggttcccgccttgcccagcgtctagaggcgcccccatccctccactcagggcccctttctcccccttcacagcctcagcgcagcctcttcccgtttctctctgactcccaccctcccgtctcctctcgtgaggctgccacgaggaccctctcctgtctcagcgtcctgccctcaatcccaactgcagagtcccttctgccatgagaggcaacccagccttgggtcgaagggatgaggtggggcctccttcaagagacaaagtctggttctgtccgtgggttctctgtccctacagaaaaggagaacaacttcccgccactgcccaagttcatccctgtgaagccctgcttctaccagaacttctccgacgagatcccagtggagcaccaggtcctggtgaagaggatctaccggctgtggatgtgtgagtgcgcctgggggcaggaggcgggaagcgggaggcagggctccccgagggagggagtggcattcaggcaggggcagcccgtcgggggcccaccgtctactgaagccgtcctgggcctggtggtccctgcggtgaacgaggctggtgtccaggccccagtgtcttggcttgcacagttcatcctcgacatggggtcactgggctggggaggcggacagcgggtgccccattgctgggcccatgctttcccacggccacaccctcccgtgcctgctcatccgtcctccctctctcttcgcagtttactgcgccaccctcggcgtcaacctcattgcctgcctggcctggtggatcggcggaggctcggggaccaacttcggcctggccttcgtgtggctgctcctgttcacgccttgcggctacgtgtgctggttccggcctgtctacaaggccttccggtgagcagagctgccgggggccgtctgcacccagagggaaccagggcccactctgcaccccagtcccagcccagctgtgaggagctgtccctttctctgcccagtgtgaaagacagttcacatctgggggtggcaaactgtggcccacaagccagagccaactactgtctgttttgttttgctttctagtaattttggctgggtgcagtggctcaggcctataatcccagcactttgggaggccgaggcaggcggatcacctgaggtcaggagttcaagaccagcctggccaacatggtgaaacgctgtctctactataggtacaaaaattagccaggcgtggttgcgggcgcctataatcccagctactcaggaggctgaggcaagagaatcgcttgaacccgggaggcagaggttgcagtgagccgagatctcgacactgctctccagcctgggcgacagagtgagactccatctcaaaaaaaaaaaaaaaggaataaaatagagcctccgctctcaccatctctgactggcccgttcctctctaggcgcgtctgggagaagccagggctgtggtaaccgtcgtgttttctgtccctccccagagccgacagctcctttaatttcatggcgtttttcttcatcttcggagcccagtttgtcctgaccgtcatccaggcgattggcttctccggctggggcgcgtggtaagcctctctctgatgggcgtggtggctgtgatgtggctcagctgccaggttgtgggcctgctgggaagccaggcggccaccggagcgtgctggtccgggattgtacgcgctctcctagggaggggtctgagctcaccctggcagcgcccgcgtcctcgccagcgcccgcgtcctcgccagcacccagccatggttcgcgattgtaggcactctcctagggaggggtccgagctcgccctggcagtgcctgcgtcctcgccagcgcccagccaggcttgtctcctgagtgttgatcacacccctgacccggggtctgggagccagttcctggctgctgatgtttctgcacggatcgctgcaggaggaagacctgtacatctgtaaaaacacacatacctggtgctgttaccacacctgagaaactcacagtcactctctaaggctgccaggtgcccagaagtgtttgtgttggtgtcttaaatttctgccttttttcttttcttttttttttttttttttttgagacagagtcttgctctgtcacccaggctggggcgcagtggtgcaatctcagctcactgcaacctccacatcctgggttcaagcaattctcctgcctcagcctcccgagtagctgggactacaggcgcccgccaccacgcctggctaatttcttttgtattttagtagagacggggtttcaccgtgttgcccaggctggtatcgaactcccgagctcaggcaatccgcctttctcagcctcccaaagtgctaggattacaggtgtgagccactgcacccggccctttttttaaactattattatttttttttgagatggagtcgctctctgtcactcaggctggggtgcagtgacatgatcttggctcactgcaaccttcacctcccaggttcaagcgattctcctgcctcagcctcccgagtagctgggactacaggtgtgtgcccccacacccagcaaatttttgtatttttagtaagagacggggtttcaccatgtgttggtcaggctggtctgaaactcctaacctcgtgatccacccgcctcggcctcccaaagtgctgggattacaggcgtgagccactgtgcctggccaaatttgtggctttttaaataggctttttattttggaataatttgtaattctcagttgcagagagtgactgttctcgcccacgtccccgacgtgtctcccttgtccttggcacggcgggagctccccacgggtgacgctgctcacggagccgtgggtgcctttggtttcctgggctcccattagcaagctcctgttctggggttcctgccccacaagactgcggtactctcacgccagtgcacagatcagaatccagataaggtcccaggtttcctgggatggtgactcctctcccttcagggcccctcgatctgcaggcctctcccctcctgcacctgcgcctggcgccaggccctccagggtggctgggatctgtggtttgtgcacccctcggatgtgccgctgaagctggtctgtcacctgccaccccaagagcctgagtgacgttgccccagggatctgagttagagtcatagtgagcgtgtgcctgggactcccagctctgccagcctttggggtgcttccccctcctgcagaggctgtggctgcaggtcaaggcactgctcgtcatcctccgagtcctcctgagctcccagctgccagctcggctcccactggcccttccctgggctccagtgcctcctgtgagccgcctccccggtgcgtccccagctctcccaggctgagctgggtggacaggcctgtgcccgtgttgggtggtcctgagatcccggcatgaggtgagtgcccacatgtgaccctcagagacctccctgccccctcggccctcgtgcacgtgcggcagcagcgacttggctcttctcattggagcctgggtcatctcccgcaggtcacgggagaagctgagcatgcggtccctgcccgaggtggacagaaggtgaacgctcttgagaaagaaacccagcgggtcttaggagagcccggccccccttgtaatgagagaaatcaaaccacagcgcacagcgacttcatgtccaccgttggcttagtgaggccccacgctcagtgcgctgctgtggggcgagaggggacagccccgctctccctgtcctgggcggcttcaccagcgccacctccccacacactctgtgcactgctgtggggcaagaggcgacagccccgctctccctgccccgggcagcttcaccagcgtcacctccccaggggtgacgcatgcccgaggccatgagccacggcagcatctgtggtggcagaggactggaaactccagagaaatgacccccagcggggcctagctgtgtagatggtgagggtggccacatggcggcagccaggtactgaggacacggtgcagcaggggcccccggtgggccccgccaggaatcggacatcagcgggcgccgcagcctctaagcggagcatgcagcccactgacagtgtgctgggtgcctccctagacctgacacttgcatgcgggggcgtgcgatgctggccagtgggaagctgcgggggcggcggcaggagtcctcaaatgcctttgccgcttttcataaatctaaaattacatccaaacagaggtttacttttttaaaaaataaaagaggccaggcatggtggctgacgcctgtaatcccagcgctttgggaggccaaagcaggagaatcactgcttgaggccaggagttcagactggcctgggcaacatagggagaaaccatctctccagaaaaaaaaaaagaggaaggaatgacccaaagaccatgcagcctgtgatgctgtggaggctccaagcaggcgaacacaggacaggccagcatcttgcagggacgcggcggggggtaccgcgtgtgcgtgcatatcacgccccgtgcatgtgtgtgcataagctccccggacacatccgggggtgtgggtcctgcgggctgcctgtgcaccagggaggggagtcagcaggagagagactgtacgtcgtgcctgcctttaagttccctgaattttaaaccctgtggtttcatcacctgttaagacaaaaatctcaaaatgactgttttctgcctcctgggtctcaaaggcaggtgcaatgcccagaggctggtcctgcacagagggacccagggcgtgctggccttcccagtgtcccactggtggctgatctaagcagtgctttccctcgtttttttattttgagacagaatcttgctctgtcccccaggctggagagcaacggcacgatctcggctcactgcagcctcccgcttcagcctcccagatagctgggattacaggcatgcgccctcatgcctggctaatttttgtatttttagtagagacggggtttcaccttgttggtcaggctggtctccagttcctggcctcaagtgatccgcccgcctcggcctcccaaagtgctgggacgacaggcgtaagcctctgcgcccggcctcctcattgtttctaatggtccctcagtgcccaccgggtgatggtggcagattttccatccgcattgctcccggacatgcggatgtaggtttcagcagttcccatcattagacacagttgccgtaggctgggttcttagtagcaggctcagtggggcctttgagtctttccatggctggtgcccgccggactcactgagggaaactaatggggaagcactggtctccattccctgcacgcacagcccactgctgcgatggtgaagggataaggttgtgttcacgcgtcgaagtttgtgtccactgcacacgcggctcactgctgcgatggtggagggataaggtcgtattcacgcgttgaagttggtgcctctcagtatcgctttatgtttgttggccacttggtcgtccttgtatgagctgtccactccttgttgattggccagagctctttacatggggaggaccatgggccggaccatgggccctcatccagcaggtgtgcaggcacccacgcactctcttgtcccttgcagcggctggctgtcggcaattggattcttccagtacagcccgggcgctgccgtggtcatgctgct

SEQ ID NO: 8067 - DNA, 6000 bp, Homo sapiens
ccatctctggcctctgcatcttttggggacccactctctggggctggcagaggcaccaccttggcttcctgggctgggggaatcttccctcacatccccttcagcatgaacggcctcggctttcccggtgggtaaaacagtttaatcactgaagccgaagcacagggttgattgtacacgctccccgccagccacaggggctgacaactgcctgccccgtgaaactccagtggagacgtttcagctccacaccattcagtatgggagacgccagccccacggggctacggtgcaagcagataactgaatttcgaagtgtaggttgtgtttaatttgaatctgtttatatttcggtagccccatggggcgggtggccacagtttcagtgcagatgtaaatccggaagcctccagcacctgcagctcatagacagctctcgcccaccttctcccaggaccaagccagtcccgtccagtccagtgtctgagcagagtcagaatccacaccacccgccgcctgggctcagaaagttctgctttaagtcattatttctccactgtacgatggggaatgcggtgtgtgggggccatttacccaccaacacagcagctgtgaggcacacacggctattgaaaattcatggaaattgctgggtgtggtggctcatgcctgtaatcccagcactttgggaggccgaggcaggaggattgcttgagtgcaggagttccagaccagcctgggcaacatagcgaaaccacatctctacaaaaaaatcctccaaaattaaaaaaattagcccgagcatgttgttgcatgcctgtggttccagctactcgagaggctgaggtgggaggatcacttgagcccgggaggtcgaggctgcagggagcggtgatcgtgccagcctgggtgacagagtgagaccctgtctctaaaaaaaaattaaaaaaaaaaaaaaaagaaaattcattgaaattaaatgaaagttaggccaggtgcattggttcatgcctgtaatcgcagcactttggggggccgaggtgggtggatcatgaggtcaggagttcaagaccagcctggctaagatggtgaaaccctgtctctactaaaaatacaaaaaataagctgggtgcggtggcaggcgcctgtaatcccagctactcgggaggctgaggcaggagaatcgcttgaactcggagggtggaggttgcagtgagctgggattgctccactgcactccagtctgggcgatagagtgagactccgtctcaaaaaacaaaacaaaaacaacaacaaaaaagaaattaaatgaaagttaaaaatttagtctctcagtgtattgatttgctagggcagccatgacagtctcacagatggagaggcttgaaaacagacatttatgctgccataattctggaagccagaagtctgagatgaaggtgtgagtagggctgggtcctcctgaggctgacggggatctgcccaggcctctcccagttcctgctggtggccggcgtccttgatgttccttggcttggagaagcgtcagccgcatctctgcctccatctccacaaggcgccctccctgggtctgtatccaaactcccccaactccttcaaccttttttattttaagagatgaggggccgggcgccgtggctcacgcctgtaatcccagcactttgggaggccgaggtgggcggatcacgaggtcaggagatagagaccatcctggctaacacggtgaagccccatctttactaaaaatacaaagaattagccaggcgtggtggcgggtgcctgtagtcccagctactctggaggctgagtcaggagaatggcgtgaacccgggaggcagaacttgcagtgagcggagatcaggccactgcactccaccctgggtgacagagagagactccgtctcaaaaaaaaaaaaaaaaaaaaaaaaaaaagagatgagggtctcattaagttgcccaggctggtctcaaactcctgggctcaagtgatcctcccacctcagccttctgaatagctgagactacaggagtgcaccaccaagcctggctcattttcctatttttacatttattattattattgttattattatttttttgagaaggactctcgctctgtcgtccaggctggagcgcagtggcgcgatctcagctcaccacaacctccacctcctgggttcaagcgattctcctgcctcagcctcccgactgggactacaggcacgcaccatcatatctggctagtttttgtatttttagtagagacgggattttgccatgttggccaggctggtctcgaactcctgactcaggtgatccatctgcctcccaaagtgctgggattacaggcgtgagccaccgtgcccggccgatttccccatttttataaggccaccagtcacatgggattaagggcccaccctgctccagtatgacctcatcttaactaatgccatctgccacaaccattttccaaataacatcctatgctgaggtcctgggggttaggatgtgatcatgtagattttgatgggacagttctttattttcttttatattttagagacagggtcttgctctgtcacccaggctggagtgcagtggtgtgatcatagctcactgcagcctcgatctcttgggctcaagtgatccttctgccttgggtttccgagtagctgcaattacaggtgcacaccaccacacctggctaatttttatattttttgtagagacggggctgggtgctgtggctcacccctgtaattccagcactttgggaggccgaggcaggtggatcaccttaggtcaggagtttgagaccagcctggccaacatggagaaaccccgtctctactaaaaatacaaaattagccaggcgtagtggtgcatgcctgtaatcccagctacttgggaggctgaggcaggagaattgcttgaacccgggaggccgaggttgcagtggactgagttcgtgccactgcactccaatctgggtgacagagcaagactccgtctcaaaaaaaaaaaaaaaaaaaaaagagagagagagagagagacagggtcttgctatgtttcccaggctggtctcaatctcctgggctcaagtgatcctcctgcctcagcctcccaaagtgttgggactacaggcatgagctactgtggctggccaattgcagacagatggaactgtggccagccacttcaccagtgaagtcccaaacacccctctgcaggcatgataagctagggtagttcttatcttttcctgattcctgttctctgtgtgtttagtggggaccacagcaggcagggtggggtgttggtggaatttgggataagtggagtctgggcaggcctggagctctctgtctgccttctgggcccgtgttggctgaccctgttgccccctctgccctgctttggctgagctgaattatttcttggtccttcccttctgggggcttctcgcttaacctcctttgttgtccctgataaaggggccttgttagcccgcaccttccctccttcgtcacttgacttctgcctgctcattctttgtaccttagttttagcgtcacctcctccaggaagtcttctttgatttctcctcctccctaggtctcctctaggctcccacagctgcctgtgttccctgcatgacagctctgctttatactgggcacaactttccctctttcttcactcatctgctctggctcatcttttgagtttcagcttaagtgtcacctcctccaggaagcctcctctgatttcctctcctccctaggcctcctctgggcttctcccagctgcctttgtgtcctctatcccagctcccatcacccctggtcacacaatccacctcctcctttggacttcgagctccgtgtcggtggatagtgtggctttgctggggtcccggctgtgtccccagcacccaccacacggctggcacacagtaggtgctcagtgacccagcagcacactcagaaactccctttctagccgggcgcggtagctcacgcctgtaatttacagctactcaggaggctgagacacaggaattgcttgaacccaggaggtggaggttgcggtgagctgagatcaagccactgcactccagcctaggtgacagagactacatctcaaaaacaaacaaacaaacaaacaaacaaacagaattctcacatgctgctggcagggagagtgcttgattctttatcattatatctgaggaaactgagactctgagaggtgaagcgacttgcccaaagccacacagctgggaaatggaggagttgggatttgagcccaggctcttaatcggcaccaatgccacttctcacttgggacagaaaggaagccctgactccttaggcagctgtacggagcctgggatgataacgtgctgagagccagggctactgtctgctgcaccctggggctcagtctccccatctgtacaaagggacgttccttaggtacctccagccctgagacactgggttttaactttaaatttctgatgaacaacaaatacttttttagtataagtatgccccaaatatgaataaagataaatataaatacctgccaccgacccctgcacaaaccgcaggttccagactacaagtcccacaacccactgcggcctcccttaggaactgactatcatgactttctatttttcattcattcattcaaaaatggtataggccacccgccgtgcgccaggtcttgtgctagatgccggggatacatcatatgcacaaaacagacaaaagtttttgccttcgtggagtttgacatctacatcctcgggagttttaagtgatttttgtttttctcagcaatttctgccaggacgactacagttcccgtgaccctttgtgtgtttgacgggactacaactcccagaagacctagcgcgccaggcaggcacttccttttctctttatccccaacttccttccaggtcgcaaggtcacgtcctgtccccacctttcgcccctcaccctagctcccccaacgccaaagacaaggttaagaaagtgatatcgcgaaatagttttttaaagcattttattgcattttatgacttggagtttatgtgaaacctcaacggtattagccgaacagcctgccgcaccttccgggagttccagagtgggcctacaactcccacagggctccgcgagcgccggacggacggactacaattcccgacaggcagcgcggctggcggggcggttcgccgcggtgcccacaggacctcagggcgagtgcgggctgccccgcgcggcgcccgcaggaccccggcggctacccatgccgaggtgagtccgcgggagccgccgccgccgccgtcccgtcccagctgccgccccgcgcggccccgccgccggccaggatgctggaggaagcgggcgaggtgctggagaacatgctgaaggcgtcttgtctgccgctcggcttcatcgtcttcctgcccgctgtgctgctgctggtggcgccgccgctgcctgccgccgacgccgcgcacgagttcaccgtgtaccgcatgcagcagtacgacctgcagggccagccctacggtgcgtgtccccggcccaccctcggggctccccgggctccccggccacgccactccggcccggcgatccccaggccgatccctagctccggcctgggctgcccgacccatgctcaggccccaggcgaggcagagccctgccgccctggacccccgggcgccctggaatccctgctctccttgcctagcgcccagggaccccccgcgctcgctcccacagcccccggcccctgcctaggtctccctgccccggaacccatggccgggccaagcgtcccgcgtccctggagccctaagtcccctctctcctgtccccagctgggccggcgtctgcctgccttgccgagtttctccctcctgggccccctccgccccttaggcttcct

SEQ ID NO: 8068 - DNA, 6000 bp, Homo sapiens
ctcgggaggctgaggcaggagaatcacttgaacccgaaaggcagaggttgcagtgagccaacatggcaccactgcactccagcctgggcgacagagcaagactctgtctccaaaaaaaaaaaaaaaaaaaaaagaagaagaagaagaagaaagaaatggtgaaaatgggccgggtgcggtggctcacgcctgtcatcccagcactttgggaggccgaggctggcagatcacctaaggtcaggagttcaagaccagcctggtcaatgtggtgaaaccctgtctctactaaaaataccaaaaaattagctgggcatagtggcacaggcctataatcccagctactcgggaggctgaggcaggagaatcacttgaacctgagaggcagaggttgcagtgagccaacatggcaccactgcactccagcctgggcaacagagcaagactcgaaaaaaaagaaatggtgaaaattgtgaattgtatgttgtgcgtattttactaccattttttgttttttcttttttgagatgagtcttgctctgttacccaggctggagtgcagtggcgtgatctcggcttactgcagcctctgcctcccaggttcaagcgatcctcccacctcagcctcccaagtagctgagaccacaggtgtgtgctaccatacctggctaatttttgtaatttcagtagaaatgggatttcactgtgttggccaggctggtgtcaggtgatctgcccacctcggcctcccaaagtgtgaggattacaggcgtcagccactgcaggcggccttgaccattttaaggctccaggaagagttctttggacgcaggtcatggacagagctcctgattcacccagaatctgttttgaaaaaagatttagaccactggctctcaaggtgtggtccctgggccagccacatcagcctcaccctgggagcttgttagaaatgcaggttccaaagccaggtgcagtggttcatgcctgtaatcccagtgctttgggattgaggctgaggcaggagaatcactttagcccaggagttcaagaccagcctgggcaacatagcaagatcccatctctacaaaacaaattaaaaattagtctggcgtggccagatgcagtggctcacgcctgtaatcccagcactttgggaggttgaggcaggtggatcgcctgaggtcaggagttcgagaccagcctgaccatcacggagaaaccctgtctctactaaaaatacaaaaattagtcgggcatggtggcgcatgcctgtaatcccagctacttaggaggctgaggcaggagaattgcttgaacccgggaggcagaggttgcagtgagtcaagatctcgccattgcgctccagcctgggcagcaagagcgaaactcctctcaaaaaaacaaaaatagcctggcatggtggtgcacacctgtagtcccagctacttgggaggctgaggtgggaggatcgcttgagcccagaagtttgaagctgcagtgagctatgatcacaccactacagtccagcctgggcaacagagcgagacctggtctcaaaacaaacaatgaaaagtaaaagaaatgcaggttcctaggcccccacccagacttcacacaccagaaactgggcagagtagggtggtgggagggcacaatctgggtgttcatgactcctcccttccaggcaaactgggtgccagataaagtttgggggaaggggccagccacggtggctcatacctgtaatcccagcactttgagaggccaaggtgggcggatcacttgaggtcaggagttcgagaccagcctggccaacatggagaaaccccatctctactaaaagtataaaaattagccaggcgtggtggcatgcgcctgtagtcccagctacttgggaggctgaggcaggagaatcacctgaactcaggaggcagaggttgcagtgagccgagattgcaccactgcactccagcctgggcgacagagcgagactctgtctcaaaccaaagaaaaggaaaagaaatgcagtttcccaggctccaacgcagacttcacacaccagaaactgggcggggtggtgggggtggtaaaatctgggtgttcatgacttcccccttccaggcaatttggatgccagataaagtggaggaagtgctggaggttagatcattgatgaggataatgaagaggaaatatacttaaaaaaaattactaaaactggctgaacagtcatgacttacagacgcaaaagtcaacatcaaaacaagcagttaaaagcagcctcttggccgggcgcggtgggtcacgcctgtaatcccagcactttgggaggcagaggtgggtggatcacctgaggtcaggagtttgagaccagcctggccaacatgatgaaaccccacctctactgaaaataccaaaaaagtagccaggcgtagtggcacatgcctgtaattccagctactcgggaggctgaggcaggagaatcgcttgaacccgggaggcagaggttgcagtgagccgagatggcgccactgcactccagcccgggagacagagtgagactccgtctcaaaacacaaaaacaaacaaacaaacaaaaaacttaaaaaaaagaaaactagggcagggatggggtgacaggaggggagaggcaagggacagagaggaggggctggggtccgggagagccaccagccttctgtgccttccccgcatccccccacgcccctggttggctgtccccattacgcagggtggaaaaccgaggctgcccggcgggggccggttgcgtggtttctggcgccgcctggtggccatagtggctactaccgtcagcaggaggtactgcaggctggagggaccctagtccattcattccaaaaacatgtattgagcacctactgtgtaccaggcactgtgctaggccataggacacggcagggatgagcacgacaaagtccatgacctctgtgaggtggcattttaatatttatttatttatttttcagccagcgtcttgctctgtctcccaagctggagtgcagtggcgcgatctcggctcactgcaacctctgcctctggggctcaagcgattctcccgtctcagcctcctgagtagctgggattacagacgcatgccaccttgcccggctaatttttgtatttttagtagagatggggtttcaccatgttggccaggctggtctcgaactcctaactcaagcaattctcccacctcaacctcccaaagtgctgggattacaggggtgagccattgagcccagacttaattttttaaattttaattttaatgtactggtaaagatgggggggtgtctcactatgttgcccagactggtctcgaattcctggcctcaagtgatcctgccaccttggcctccaaagtactgagattataggtgtgagccatcatgcccaacccttcctggttaattttattttattgagataggatcttgctctgtcacccaggttggagtgcagtggcacagtcatagctctctgcagcctcaacctcccagggtcaattgatcctcccacctcagcctcctgagtttctgggactacaggtgtgtaccaccacatctggctaatttttaaaaaagttttctgggctgggcgtggtggctcacgcctgtaatctcagcactttgagaggccaaggcaggcggatcacctgaggccaggagttcaagaccagcttggccaatatggtgaaactccgtctctacaaaaatacaaaaattagctgggcatgatggctggtgcctgtaatgcaatcccagctactcgggaggctgaggcaggagaatcacttgaaaccgggaggcaaaggttgcagtgggccgagatcaagccattgcactccagcctgggcaacatagcaagactctgtctcaaaaaaataaaaaaaaaataaaataaaaacaaaaaacaaaacaaaaccaacaacagccagcagcaacaacaaaaaaacttttctaggccaggctcggtggctcacgcctgtaatcccaacactttgggaggccgaggcgggcagatcacttgaggtcaggagtttgagaccagcctggccaacataggaaaaccccgtctctactgaaaaaaaaaaaaaaaattagctgggcgtggtggtgcacgcctgtaatcccagctacttgggaggctgaggcagaagaatcacttgaacccaggaggcggaggttgcagtgagccgagatcgcgccactgcactccagcctgggtgacagagggagactccatctcaaaacaaacaacaaacaaaagatatataaaaatttttctagagatgggtttcaccgtgttacccaggctggtctcaaattcccaggctcaagtgatcctcccacctcggcctcccaaagtgctggaattacaggtgtgagccaccacacctgaccctttcttgttttttagatgaggacagcaagaagcccctgtaatttgcccaaagccacacagcggggaagtggcagaagcttctgtacgtaggaacccagtcacttcgtagcagagaggcagactgcgcacagatctgcgtggggaagggagtgcgccaagccacagcctgatgggccggcgtgcctggcaggaggctcagcaagcacagagactgggcagctccagatgcaagaagcaggagggagggggactccgggagtgcggtccattcatgtctgaatgtagccaacgagggtttcctaagcacctaccatgtgcggacgcttgataccagggcctcggcggtgagggcacaggcaggagcaagctcacctctgggcaagcaggggttaaggccagttgctcccacgtgagggcaccttgcgacagagccacacacccagtcctcctgctggcccgcccctcaccctggtccgtctccctgtgtctgtggtcgtcagttccactggcaggggacctgcctccctgttgccaccacaagagaggaaaagttggtcaaacaggtggggaggccagagctacaagcctcgggttccctccccaccacccgtgccaggcaggcacccgggccctggcacctgctgcctgcccagaggccacccagcctcctagacaggtaagtcccccgccccactgtgcttttccacccagtgtgcattgtctgagctggccttccccagctgagggtccttagactcccccccaacctcccccaccacgagctgtctccccggctcctcggaaagcaggaaactgacactcctgcgtgggcatctgacatagtttcgtagggattatctgaccggcagttactgcacctggcggcctgcccaggacgctgagctggaaacttaaaagggtcattgttacctaggtggcgcagggaccggggaggcggcaaaggggcacaggttggtctctgatccccctaactgaggaggggaggggatatcagtccagacggagcctgggtttacctcctgcagcccgaggctaggaggtgacaggtgggaaaggctgcgacctcactcatctctgagcctcctggaacttcttaaaaggctcccaagttttgaaacaactgcgtctcccgccccccaacccctcaccctgttctcaccgctggaacctccaggagctttgcagggagggattggggtggcctttcttttgctaattttttttttgagacggagttttgctcttgttgcccaggctggagtgcagtggtgcgatcttggctcactgcaacctctgcctccacctctgcctcccgagtagctgggattacaagcgcccaccactatgcccagctaatttttgtatttttagtagagatggggtttcaccatgttggccaggctggtctcgaactcctgacctcaggtgatccaaccccctcggcctcccaaagtgctgggattacaggcgcaagccactgcgcccagacttctttttctaatctttactcctccgagcaaaatctctgtggga

SEQ ID NO: 8069 - DNA, 6000 bp, Homo sapiens
caggagagaaccaagcggagtggctgaggccttggtttttcccatttgggaagtgggaggttggactgctctcagggttgctgtggttctcttagagcgatctggggctacaggtgtgggaaggacctgcaaagtggaggtgggggcagcgggaggaaagtcttgttataggtgcattcccagctgcgggtgaccgcagacaggattgggtccctggctggggcagcccgggacagtgagccaggcccgtgaacggcccatgaaagggcaggccagggaatgtaaacacagggatcggggcagctgcaggccagggcagtaggtgcccagaggatggagggtgtgtctcctggaggtgagagcagggcacgtcatgggctgtgcagtctggaggagggtgtgtcccgggcagtgggcaggaaagcgcccccatctcttcccaggcagacgccccctgccccgcagcagggggatcgggtgttggccgcggaactgcaggcttggggcctcggcgtccctgtcttgagcgatcccgttaggccaaacacgagtgggtagggggaacgagacagagacacaggttctggagtccagccacaggtagtccctggtggctccggccgcccagttcaggggcttgggtaaccgggagcgggcggggccgggaggggaggaggtccctgggggtgggggtacctgttgggcgccggggtctgggttgcccccgcccagcctggccagcccctggcgcaactcgtgcacgtccacgcggccatccttgttactgtccagctcctcgaacaggcgaccccagcgctgccgccgctccgcgtcgcccgggctcccccgcatggcgcccgcccgggggggaggggaggcccggcagcggcggcctcagtgggggcttcgcggctccccctccccccccgggaccccgcagggtcagctcccgcggccgccggctccgcagcctccgcgcagtccgctcggctctggcacttgcgggaggtggtgacggctagccgtcgccgcccgcgccagaacttgcgtctcctcccccgacctgcattggggggaggggaccgagggcggagctgggggcgtggggagggaatgtctgggatggtctggtattgcacagccgaggaacaccagagttccttctgggaagacgggctagggagctcagtggtctcaggtctggtttcagagttccgcctctgcgtgcctcagtttaccctttccccctttgcccaagggggcaaggtagagcgctgtcggggattgggtttcataatccccttccacttgacctccccgccacacccactaatcttcaggaactcaagttctcgcttttcccagacgcacgcaagaaccgtgcaccatctcgctcgctctctgcccgcccgcgccttacaccttccccgctcggccgcagaaacagaagatccaggagcgatgctctcccactgtcccttcttcccgcccgcgcgcttcctttctcggttcccactctgactgggaaacagaaaatcaacgcgcggcgcggctgcaaagtcggtttcctattggtcagcgcctcctgggctgagcccgcccgccccgcctcttctcccacctaggcggggcctccccgcagacccccgactgcctccagcccgcagtcccaccgcctgccaggagatcttaaaggggccgcggccgcaatcagacgctgagcggcgtggggagggggtggctcagtgacccgggcgcggggttgaggatcccagtggtcgagcgctggaggcagggccccagcctgtcgcactcgctgcacctgcggaatgtccctactgctagtttcgggcgcagtttctcgatccaccattagggggaagggagcccagaccacttgacagcgaatactcgataacaaatctcactttgattcagtgctttgcacatgccagggcttttactcacctctcgagtcgtctttgccaaaaccctataaggtaggtggtactggcgttcgcactttgcagataaggaagcggaggttaagtcattctccccagtcctgatgaccactaaggggcaaaacagggtttaaagagatctgggatccttaaccatcactctataccctagaaagaattaattatcttttttttttttttttttttgaaacggagtttcgctgttgttgctcaggctggagtgcaatggcgcgatctcggctcactgcaacctccgcctcccggattcaaacgattcttttgcctcagcctcccgagtagctgggattacaggcgcccgccaccaaacccagctaatttttgtatttttagtggagacggggtttcaccatgttggccaggctggtctcgaactcctgacctcgtgatccgcccgcctcagcctcccaaagtgctgggattataggcgtgagccatcgcacgcagcagtgagttttttttttttttttttttttttttttttttttttttttttttttttgagatggagtttcgctcttattgcccaggctggagtgcaatggcacgatctcagctcaccacaacctccgcctcccgggttcaagcaatgctcccgcctcagcctcccaagtagctgagattacaggcgcacaccaccacgcccggctaatttttgtatttttagtagagacggggtttcaccatgttggttaggctggtctcaaactcctgacctcgtgatccgcccgcctcggcctcccaaagtgctgggattacaggcatgagccaccatgcccgaccgcagccgtgagttttgtatttttattagagacggggggggggggtttcacctgtggaccaggctggtctcgaacacctgacctcagattatcctcccgcttcagcctcccaaagtgctgggattacaggcgtgagtcaccgcgcccggcctggcctaattattctttaatcatcacttgtcacccaagggtcctcaggagggggtcttgttattatcatcatcctttatccaaagatacagcattggccggtctcggtggcttaggcctctaattctagcaatttgagaggccgagatgggaggatcgcttggggtcaggagtttgagaccggcctgggcaatatagcaagacacccaactctacaaataataataataattattattattttttttaaaaaggaaagaaaacaaagatacagtcgtgagggcatatttagttcacgcccagcctctgcctagacaggtgtgctggaacaggtgtgccccagacaaatgagtctcttctaagaggctccccagcagaggttttcatttacagttgttccttgcaggtgccatacagcatggagtgatacagaggtttttttccatgtaagtgcccctaaataggtgttttctcacagatacattcttgacaggtgggcctcagtgtatgtgagcccctgccctgatggttttacccacagatgtgtgtcaatgtgagtgtgccccgtgcagatgttccaagttcttcccctcacttgagctcaattccatacaggtgttcctcctacaaggtgctttctcttacctcacaggtatgtttctgagcaggtttccctccacccatgaatgcattctacagtctcccgccccgtaggtgtgtttcagttaagtatacacccatctgggtatgtttccatacaaccgagtcccatacaggtttacgtaaatgcaggtgtgtctcatacaggtatttacaagacactgacacccaggaattcccccaatgcaagtgccgtacatttcataggtgagccatgcagatatgttcctaaaacaggtctattccacatcagagtgccttagttagctgtttgtgatgataatgcaggcgtgttctatagagatactgtccaccctggtggtatgtatccatttggttatatttcttttctttttttgacagtcttgctctgtcacccaggctagagtgcagtggcgtgatctcggctcactgcaacctccgcctccagggttcaagcgattctcctgcctcagcctcccaagtagctaggattacaggcgcccaccactacgctagctaatttttgattattttttagtagagacggggatttcaccatcttggctaggctggtctcgaactcgtgacctcgtgatccacctgcctcggcctcccaaagtgctaggattacaggcgtgggccaccatgcccagccttggctatatttcgtatagctgtgattcaatgcagatttttttttttttttatgagatggagtttcactcttgtcacccagggtggagtgcaatggtgcaatctcggctcactgcaatctctgtctcctgagttcaagcaattctcctgcctcagcgccccccgagtagctgagattacaggcacctgccaccacacccggctaatttttgtatttttagtagagacaaggtttcaccatgttgggcaggctggtctggtttcgaactcctgacgtcaggtgatcctcctgcctaggcctcccaaagtactgggattacaggcgtgagccgccgcacccggccatctgttttctgtatgttcttatatgtgaacacctgtgcagttgtcttctgtacaggtttggttccacacaggtgtttaccatacagctgtttttttgtttttaaaatttttttagagacagggtctcactttgtcacccaggctggagtacagtggtacaatcatagctcactcactgttacctccactcctgggcccaatcgatcctcccacctcagcctcccaagtagctggggctacaggtgcgtgccatcacatctggctaattttcttattttttgtaaatatggggcctccgtctgtgggccaggctgatctcgaactcctggcctcaagtgattctcttacttcggcctttcaaagcgctgggattacaggatcacgccaccgcccccggcttattttcttctttttatttatttgtttatttatttatttattttttgtagagaatgaggcctcgctgtgttgcccaggctggtctcggactcctggcctcaagcaatcctcttgcctcggcctctcaaagtgttgggattacaggcgtgagccattgcgcctgggcaggtattttttctcattaagcgctccccatccaagtctgccctaggcaggagtgcctagtgcacgggtacatacataccccgtgcgtctccacacctgtgcgctcccacagatatgctcgcaatgcaggtgtaaggtccccctcacacctgcgcgcttccgcggtctccctccccgcatccccattaagggactggggtcccgttacaggtgcgcccacagcgcggccccgcccccttcttgactccgccctctcagcgaggctcaggtgcacaagccggaagtgcgctctcccaggtgagtgactaaactttccgggtcacgtgacagggcggagccggtggggtcggacccacagaacgaccgacggaccgagggttcgagggagggacacggaccaggaacctgagctaggtcaaagacgcccgggccaggtaggaaggcaggacgcaccgctaggcctgccccctcgcccgtccaccctgcccgtcccgtcccgtcccgtcccgtccccttcctttccccagcccaggaacgcgctcctgggagttaatctttaatcgctgacctctggcggctggggcggggcgggactcatgggtgccctggcgccagttgtctctcctgtgggcctgcgccggggtccccaccccgatcccaacgcctgggcctctccttctcctgtccccaggtgccccgtcgcaggtgcccctggccggagatgcggtaggaggggcgagcgcgagaagccccttcctcggcgctgccaacccgccacccagcccatggcgaaccccgggctggggctgcttctggcgctgggcctgccgttcctgctggcccgctggggccgagcctgg

SEQ ID NO: 8070 - DNA, 6000 bp, Homo sapiens
tggatgttggcagaagtgggctggtctaaggttccccaccttccttgttccacctccagcctctggggaagtaggtacctgcctgggagagtgacatctcagctcatgccccacgccccagtgtgatttgtggctggcctgtctgtatctgtaatagtgatagcttggtctaaaaggagaccctgggaacagacagagtgggccggccaggagcctgacagcacagccctagcctggtcgcagatgtcacctgacaactttccatttgcaaatcctccttcctcctcggacatccggacaccccattgccccctctcagagcccaggtctctggtttctgcctgtgattctgggctgtagcccctttagaaactcaggtgtcctggtcacctcctacccccagggctgactagccttcagcttggcagtccctgcccctggggccctagtaaccagagccaggctccagccggcttttccggttagaggttggaggtggtgcccagagtgcccctggagggggtggaggggcctacgccccggaagtcctgagccttggaacgctttcaggcctggtggcggtgggagccggggctggcccagacgctgagtgtctgcagtcagggagcatcgaggcagatgttttcaggccttggtgtcaggggtgggagagggatgcctcgttttggggagggggccacccgaggaggctggagggcggcggccctgtggactatccctcatgtgctcttcgaggtcagacaagtcagatcaggtgcaggggtgcccagaggggaacagtggccgcttggttctgggcaggtggtgacgtctgcatggagggtgactaaggccaggctaagagggaagtgggggcacacactttggtggtttggacaagtttgggcagggagggtcacaggcctgcctgtgtccggctcctcggaggaccccctgcagagcctcccatcctgagggtctctctctacaccccccgtctcgtcccgtcccacaggcagcatgatcccagtggccgagttcaagcagttcacggaacagcagcctgcgttcaaggtgctcaaaccctggtgggacgtgctggccgagtacctcaccgtggccatgctcatgattggggtctttggctgcaccctccaggtgaggccctcccctggcaagggggtgtgaccagaggggcggggcaggtgtctggggaagtcgggaagccttctcatcacccaagaaagagaggaaactgaagacagagccccactcaaaggccaatccagaccccttatcttccttacctccatagccaggagcaccggagtccccacattgctatgccattccatatctttttttcttttttgagacggagtctcactctgtcacccaggctagagtacagtggcatgatctcagctccctgcaacatctgcctcccgggtacaagcggttctcctgcctcagcctcctgagtagctgggattacaggcgcccaccaccacgcctggctaattttggtagttttttagtagagatggggtttcaccatgttagccaggctggtctcgaactcctgacctcaagtgacctgcctgcctgggcctcccaaagtgttgggattacaggcctgaggcactgcacctgaccctttctttttttttcttttttttttttttctttttggctaaaaagagacaggggccgggcatggtggctcacacctgtaatcccagcactttgggaggccaaggtgggagtatcacttaaggccagaagtttgagaccagcctggccaacacggtgaaaacccgtccttactaaagacacaaatattagccaggcatggtggtggacacctgtaatcccagctacttggaaggctgaggcaggaaaattgcttgaacctgggaggtggaggttgcagtgagccgagatcatgccactgcactccagcctgggtgacagaacgagactccatcttaaaaaaaataaaataaaataattgaaaattaaaataaagaaacacggtctcattctgtcatccaggttggagtgcagtggcatgatcacagctcactgcagccttgaactcctggactcaagtgatcttcccgcctcagcctccagagtagctgggattacaggcacacaccaccacgtccagctaatttttaaatttcttgttgacacaggggtcttgctatgttgcccaggcttgtctcggactccgggcctcaagccatcctcccacctcggcctcccaaagtgctgggattacaggtgtgagccactgtgtccagccccatattttcacaatgctcagttttatccctagaatctggaaaggactgcagttgctatatgagtttgttacttctgttgtaacaaagtagcagggattgagtggcttaaataaccagaaatgtttcctcttctgggtctggttctggaggccagaagtctgagatcaaggcgtcagttgtcagtgagggagaatcttccaagcttccctcctagatttttgcagctccaagagttccttggcttgtagatgacattctcccagtatttttctttttctttttcttttttttttagacagagtctccctctgtcgcccaggctggcatgcagtggtgcgatctcggctcactgcaacctccgcctcccgggttccaacaattctcctggcttagcctcccaagtagctgggattacaggcgtgtgccaccacgcccggctaatatttttttgtatttttagtagagacgtggtttcagtatgttggccaggctggtcttgaactcctgacctcgtgatcaggatcagcctgcctctgtctcccaaagtgctgggattacaggcatgagccactgcgcctggtcgagacagttttttttttttttttttaagcaagctctgtcacctaggctggagtgcagtggcgcaataatagctcactgtaaccttgtactcctggcctcaagcaatcctcctctaccacccccgcttggccccccctcccactgcctcccaaatcactgggattacaagcctgagccaccgcacccagcctctccctgtatcctcacgtcatcttctgtctttgtgtctgtctctgtgtctatgtttcccctttctctaaggcgcagtcatactgggcccaccctactggctttgtcttgactacctctgcaaagaccctattaccaaacaggagccgcctgacccagctcaaataataccacattctaaggattcggagttgggacttcaacatcttttgtggggacacgattcaacccagctccttttctcagacaaagaccagtgctttgtcagttgtggtggctcattcctgtaatcccagcactttgggaagctgaggcaggggatcacttgaggccaggagttcgagagcagcctggccaacatggtgaaaccccatctctactaaaaatacaaaaattagctaggcgtggtagtgcgtgcttgtagccccggctactcagcaggctgaggcaggagaattgcttgaaccaggaggggaaggttgcaatgagccaagattgcaccactgcacacagcctgacagagcgagactcttgtctcaaaaaaaaaaaccaaaaaaaaaaaaaacagtgcttagaggtttagcaaaactcttccaaaatcacagctggctggcaacagtcagagatggggggtgcggggggtctcccaccttcagcctgctttttccccatccccctcattttctctcttttttaaattaatttatttttgagacagaggctcactctgtcacccaggctggagtacaatggcgcgatctcggctcactgcaacctccatcttccgggttcaagcgattctcctgcctcagcctcccgagtagctgggattacaggtgcccaccaccatgcccggctaattttgtatttttagtagagacagggtttcaccacgttggccaggctggtctcgaactcctgacctaaagtgatccactcgccttggcctcccaaagtgctaggattacagccctcattctcttttgctcctcaggtgacacaggacaagatcatctgtctacccaatcatgagctccaggagaacttatcagaggccccgtgccagcaattgctgcctcgggggatccctgagcagattggggccctgcaggaggttaaaggccttaagaacaatttggacctgcagcaatacagctttattaaccagctgtgttatgagacggccctgcactggtatgccaagtacttcccttacctcgtggtcattcacacactcatcttcatggtctgcaccagtttctggttcaagttccctggcaccagctccaagattgaacacttcatctccatcctgggcaagtgtttcgactctccatggaccaccagggccctatccgaggtatccggggagaaccagaagggcccagcagccaccgaacgggctgcggccaccatagtggccatggcagggaccgggccggggaaggcaggggagggtgagaaggagaaagtgctggcggaaccggagaaggtggtgaccgagcctccagttgtcaccctgttggacaagaaggagggtgagcaagccaaagccctgtttgagaaggtgaagaagttccgcatgcacgtggaagagggcgacatcctgtacaccatgtacatccgacagacggtgctgaaagtgtgtaagttcctggccatcctggtctacaacctggtctatgtggagaagatcagtttcctggtggcctgtagggtggagacgtcagaggtcacgggctacgccagcttctgctgcaaccacaccaaggcccacctcttctccaagctggccttctgttacatctcctttgtgtgcatctacggacttacctgcatctacacgctctactggctcttccaccggcccctcaaggagtactccttccgttccgtgcgggaggagactggcatgggggacattcctgacgtcaagaatgacttcgccttcatgctgcacctcatcgatcagtacgactccctctactccaagcgcttcgccgtcttcctgtccgaggtcagcgaaagccgtctaaagcagctcaatctcaaccacgagtggacgcccgagaagcttcgacagaagctgcagcgcaatgccgcgggccggctggagctggccctctgcatgctgccgggtctgcccgacaccgtctttgagctcagtgaggtggagtcactcaggctggaggccatctgcgatatcaccttccccccggggctgtcacagctggtgcacttgcaggagctcagcttgctccactcgcccgccaggctacccttctccttgcaggtcttcctgcgggaccacctgaaggtgatgcgcgtcaaatgcgaggagctccgcgaggtgccgctttgggtgtttgggctgcggggcttggaggagctgcacctggaggggcttttcccccaggagctagctcgggcagccaccctggagagcctccgggagctgaagcagctcaaggtgttgtccctccggagcaacgccgggaaggtgccagccagtgtgaccgacgttgctggccacctgcagaggctcagcctgcacaacgatggggcccgtctggttgccctgaacagcctcaagaagctggcggcattgcgggagctggagctggtggcctgcgggctggagcgcatcccccatgcagtgttcagcctgggtgcgctgcaggaacttgacctcaaggacaaccacctgcgctccatcgaggaaatcctcagcttccagcactgccggaagctggtcacgctcaggctgtggcacaaccagatcgcctacgtccctgagcacgtgcggaagctcaggagcctggagcagctctacctcagctacaacaagctggagaccctgccctcccagctcggcctgtgctcaggcctccgtctgctggatgtgtcccacaatggg

SEQ ID NO: 8071 - DNA, 6000 bp, Homo sapiens
tgaggtgcctggttatagccatgcctgagcccctcccatatgccagactctgcctcaatgccccaggtgcaaggtctctgagctgcttaaccacccttcagggagggcacctgtcccaccaacaggtgacgaaattgaggctcccagggctttgaagcattgcagctaggactccagccagtctgctgggctccagaccctgttcttttctcaaaccacagcatcttttatttatgctttaagagggagaagagggaagggacgagacagagacaggttggtgaggttagtgagagagtaggacctctggggccagacctctgcaatcagggcatatcagtctgaagcctccttggagagctccctggtttagaaagtgcatctgttcccctttctgtgccactcaggaagcaatgggcatgattcagcagaggagaggagagtttagaactggttatgcttccttctccaaccctccctgcaaaaacactggccagctcctgacatcacagtaagacagggttgcgggagggtgctttaacaggatccaaagcagggcaattgggctgctttcaggaggaggtgacaactgagctgggttttgaaggatgcataggagtttgccaaacagagaaagaaagcgtttaagctcttcagggcagagatgttgcttgttttccccaccattttgtgtcttcagcacccaaatactaaatgagcattctaggcagaggccagtatttgtaaaggctaggatgtgtgaaacgatatggtctggtgggagcagagtatcagtcagtaaactggtgggcattgaagctgggcacatcagcagaggcaaggcttgagattgtgagaagccattgctcctgtggttctccctcatcccctacactcatcatgacttgaatgtaccaaggtgtgcaaggatgcatccaagacccttgggtgaggggaaaacatggagctgggggtctggatgcctgggccttcctaggacacctagtccccttccatctgcaccttggggtctgtcagaaaggtagcagggtctctgagaaagctgcaccagtgactcagaaggctgaggtgggaggatggcttgaacccaggagtttgaggctgcagtgagctatgatcaggccagtgcactccagtctgggtgacaaagtgagaccctgtctctaaaaaaaaaaaaaaaaaaaaaaaaaaaaataggggattgcagataccctgcagtggtcatggctttggctgtgagagctgagtacagttgggaccaagagtgccaagctggccatgtgtccttgagcccccacgggcacacgggatcaagccaaccttgtctgctagtgaagatgatttctttttcttgagaaatcaaccacctgggctgaagtccccacatccacccagctgttcatgtgtctactctgtctgggatgcctgggcctcgttgtaggtctagactagctgctatcccacacccttgactgcttgttgggtcactgacttctagtgcccctccccaaccagagtatccaatgctagcaacagcttctaatacttcactgatgcctaaatgtcagttgccccatagcatggtacttagcctgccccttcatgtgcagtctcttccttttttttttttttcccccaaaacagggtcttgttgaccccttgctgatagatagaggattccatccatcttcatggatttcaacagcagccactcactgacaagtcctacccaggccccacccaccccaagcctgtgccccaaacctgagtagctcctgcctcctccacacgcccacgggaacattttagctgccctcccccacacccacaatttgtgttgtctgacacttagcctgactcctgtcctgaaatcagctcatccattctggttcatccagttcttcagactggaaggctgacagcttcagtggccaagtggggtgaggctgaagatggaattaaggttgttaatcagctgagcttgagatgggagatcatctgggtgaacccagtgtcatcacaagggtcttaaaatgaagaagacggaggcaggagagacactgtcagaatgacaaggtgggagaaagacccaactagccactgctggctctgaagatggaggaagggaccaggagctggagggtgcaggcagcctctaaagccagaaaaggcaggaaatggctgggtgtggtggctggagcctgtagtcccagctactcgggaggctgaggcaggaagatggcttgagcccaggagatcgaggctgcagtgagctatgattgcaccgctgcattccagcctggaagacagagtgagagattgcctccctgcagaaaatgtagtctcttagcaattttccagtatatactatattattaactaaaatcatcatgatgtacagatctcttggacttactactgctgctaactgaaatgtcatatcctttgaccaatatcttgccaatttcctctcccaacccttctcttttctggctccactttggaaagcatttggctcttggggggccccacctctaaaatgtctctggaatccccttatctctaccttatctcaactggacatgccagagcaccctcttctggcctccaaaatgctacgccctgcatggcaaccaacacctgagaatccctgcattattcaaaatagaaccaagggcaacggaaccctcacattctcctgctgggagtgtaagatggtgcagtcctgccttggaaagcagtttgcccaccttggcctcccaaagtgctgggattacaggggtgagccaccacccccggctgccccctaggctggtcttgaactcttggctttggccaggcgcggtggctctcacctgtaatcccagcactttcggaggccaagacaggtggatcacgaggtcaggagatctagaccatcctggctaacatggtgaaaccctgtctctactaaaaatacaaaaaattagccgggcgtagtggcgggcacctgtagtcccagctactcgggaggctgagcttgcagtgagctgagatcgtgccactgcactccaggctgggcgaccgagcgagactccatctcaaaaaaaaaaaaaaaaaaaaaaaacactcttggcttcaagcaattctcctgcctcagtctcccaacgtgctggaattacaggcatgagccactgcacctgggtctattttttattttatttatatatttttattttttattgatttactctgtttttggagacaggtatcactctgtcatttaggctgaagtgtggtggcatgatcacagctcattgcagccccaaactcttgggcttaagcaatcctcctgcctctgcctcacgagtagctaggattatggccacatgccaccttgcccggctaatttttgtattttttgtagagacagtttcgctatgttgtccaggctggtctcaaacccctgggttcaagcaatcctcctgcctcagcctcctaaacactggggttatggtatttttatttttatttattttatttatttttgagatgaagtctcgctctctcacccaggctggagtgcagtggcacaatcttggctcactgcagcctccgcctcccgggttcaagcaattctcctgcctcagcctcctgagtagctgggattacaggtgcccaccaccacccctggctaatttttgtatttttagtagagacggggtttcaccgtgttggccaggctggtctcaaactcctgatcgcaagtgatccactcaccttggcctcccaaagtgctgggattacaggcttgagccaccatgcccggcctatttttattttgtaacatggcaaggttatcatgaagaactgacaaaactaagctttgatgacaaaaaaaaaaaaaaaaaaaaaaaaagctggtggggggcagggcaaggtggctcatgcctataatcccagcaatttgggaggctgagtggggaggattgcttgagcccaggaggtcaagtgtgcagtgaggtatgatggcaccactgcactccagcctgggccacagagtgagaccctgtctaaacaacaacaacaacaaaaaaacaaaaaaactggaatggttgttacttttggatgacaggacaggggtggaggttgactgggaagaggtatgagggaagtttctagaggaaatatttgtgataggagactggattagtcaggtacatagttttgtccaaactcagtgactgtacccttaaagatgtgtgcgggccaggcgcagtggctcatgcctgtaatcccaacacttcgggaggccaaggcgggaggatcgcttgagccaggggtttgagaccagcctggataacatagggagaccctctctctacacaaaaatttaaaacattagccagtcatggtggtgtgtgcctatggtcctggctctgcgggggctgacatgaaaagaccacccgagcccgggaggtcaaggctgcagggagccatgatcgctgcattccagcctgggtgacagagtgagaccctgtctaaaaaaacaaaaagtctgcatttcacttgggtaaattttaccttgaaaggaaaaacccataagcaaatattgaaccctagttaatgatctgtgtgctgacatgtgtaggggcgatgtggcctgaggtcagctgcctactttgaaatgcatcgggaacaagcagatagactgatggtggatagagggatggatgggcagaggcagatgggtgatggaataaacagaatggaatgcaaaggggagaatctagtggtgggaatacaggtattcactgtaaaattctttcaacttttgtgtaggtttgaaatgtttattataaaacattgggggaaggccgggcgcggtggctcatgcctataatcccagcactttgggaggctgaggcgggcagatcacttgaggtcaggagtttgagaccagcctggccaacataacaaaaccccatctctactaaaaatataaaaattagccaggcatggtggcgcatgcctgtaatcccagctactcgggagactgaggcacgagaattgcttgaaccctcaaggtggaggttgcagtgagctgagatcgtgccacggtactccaggctgggcggcagagtgagactccatctcaaaatgttgggggaaataatccagattcttccctgcggcccccatgccttgcaggctctgtgctgcccctcatcacctccctgccctcccctcctccctctctcccccttgctcactgcaccagccacacggacctcctcactgttgctccaacatcccaggcatggtcctgcctcagggcctttgcacctgctgcgtatttatctagaaagcccctcccccagccccaccttcttgtgtgaaaaacccacaaccttctcatctttttttttctcatagggtcttgctctgtccctcaggctggagtatagtggtgtgatcgtagctccctgcagcctcaaactcctgggctcaagtcgtactcccacatcagcttcctgaatagctagaactacagatacgtgccagcacacctgactactttttaaattttttgtagagacagggtcttgctatgttgcccaggctggtcttgaactcctgagctcaagtgatccacctgcctcggcctcccaaagtgttgggattacaggcatgaaccactttgcctggcctgacctccgcatctttttttttttttttttttaagatggagtcttgctctgttgcccagtcttgagtgcagtggcatgatttcaactcactgcaacctctgcctcccaggttcaagtgattctcctgcctcagcctctcaagtagctggggttacaggcacatgccaccacacctggctgatttttgtatttttagtagagatgaggtttcaccatgtgggccaggctggtcttgaactcctgacctcagatgatccacccgcttcagcctcccaaagtgctgggatta

SEQ ID NO: 8072 - DNA, 6000 bp, Homo sapiens
agtctcgttctgtcacccaggctggtgtgcaatggtgcactcttggatcactgcaacctctgactcccaggttcaagtgattctcctgcttcagcctcccaagtagctgggattacatgcatgtgccaccacactcggctaattttgtatttttagtaaagacgggatttctccatgttggtcgggctggtctcgaactcccgacctcaggtgatccgcccgcctcggcctcccaaagtgctgggattacaggtgagagccactgcgtctggccttagagacagattttcatcgtgttgtccaggctaatcttgaactcctgtcctcaagtgaccctcctgcctcccagagtgctgggatcacagatgtgagccaccactcctggctgtaaacagtcactcttattataatctgcaggaccaccaccttttttcttaaactattttaaaaattctcattttgaaatgtaacttttttatttattatgtatacaaacacacatatatatttgcatcataaatgttattcccaatatgggacagattcctttcaacccccaggtgaatcacatggtaccctggaaagacctaggaagccctccctcccaccatctccagggaggtagtgagaacggcaggtgctggggactgggaaggctttggagtttcccagcctacctcttctccctttctcaacaaaggatacctgttccctattattccccttatccactcttcccttttttaaaaaaaacccacaaaaccatcattagtaaaaaaacaaacaaaaccccttcaagtattgggagttaggggtcctgggctgggacttggagttacaggtcaccaaggaagagggaagggaagagaaggaggggctgtcacttactactgctggctttcttccttgctgcatgctatggcaactgtgtgtcgacctcctttgctggcaactgcacgtatgggaccactgagcccggaatgaaacagtcctttttaaaaaactttttttgagacagagtctcgctctgtcacccaggctggagtgcagtggcatgatttcagctcactgcagcctccacctcccgggttccagcaactctcctgcctcagcttcccgagtagctgtgaatacaggcgcccgccaccacatccggctaagttttgtattttagtagagatggggttttgccatgttggccaggctggtctcaaactcctgacctcaggtgatccacctgccttggcctcccaaagtgctggggttacaggtgtgagccactgcacccagcctagaagttcttcactgataaaatgtgaggatatttctcaaggtgtgtgatactgatgtcagctcatttgatgttgagatactgatccaccgaatggagggtgccacagatgttcaggtctttcttgagttccatgaccacattcatgcccacaagggacttgaaaaaaggaatagaagagcatgatgctggcgacctgaccaggaagagcaacacatattttattttatttatttatttatttgagatgctgtctcactctttcacccaggccggagtgcagtggtgcaatcttggctcactgcgacctctgcctcccggggtcaagcaattctctgcctcagcctcctgaggagctgggattacaggcgcccgccgccacgcccgtctaatttttttttttttttgtatttttagtagggaccaggtttcaccaagttagtcaagctggtcttgaactcctgaccttgtgatccactcaactcagcttcccaaagtgctgggattacaggcgtgagccaccgtgccgggccagcaacacatattttaaaagggcagaagtcggttgggcacagcggcttacacctgtaatccctgcactttgggaggctgaggttggtggatcacctgagatcaggagttcgagaccagcctgggcaacatggcgaaaccccgtctctactaaaatacaaaaattgccactgtactccagcttgggcaacagagcaagattctgtctcagaaaaaaaaggcaggcagagtacgggggagaaggtcaagtattcacaaactaaactaagctatgtaactacaattctgtttccagtgcccagaagctgctcctatcatcccagtagttattactaccccaaaagtcaaccactgatatatgttctgttactataggttgattagctatgcctgttcttgaacttcagaaaaaagtgtgtggtttctttcacacaacattatgctttttggggagagattcatccatatttttgcctgtatcaatagtttattcctggaccaggcgctgtggctcacacctgtaatctcagcactctaggaggctgaggcagaaggatcacttgagaccagcctgggcacccatagggagaccctcatctccacaaaaatttaaaaaattagccgagtatgtccaggtgcggtggctcatgcctataatcccagcacttttggaggctgaggggggcggatcacctgaggtcgggagttccagaccagcccgaccaacatagagaaaccccgtctctactaaaaatacaaaattagccaggcgtggtggtgcatgcctgtaatcccggctactcagagactaaggcaggagaatcacttgaacttgggagacggaggttgcggtgagctgagatcacaccattgcaccattgcactccagcctgagcaacaagagtgaaactttgtcaaaaaaagaaagaaagaaagaaattagccaggcatgatagtgtgtgcctgtagtcccagcaacgggaggctgaggcaggaggatcacttgagctgaggaggtcagggcttcagtcagctatgactgcaccatcgcaatccagcctgggcaatacagcaagatcctgtccctaaaaaaagaaagaagaaaacattcattcctcatcactaaggagaatcccatggtatgggtgaaacccaccatggtttgcttcaccaatgatctgttaatgggcatttgggctgctcctagtttttttgcccactacgaataaggatactataaggctatcatgaacatttatatgaatgtgtctgtgggtttttcttttcttcacttatactttttcttgggtatatacctagaagtgcaatttctagggtattaactttgcaagaaactgccagatcgttttccaactggttgtggcattttacattctcaccaacagtgtaggagagcccccatatgcttcccatcttcctcaacacttggttcgaccagtctttttaattttagctattcaggtgggtgtgcaatgatatctcatcgaggttttgatttacatttccctgatgacttcgtgctttattcttttttctttctttctttctttttttttttttttttgagacagggtctcactctgtcacccaggctggagtgcagtgatgttttcacccatttttctttctttttttttttctttttgagacagagtttcgctttttgcccagttctgttgcccagtttggagtgcaatagcgtcatctcagctcaccgcaacctccacctcctgggttcaagcgattctcctcctcagcctccagagtagctgggattacaggcatgtgccaccacaccaggctaattttttgtatttttagtaaagacagggattctccatgttggtcaggctggtctcgaactcccgacttcaagtgatccgcccgcctcggcctcccaaagtgctgggattacaggcgtgagcctccgcacccggcctgttttcacccattttttccacaataactgtcaaggctgcagggaacaccccttggttactacatcccatgcacacacacctgcagtggtttgtccagggtcagtgccagacaggaatcgcaccaggtgaacatgacttggatatactctttctgccaggaaacattctgcttcaaagtattcactcacctgattttatgttattaaactctaaaattcttaccaatctgatgaatgaaaatggcatcttttggtatgttcagtggtacacggtgatcaatatttacctatcaattatttatctatccatcttctattattatttttattttattttattttattttattttttgagacggagacggagtgtcgctctgtcgcccaggctggagtgcagtgacacggtctcggctcactgcaagctccgcctcccgggttcacgccattctcctgcctcagcctcccgagtagctgagattacaggtgcccgccaccactcccggctaatgttttgtatttttagtagagacggggtttcaccgtgttagccaggatggtctcgatctcctgaccatcttcccgcctcggcctcccaaagtgctgggattacaggcgtgagccactgcgcccggcctattattattattaattcttattattattttgagacagggttgcccaggcagtggcacaatcatagctcactgcagcctcaaactcttggactcaagtgatcctcctacctcaggctcccgagtagctgaattacaagtgtgcctcaccaagcccagctaattttttaaattttttgtacagatgagggtcttcctatgttgcccaggctggtctggaactatttggcccaagctatcctcccgcctcagcctccggagtggctgggattacaggcccgcgccaccacgcccagcctcaatatctccttgacgatgaaatgcatagatgaatgaatgaatgaatgacctctgtttgctcaccatgcacaccctcaagagggttacttgagagctaagactggaaacaaaggttggggccccacccctcccgggccaggccccgcccccggtccccgccctcgccctctcgaggctcccattggaggaggcgcgcgggggctggcccggcgggaggggcggggccggggcccggggcggggcgctgcagcccgcggagcctcccgcccgcccgggctggggtcgcgctggctcggactccgctccccgccccgccgcggccatggaggacgagcggaaaaacggagcctacggtaggagccgcctccggtcaggggccgcctctgctgacctgcgggtgggaggaccttgagccagggggacatctgagaccctaggcaccggcgctgcggctggatggccctccgcgctcgggcccccgcatccgacactgcgcggatcccacgccccctgctctaaccgggtcgccccgcgtcccctccccgggagccccagctccccctccggctgatgggccggggctcacggcgcatgctccgcccggggaggtcccgttatctgggcggctcggatggcgggcgggggaggggaggcgcggcgatctgggctcggaaaagagacagggccctgacctcctcaaatccccctcctcttccaatcccctttgtccatttcttcctccttcccttttccgccagaagtagccgtccggggcttttggccagatggggaaactgaggcaagactgggcagaccgaatacccagctgagagcccaccgagtctggccagccgcctggaaacggcggaaagaagggcgcctttggtgagggggcaggaaggaagcaggaaaaaattgagaaactttcccctccctgtgcaaggggctggcggctcccacctcccatttcgagaggtgctggcgactggaacttcctccggcgaacctcttggggcgacctcaggcatttggccccggggatgggcccaggatgtgggcttctccatcaccagcgccctgtggtgccgccctcccctgaattcccacggtgggaggagttgccatcctcagtttctcctttctcttctccattttgggtccccaagacccaacggagccccagccccacgtgatactaccctgggggcaaagaagcactgtcgcgcccctctttgtgtgacaagaacttcctggaaactgtgacactgaagggccctggggagg

SEQ ID NO: 8073 - DNA, 6000 bp, Homo sapiens
agaggagccaaggcctggccccagccctgctcccttctctggccaggccaagtggcaacgcctggccatggagggcagcacctgtctggatgtgtttgagcacatcagccttatgaccctggacagtctgcagaaatgcatcttcagctttgacagcaattgtcaggagtgagttcttgcccagggcctgggaacatgggatggagtgggggtgtgggtgtggggagagcaaagcccagggagacaagaagagccttcctggagagatgatgagaactaggcattgaaggacaaagaaggagagaaggagagagagagagagcgagagaaagagaagtttcctccaaacaagtggaactgtttgggtcaaggcaaggaggctaagatgaacagagcatgtgcaacaggcagttgggagacacttggaaatgaaggtggaggggttggcagttaactagatcttaaggatcttgaaaagtcagacaaagggagatgcattttatccaaggttcctaaggagccatggaggtgtttgagcagatgagagacatggtcagtactgagcttggacactggactctatgggactctatggaagattgactgtcatgtagacacagcatgcaaggatgccagggagaggaggtctgagtttggtggagaaaatggggcagatttgggagaaactgagtaataataggcaggagcagatgttttataagacagagagaggagatgcccatgatggccaagctgtgccctggggacctggggcaggaggcagctcacagagagtgggaggcagagagtgaagtgcgcttgcaggacacccctttctgcatggaatgtggtcctgggattctggctggaaggtgctcccaggctttcatgtgggtaaggagctgcttcctctctctggactggccctgcaggaagcccagtgaatatattactgcgatcatggagctcagtgcccttgtagtgaaacggaataaccagttcttccggtacaaggacttcctgtacttcctcactccctgtggacggcgcttccacagggcctgcagactggtgcacgacttcacagatgccgtcatccaggagcggcgccgcaccctcactagccagggtgttgatgacttcctccaagccaaggccaagtccaagactttggactttattgatgtgctcctgctgagcgaggtgggcctctctgggatctgaattcaagaggtaaaatggagcttcaggtcaaatgtcagattgaaggaccggacttgatacagagggcactaaggagccatggaaggtgctcgaagaagggagggacaagtcagataaattttagaggtgattgcatagaaagcttcctgggaagaacaaacaggaggtcggaaggaagcatgtgggggtagatctggaggtgacaagggagggatccttctgggataatgggtcttcagagactgtttcagtttagactccagtgaccccagaactagtgtgattggggttcttgtctccaggataaaaatggtaaagagttgtcagatgaggacataagagcagaagctgacactttcatgtttggaggtgagtgtcccagtctggggctacagtggggacaggggtctctccactccagggaagtggagggccggccctgaatcacttcattctgcccaacctccccctcccctcaaccttcctgagagcctcaatgtatgggcgctgtccaccctctgggtgctgaagcagcccagagactcaagcctgcctggctgaccctcaggccatgacaccacggccagtggcctctcctgggtcttgtacaacctcgcgaggcacccagaataccaagaacgctgccggcaggaggtgcaagagcttctgaaggaccgtgagcctaaagagattgaatggtgagtgcaggtgctggtggctctgcctttctgcctttctgagtccttctcgttggttcttctccccaggtgggggaaaaggggaggatctttttgatgattctgccattgttgcctagtgggaataggagtagagcccagaaacaggctagcaagggtaacattgcatgctttggggacagaatggtctgggagtccatatttatttccccactaacttgctatgcaagcttagtaaaatcaattcccttttctgaacaacttttctcctttgtaaattgggggtgtggggaattgctgtcccacagggctgcttggagaattaacggcaaataccgcaatgacttttggaccaatctaatattatgatttatcaaaacattctcttatcaacgcgtgtttttatactttccagccttttggtataaaagacatgatgtgttgaatatcggtgtacgatgatcattgctgacatgtcatctttgtagagcagattcctagaagtgcaactgctgagccaaagaccatttgagttttacaattcaatagctcttgggaaatctactgctatacacagattttgagaataccaaatttcctcataacctccccagaagtgcctattatgaaactaaaacatttgccaatctgatagatgcaatataatattttgttattttaatgaacataactttaaatgtgggtaaagttgagcactgttttcacctgccgatgagccatccatatctatttttctgtgaagtcagtttttgcgtaatttgttttttctactttgggtcgtactagttttcttatttacttataaaaactctttacatattaagaaaattatttcttttttctgttatgcaaaatgttgcctcgcattgtcttggactttatttttatttttggttcatttatttgtcaccaaatttattaattttttcttttataattcctgtttgtgtttcttaaaaaaatatttaaaaaccattttatactctaatagtaaaatgcaaaactcttgtttgacttattttaataggcttatatatttttaaaagtttaacattttatcaatatttttcacatttagaaatttttccctttgaaatctatgttggaatctattttttctccaaatgtctaattgtcccaaccaagtttaatgaatattttgtccttgtgtcatgattctaaataacaacaaattcacaagaaactatgtgtgtgtatatatatatatatagtgtatatatatagtgtatatatatatagtgtttgtgtatatatatatacacacacacatactatatatagtgtatacactatatatatatgtattttaaggcaacaaataaaaccatatatatatatgcctatcttaggcatgtatgtatatatatggttttatttgttgccttcattttgttccatttattatgtagtcctacatgagcagcatgaagtctacttttaaaaacactttaatatttggtagagtttgttctgtctcattactttgtgtttacagttttttttccctcgagttcctatttttttccatttgaactctgtgatcaggttagccagtttgacaaatacttttgaaaatgttaattaataaattttttggaccttaggtgctaatgtttgagttaacgatgctcttcaattcatggcaaattctcgtcatttttctatacaatacgtatttcttcccatttatctcaaatctctccttccagctctccatcagtatgattacaaaatggtggatacttttatctgtaaaacttgttgttggggtggatacattttaaaattctatatatgtttttatttcacagatgttgtgctggttcttaccttttcagaaatatagcactatgatttgtgctacgtttgcagcaccgtggttgcatgctatgatttgtgctatataaatgtagcactatgatttgcagcaccgtggttctaagtacatttattctcttgcttttagctatgatctagtccttttctcttcagttctgtagtggatacctggactgcttctatctctccagtgcaatgaccatctttgtgcatatctctttatctgcatgtctgataatttctctgggatctacagttgggaaccagcttgctgggctgtaaaacacacatctttccttggccatgtcctggaggttgccttccatattggcagcttctgtgcaccccactgtcagtgcatgtgacccctctacccacacctcagccaacccttggcaacacctacctttggccattctagcctcgaatagatgtgaagtggtacctcgttgtcagctagcttccatttctatgacagctagtgactttgcgcatctcctcttacatttctcatgtttgagcatccatgaattcttagatcaaatcctttgtctacttttcacttgggttacctgttcgttctcttgtagatttgcaggaattcctaacatattcagatattgttctggatatctatctatctatctatctatctatctatctatctatcttaggcatcttctctgaatctcttatctctcattggaatgttaattgggtccactgtatcttttactgcacagaaatccttaatttgcatgcgtatttatcctttatattttatcttgtttaagcttttggggttttaagaattcctactcttaagtcacaaaaatttctcctatgttatcatcttttaacattataattttacctttctcataaaggaaaagactccaccttgtatatgcagtagacaagaacctgtttctctctgttcccacatttccagtggtctgaacaacttccaccacactatccattctccaggggcgtgtggaccttcctttagcagatgttaagtttccccctattcacaggcctgattctgagctctctactctgttctatggatctgtttttctgttcttgcagcagtcccacagtttttttaaaattattttatttttattagtatgcatttgtaatatctcttaatatctggaagcttgggttctccttcttcaatcttttatttaaaaattgacctagcttggatagggcatggtggcttatgcctgtaatcccagcactttgggaggctgaggcaggcagatcacttgaggtcaggagtttgagaccagcctggccaacatggtgaaaccccatctatactaaaaatacaaaaattagttgggtgtggtggtgcacacctgtaatcccagctacttgggaggctgaggcacaagaatcgcttgaacgcaggaagtggaggttgcagtgagctgagatcaggccactgcactccagcctgggtgacagagtgagaatccatctcaaaaaaaaaaaaaaaattgacctagcccttgatgaactttaaaattccttcaattagaataagatttcaaagttccaaaaagaatccagctagatttttattaattgcatgaagtatattgattagtttagaaataattgacacctttacaacatatggtcatcccaccctacagtgtggagtggagattatttattcaaataactttataagccctttgtagagatgtttttttcctgcttttgttacctctttatataattttaaatactttttcacacaaacaaatgaacacttttgtttttgagatggagttgctctgcctcccaaactggagtgcggtggagtgatctcggctcactgcaacctctgcctctcaggttcgagggattctcctgcctcagcctcctgagtagctgggactacaggtgcccaccaccatgcgtggctaatttttgtgtttttagtagagatgggatttcaccatgttggtcaggctggtgtggaactcctgacctcaagtgatcctcctgcctcaggcttccaaagtgctgggattacaggagtgagccactgcaccccgccggaatgaatacttttaagagacaccctctgaatattgttttgctcagaaatacctctaaaaacaccaggtcaacttttcttctagtagttttgtgactttggttttctaatgct

SEQ ID NO: 8074 - DNA, 6000 bp, Homo sapiens
cccttgggcctttaacaaacataggtggtagcctttcaagtttatttaggaccctggagcactttagcctgcaatggtggtactagctggaactcaggttctgaccactgggatggacaattcccttctgactagggctggcctaaatgcttcctctgtcggcactggctaaattctaccccatgttgctttctgctgtgacagggcagcactgagtttcaatgcaaagtcccatgatcactgtgctctctcccctccactcaagcacccagattctctctccagccatgaggccacttctgggagatggggaagtgttagtgtaggcaatttaagactcttttggccaggcacagtgggttactcctgtaatcccagaactttgggaggccgaggcaggcagatcacctgaggtcaagagttcaaggtcagcctggccaacgtggtgaaaccctgtctctactaaaaatacaaaaattagctgggcgtggtggcatgagcctgtagtcccagctacttgcgaggctgaggcttgagaattgcttgaacccgggaggcagaggttgcagtgagctatcgtgccattgcactccagcctgggtgacagagcaagattctgtctcaaaaaaaaaaaaaaaaagaaaaaaaagaaaaagaaaaaagaaaaaagaaaaaaaacctgtcttttgtacattctttagtgcctctttaaatttttaatttttgtgggtacatactaggtatatatgtttatgaggtacatgagatattttgatacaggcatgcaatgcacagtaatcaaatcatggagaatagattatccatcccctcaagcatttatcctttgtgttacaaacaatccagttacattcttttcattattttaaaatgtacgattaagttattattgactatagtcaccctgttgtactatcaaatagtaggtcttattataggtctaattaattctttctatctttatttgtacccattaaccatccctaacttcccctcactcctccactccccttcccagcctctggtaaccatccttctactctctatctccatgagttcaaagtacctctttttttgatatgatgttaaaaccagataccatgatcactcacctaatttttggttcttatgaaggtattttcttgtgtggatatttgttgtatttggcgttcctgtggaggagacgatcaatgacgcattttattctgccatcttgctctacctcctcctttttgtgattcagatgagactccttgacagctggtggctaaattttcaaatgcaatatttttggcagaaaatatattcactcatgtaaaaaataaaatgcacagtgaaaaatgtttcttgtacctatgcccttcatttatccagtctcgccgtctttacaaaggtaaacacttttactttttctgtatcctttcatagtatatttaggcaaataatacatgtaattaatctcctttgttcaggatgatgaattgccccccccccccacgatggtcagttcacctccctggggcacaactgtaaaaccctcacagctctagctgtattcagggtcaactccaccagccatttcatccaccatatgactcctacagatgagatacgtaaggtgcagacaggttgagagatttgcccaaggtcacacagccaggaaatagcagaactgtatccaaacctaggcctggtgaacatccacaataccgcatgcctcctgcatggtctcaaactccttctccttgtccttgcctgtggacagccccactcatcttaaaattacatttacggccaggcacagtggctcatgcctataatccaagcactttgggagtccgaggcaggaggataacctgaggttgggagttggagaccagcctgaccaaaatggagaaaccttgtctctactaaaaatacaaaattatctgggcatggtgctgcatgcctataatcccagttgcttgggaggctgaggcaggagaatcggaggcggaggttgctgtgagccaagatagggccattgcactccagcctgggcaacaagagtgagactccgtctcaaaaaaaaaaaaaaaaaaaccaaaaccaaaaaaaagcaaaaaaccaaaaaaacatttactcagtaggcactctttttttttttttgatgatgagtatcgctctgtctcctaggctgaagtgcagtggcatgatctcagctcactgcaacctctgcctcctgggttcaagcaattctcctgcctcagcctcctgagtagctgggattgcaggcacacaccaccatgcccagctaattttttgtaattttagtagaagcagggtttcaccatgttggtcaggctggtctcgaactgctgacctcgtgatctgcccgcctcggcctcccaaagtgctgggattgcaggtgtaagccactgtgcctggcccagtaggcactctttaagagcaggtgtcacacagtagaaactctatgtagaccatatgtagaccatgagtcacagagtgggcacactatgaagagcaggtggcagcagtaggcactctttatgtagagcaggcagcagtgagtaggcactctttatcaggagcagatgatactcagtaaacactctttatatagagcaggtggcatctgtaggcactctttatctagagcaagtggcattcaatgggctctctctcttttttatttttttgtgagacagagtctcactctgttgcccaggctggagtgcagtggtatgaactcagctcactgcaaactctgcctcccgggttcatgagattctcctgcctcagcctcccgagtagctgggatcataggtgcccgccaccacgcccggctaatttttgtatttttagtagagatggggtttcaccatgttggccaggctggtcttgaactcccgacctcagatgatctgcctgccttggcctcccaaagtgcttggattacaggcatgagctactgtgcctggccagtaggcactctttatgtattgcaggtggtactgagtaggcactttttatgtagcgcaggcaagagtaggaactcttcatgtagagcaagcagcactcagtaggcaccctttatgtacagaaggcagcccacagtaggtacactttatggagcacaggcaacactcgagcaggcagcactcaatagaccctctttatgtagatcaggaaacactcagtaggaagtcaccatatagagcaggtggtatcagtaggcactgtttatgtagagcacttggcactcagtaggcatgtgttatgtagacagcaactggtgctcagtgggcactcttcatatacagggggtggcactcaataggcactcactatgtagagcaggtggcacacagtaggcactctatgaggaatatcaggaactgagtatacagggttaatgtagagcacctggcacacagtaggcacactttatggaaagcacttggcacagagtagacaggatttagcacctggcacacagtagctgcccttcatttagagtattggcacacagtagaagtactttccatgcagcctttgtgcagagtagagactggcacacagcagctcaagtgctagttgccaccctttcccttcactcctttttggggctccctcctcttaggagccctcattgtcccccgctaaggccctcatcgaacatcccatttcccagatgggaagactgcacccaggaggggcagtactgaccaaagtcagagcaaggatgaggcagaatgaggactccattcatggttccctggctctgcccttcccctgcctggaccccatccgttccctctcatcctaaccctccacgtccccgctctgtcctcctatactgagtccggcctccagatttgcttttccagctgagctcttaatctccagaatctgacccaggtaatcctcagtggggctggattctttgttcccgttcctagcagtcaggtctccaacagggccctggactgcctggaggcaagacttgaactccatccagcagcagggggatagaggcttgtctcttccaggttgcctgattcagcatccagaagtggtacacggtgtcctaccggcccagggttagagaggagcacaggagatgatctggaacaaggcttggcctggcctggctcgcttgacacctgaactctcaagttcatgcttttatctgccacacactcagtaggtgctctttaagagcaggtgtcacacagtggaaactctatctgacccctctcggcttactctccaccttatgtgggaggtgctgagacctgaggatccagtgcctgtgctgtgtcaccctgagctggttcctctgcatccagctggtctcccacacccaggttttggccagctgcccagacatgggagcggcacccaggctgtggggattggctggcccagcccagcccagcctagcctcccacagccttccctacatcaggggccaggggaaaaaacctcccagaagaaggggagaggaggttgtgtgggacaaggtgctcctgacagaaggtgccagggtgggggtggtgggcctggggcatcctagcctgtgatggagatgggcactgggcaagggattgggcgcacacataggggagccccagccttcccacattctccattgctgcccaaggcccaggcagctcctggttgctggcttggaggatgagtggttttctaactgaaaccaagcccctggcaacgtcctaatgattcaggctgggcctttctggactttaatcagtttctctgtctttctcaatctaagtgcttaccgggtaactggaggccacttggttgctggttttggctgggcctttctggactttacccctcagcccctgtttatccatccctgtttactcttactgttctatctccagcactgcccgtctctgcctctctccactgtccctggagctccctgggcccttccctgggcctcaggacctcactcaccaccccatctgccctgcaggatgccacagctgagcctgtcctcgctgggcctttggccaatggcagcatccccgtggctgctcctgctgctggttggggcctcctggctcctggcccgcatcctggcctggacctataccttctatgacaactgctgccgcctccggtgtttcccgcaacccccgaaacggaattggttcttgggtcacctgggcctggtgagtgtggcagcaggacgggtctggggtctcagggtggatggacttcctgaggggtaagaatgaggctcaggtgagagggggtgggctggggtctggggtggcagagaagcaggggaggcgtcttactcattcctctgcttactcatttctgtgaggtgccaacccaagcccttctcacctccctgttctcccactcttggcctgtgttgaatccttttcctgcctgtctttccacattaatgcacctctgcggggctcttgggcagggggttgggtgcacagaaaggtgaacccctggcgttcccacattctccattgctggactcgaggcctcctgtacccactgttcagggtcctctccctacctggcctatttcctcttatgagggtataggtgggccagaggagaggtgtgggctgtctctcacctccaccacatccggaggcaccttcctcttatcttgttcctccccagtaagatgtcccaatggggtcctgttgccaaacccacataaaagttggccactcacttcccctttcagaagccttccctgacctttctcctcccccagaccttgccctctgacttagacctgctctcccctttgcggaacgtggtctcaatctgctcattgcaaatggcaggattgatgggtgtgtccacaggtgaagtgggagggtgcacaggatgcactagcacagagcctggtgcagaagcttctcccaggtgggagccactgtcatgatggacagttagagtcacctctgc

SEQ ID NO: 8075 - DNA, 6000 bp, Homo sapiens
tcctaaagtgcaaggattataggcatgagctactgcatccagcctgagcctgggtgttaaaggattttttttttttttgagacagaatctggctatattgcccaggctggcgtgcagtggcacgatctcggctcactgcaacctccacctcctggattcaagtgattctcctgcctcagcctcctgagtagctgggattacaggcgtgtgccaccacacctggctaatttttgtatttttagtagagacagagtttcaccatgttggccaggctggtctcaaactcctgacctcaggtgatctgccctccttgacctcccaaagtaccgggattacagacgtgggccacagctcccggccatgtttaaggaggctggtgcagctggagcagatgagtgagggcagagattgtgtgggaaagatggcagcagagaggacccacatcctgcagccacaccccaggcggtggcttctgggtcttggcaggggaaataaatggcttttctgtgcatttgaggaagtgggttctggaggatggcaaaatcgcactggcacgtgaagtgcaaacagctccaggcaggaccgactggtctggcagcgggcggccaggcgagggtccccaagagtcagcctggatgtcactgctggacactggtggcaccgtgtctggcttggggtgaagttttttcacccaccttgaacaggagtgcagggtaggcgctgtaacatgcagggaacatatgacaattgcctgttggcaccaggcatggtgactggtgcctgtggtcgcagctactcaagaggctaaggcaggaggatcacttgagcccaggagctggaggctgcagtgagctatgatcgccactgcactccagcctggacaacagagcaagtgagatcctatcactaaaaaaaaaaaaaaaaaatttttaattagctggcaaggtggcttatgtctgtaatcccagcgctttgggaagccaaggcaagaggattgcttgaggccaggaattcaagaccagcctggacaacatagtgagaccctgtctcttaaaacacagcacacacaatcaatacctgttgggccttcctggcttataggccatggtgtgccaacagctctcacctggataccagactgagcctcccactgcccagaggttcctcattctgctccttctggtccttctttttccaccccctaacatctggacatctgggctgtgatcgaaacattgatgactttcttcatcttattttccttttttttttcttttctttctttcttttttttctttttttttttttttttgagacagagtcttgttctatcgcccaggctggagtacaatggcttgatcttggctcactgccacctccgcctcccagattcaagtgattctactgtctcagcctcctgagtagctgggattacagacacgcaccaccacacccgggtaatttttgtatttttagtagagatggggttttgccatgttggccaggctgatctcgaactcctgagctcaagtgattgcctcggcttcccaaagtgctgagattacaggcgtgagccaccgtgcccagcttttttttttttttttttttttgagacatagtcttgctctgttgcccaggctggagtgcagtggtgtgatcttggctcactgcaacctccgcctcctgggttcaagcgattttccttcctcagcctcctgagtagctgggattacaggcatgagccatgagccaccacgccctgctaatttttgtatctaatattttgtatttagtagagacgggggtttcaccatgttggccaggctggtctcgaactcctgacctcaggtgatccaccactttggcctcccaaagtgctgggatgacagctgtgagccactgcacccagcccttcaccttattttctaaacctgcatactctcctataccccagcagccagcctctgtctaggccaccaaactcttccacctagatgttacccaatctccccccacccagcctcctgagtagctgggactacaggtgtacaccaccacactcagctaattttgtttcatttttttatttagcagagacagggtctcccttagttgccctgccctgactgaaatgtccctaatcccttagtgaccacagggatttttttttttttttttaatgacagtctctctctgttgcccaggctggagtggtgtgattatagctcactgcagcctcaaactcctggggtcaggcaatcctcccacctcaacctcccgcatagctaggactacaagtatgcatcatcacgccggctaacttttgtattttgggtagagatggggtttcaccatgttgcccaggctggtctcaaactcctaagctcaagcgatcctcctacctcagcctcccagagtgctgggattataggcctgagccaccttgcccagcccacaggggacttcttaaaggcataaatcaatctgatccctcccctgctcatagaccctccatggctcctcattgcttctcacaggaaacataagacattctttctggcgtgcccattctattcttgtaccctagcagggtcccataactccaccatcacctcctttctctcgccctgtcccaaccacgtcagcctcctcgctctgccaccagcaccctaaatttgtatccatctcagggcctttgcacatgctccactctgtctggaatgcccttccccacagtctgctcaagtgaattcccatcatccttcaggacctccctgatcctaggttgctcaggtcccctgtggacctgcctcagtaacaattagtatggctgtcactaattgttagtatcatttacaatttttttttttgagacagcatcttgctctgttgcccaggctggagtgcagtggtgtgatcatagctcactgcagccttgaactcctgggctcaggtggtcctcccacctcagcctcccaagtaactgagacctcaagcacatgctaccacagcctgctaattttttgttttgttttgttttgagacagagtctttctctgtcatccaggctggagtgcaatggtgtgatcatagctcactgcagcctccacctcctgggttcaagtgattttcctgcctcagcctcccgagtagttgggactacaggcacccatcaccatgcctggctaatttttgtattttcttttttttttttttgtagagagtgggtttccccatgttggccaggctgctgttgaactcctgacctcaagtaatccacctgccttggcttcctaaagtgttgggattatgggtgtgagccactgcgcccagcctaatttttgtgttttttgtagagacggggtttcaccatgctgcccaagctgttctacttattgttatattgagggcagggctggcttggtcacagctgtatccccagcatctagcatacagtaggtgctcagttaacactctagggctgatgagcactgtgacagttaacaggattggactcatgcacgttcacggatattcacctgtctgtgccccaggtggccgagagttggccaggttctctttgagggatgtttggtgccatccatgacgcagtcccttgtgacagattctgggaggccctgaggtgttggaagggagtctcccagtgaccccgagttgagggacgtatgagatgggcatactgcacccatcaaagttctgggttccggctggggacggtggctcatgcctgtaatcccagcactttggaaggctaaggtgggcagatcatgaggtcaggagatcgagaccatcctggccaacacggtgaaaccttgtctctcctaaaaatacaaaaattaactgggcgtggtggcgcgtgcctgtagtcccagctactctgaaagatgaggcaggaggatcgctcgtatgcaggaggcggaggttgaagtgagccgagattgtgccactgtattccagcctgggcaactccatctcaagaaaaaaaaaaaaaaaaaaaagtcctgggttctgatactgctccatgctgtaagtgggaatagctggggaatcaaggtagccaggatggtggactcatggtcactgaggcggtcaccacacagctaatatgcatcaagcccttttgcagtcagggagcagtggccccagtgtgtgtgtgtgtgtgtgtgtgtgtgtgtgtgtattggagcaggaacctcagcacccccatgtcctaataaggaaactaagacttcacacagaaaggcagggcacagtgactcatgcctgtcatcccagccctttgggaggccgaggcaggtggatcacttgaggtcaggagttcaagaccagcctggccaacatggtaaaaccccgtctctactaaaaatacaaaaaaattagccaggcatggtggctcacacctgtaatcccagctactcaggaggctgaggcaggaggatcgcttgaacccatgaggtggaggctgcagtaagcggaaattacaccactgcactccagcctgggcaacagaacaagagagagagagagagagagacgctgtctcaaaaaaaaaaaacaaaattaaaaaatttaaaaaattaatccccagcagggagggccagggcacctgtcagagccaacaggggttggagtgctttgaaatgggtcttgcaaggggtggaggagttaagtggggggtgaatttcaatattttgccaacctgagcaactgtacaggtgcaaccagatgttgggggccacaggaaaagcgctttgctcatggcgagtgttcagtgagttttgttttccacaggagccgcccaggaggctcctcaggccgaccccagaccctggctggccaggatgaagtatctccggcaccggcggcccaatgccaccctcattctggccatcggcgctttcaccctcctcctcttcagtctgctagtgtcaccacccacctgcaaggtccaggagcagccaccggcgatccccgaggccctggcctggcccactccacccacccgcccagccccggccccgtgccatgccaacacctctatggtcacccacccggacttcgccacgcagccgcagcacgttcagaacttcctcctgtacagacactgccgccactttcccctgctgcaggacgtgcccccctctaagtgcgcgcagccggtcttcctgctgctggtgatcaagtcctcccctagcaactatgtgcgccgcgagctgctgcggcgcacgtggggccgcgagcgcaaggtacggggtttgcagctgcgcctcctcttcctggtgggcacagcctccaacccgcacgaggcccgcaaggtcaaccggctgctggagctggaggcacagactcacggagacatcctgcagtgggacttccacgactccttcttcaacctcacgctcaagcaggtgcgctggactggggtcacctgatcggggccacctgtccttcttgtccaaattaccacccactcctgagggacccaggggaccagaagtcctcgtcagtccatcacagcccattctgcccctctgctgtcctcaccagcctcgtggagacccaaaatggtcttcttctaggagaggctagggggaagggcagaggagctaggttactagcacagagctcaagcctgatgatgcggattcgaatccaagctctgcctcttacttggtgttcgaccttggaggagttcattcacctctctgtgcctcacttttctcacctggaaaatgggatgtgaatgagtcccacccacctctaagggctactgtgaggtttacaggagatggagtttataaggcacccagaccagtgctggatgtccaactcaacttggcaatgacgggggacacatctccttgtttatttttatgtttatttatttttttttaatggagtcttgctctgttgcccagcctggagtgcagtggtgcgatctgggcttgctgcaaccacctcctggtttccggcgatcct

SEQ ID NO: 8076 - DNA, 6000 bp, Homo sapiens; identical to SEQ ID NO: 812

SEQ ID NO: 8077 - DNA, 6000 bp, Homo sapiens
atgttaatttctacccaaatggctgagcttttcaaatgtcattggagaaacatggattttaatgtatacgatggccgggtgcggtggctcactcctgtaatcccagcacattgggaggccaaggcgggtggatcatttgaggtcaggagttcaagaccagcctggtcaacatggtgaaacctcgtctctactaaaaatacaaaaattagctgggcatggtggtgcatgcctgtaatcccagctactcagcaggctgaggcaggagaatcatttgaacccaggaggcagaagttgcagtgagccaagatcacgccattgcactccagcctgggtgacagaatgagactctgtctcaaacaaacaaacaataataaaaaaatgtatacgagagcaaaatagccatttagaagacatcatcctgtgaggcacctctgctagggttccgggagggatcaaggctacaacaaaccatgatcacaccactgcgcaaagcatttcaggacagtttctgcccaaggagagactgggcagacagaccttcctctttcactgctggccccaggtgcttgcagttctctccaagggggccctggagacctgggggtccatcagtatgtccatgtgctggagcggctgctggcaggatcaagaacttccctccaaacgctctctggcttgactattcgcctgatggaacaggcagaaggatagaaattagctctggggggagcggaaacattctgaggccagagcaagctggtgatgagtggggcttggagaaggtggcaggcagggctgttcacaggatcatgcagcttgagctaaaaactttgaagtctgttctggagcattttcagcagtggggatgaaccaatttgcatgttaaaaacgtgagcaatgaattgagaggcaagggaccacatggagggaggcctctgtggaggtccaggagacaggagatggtggctgggaccagggaggtggtcacggtgatggagaaaggtgggtagatttgagatacatcatggggaccagcaggttgtagtgatggattggatgtagggagattggagtaaaaatgatcaactcagtaatggacgtggccatgaactgagtagggcacagtagagaaggggcagatgtgggggtgaggggtgtctggtctatggctcagctagaataatgagaggtttgccctcttggaagtcacctgtgataaacttgggcataaaggtgatcataaaacaatttttttcagttttatttgccaaagccacttttggcctttgaccttcaaatagattgtaggatttttgttgttgttgtttttgagacagaatctcactctgttgcccaggctggagtgcagtgtgcgatcatggctcatcgcagcctcaaactcctgggctcaagcaatcctcccacctcagcttcctgagtagctcagactacagatgcataccaccacacccagcacattaaaatttttttttttgtagagccagggtcttgctgtgttgcccaggctggtctcgaatcctggcctcaagtgatctgcccacctcggcctcccaaagtgctgggattacaagtgtaagccactgtgcctggctggttctagttatttgaaatcaggaaagacactgaccattcaacacagagtcctcttcattagtgtctggtaagcaactggataagagagcgcttgagtttgcatctgcctgtgggtgaatgttgggggaggatgtgggactctcctgtgtcattggtttcttctgtgtcccacgagggctcggggtatgtggctgatgagtgggcaatggtggtggccctctcgtatgggatggagtggggacttacatgggatgcctctgtgtcccttccgtctcctctctgcatgtcctgtggctcctcactcctgcagcagattcctgaaggcgtcactggcccacagtgactgtgacagcagctttgcttcctcctaactgggaaggccagcttcttgccaggaagcccctgctctcatgtctgagccctctgccccaccactgctccctcacctgccccagccagtcagttcccatattctgggtccatgcccaccatctccttcccagtactgaattctccaatggttagaagcttttgggttgtgatgaatagacacgttctggatatagcttgagtcaatgagggaggtttacgaaaaggtttcagaggtggagagacccaggcgattgcagctagcgtggaagagtgttgaagcagagacaggaataccaggaacctttccagatgtggtgagagggcggtgggggagaggactgggccagagctgcattggggacccccagcaagggtcttgcctggcacagcaacctctagggggcactagaccatcatgagacaaacgggaaatggggtgtcagttatgggccggggtctcaatatgggccgggagtaggatagggcagtgaggcactcaccttgggcacagaattgaaggaagtgccaaaaaactcaataatgaagataaatcaactttaatgcaaattttttgtgtgtgtgcaatggggacagttgtttccaatcagcccaaggttcctgggtaccttggccgtttcttgccttatgggtttatgagggttcacaatgggatgtgcatagattggggagcatggagatttagatatagtcatgtgattgtagagcttttcttagcctttccacttggttcaaaatatgggaggatattttgataagtgtgtctaggggctcacatttttcttttgcttcaggctccaacatgattcccatattggtcattggtctggaccctagattccttacataacgtgcaaaacatgcattgaagcaggcagcatcttcaacaaaaccgcatattttggccaggtgtggtgggtcctgtctgtaactccagcactttgggaggctgaggcaagaggatcccttgagtccaggagtttgaggttgcagtgagccgtgatcacaccactgcactccagcctgggcaacagagcaagaccttgtctctacaaaaaaatgaaaaaattagcctgacatggtggtgcacacctgtcatcccacctacttgggaggctgaggtgggaggattgcttgagcccaggagtttgagggtacagtgagctatggttgcagctctgcactctagcctgggtgaaaaagtgagactgtctctaaaaaaactaagaagcagcagcagcagcagcaacaacaacaacaacaacaacaaacgaacaaaccgcagatccaccctaccattgcccctgcctctgttgagcatttttgccatgcgtaaataaatgcctgctcatccgcagtcagcagtctgaggaaattctgaaaccaaattacacataggctagtgctctatgccatcaatctgtaatgtatcttgttatttgatttttacgtcctttaatacatttcctaagaagtctgctttggaaaaatcaccaaaggaattagaagagagagaataagaaaacccagaaaaactaaaaggatttttcttccccccattttttattaaaatccaatcaacctgcacagtgcgagtgagtgagtgactgtctacgctttcactaacggaccatcagtttctctcaaccttctctccataaacggagaatatcaaatgagggtctgggggtgttagaaaagggttgggagcctcagctcaggttggtgggcccgctgtgccatggagcctttggggacctctgatttcacatccgtcttggccctaaatggccttctcaaaccttccccctgtctctcctggttcttgcctcattggactcaacctcttggtgggcagctctccagagggcacccccagcctaagaagcaggcctcctcccaagtccccagcctcacgaggatagtgggtaacagggtgggctcagggggccctgggagatctccagaggcctctggtgtgttcaccaatgtcccctgacaggtcttgcttggcacagggggttcctcttagagacgtgacagggcacttggactgtggcaaatgaaagaagcggaggggcaggaacagggacaccttgcgaagaagacaggccttagccttgtgccacccctatgaggtccctaagccgtcctctctctcccaccttttcccagtcctcgctccccggtcctcctcagcacagccggctccaggagggatcaattcgtgggcccgggaggaggccaggcgagcaccggctgcctggagcactgggctggagcgcggggagcgcggcggggggcgcgggcggggcggggctggtgcgcagagctgtccagcaccccgaggcggggcgtgcgcccccggcccgccccagccgcctccgcccgcccagccagcgccactgcggctcggcgggcgcgtcacgtggctggcgcagcgcggcctccaggctccgggcgcgggcgaggggccgggcgggaggactgacagacccacggacgctctaccggcggcacccggccgggcgggctgggcgcagcgcggggcggcccggggacgccggggccgggcgggctgcgcgccgcggggcatgggcgcgccgggggtccccgggcccaggccggccgcggcggggctcccggggcgcgggggcagcggcgggcgggggtcttccctggcggccgccgctgagcccccgcagggcccgtgacgccgcggccgatgtggccgcgcgcgccctacgggcctgcaccgccaccgcacaaagacgcctcgggagccgccgcctgcacccgggccgcagcagccacgccagccggagcccgagccctagcccgagcccgagcccgagccgcagccagagccagagccggagccgcagccggaaccggagccggagccgcggggcaggaggcggcgcccgcgggcggccgggcccggcatggagaagcgcgcggccgcggggctggagggcgcgccgggcgcccgggcgcagctggccgtcgtctgtctgggtgagtgggccgcgcgggccgggcaggtccgggtcccccgcatggcagtccgcgccgcgccctgaccgacctcctctccggccgcggcatcccgagccccccaccgcggtggctcccgcgcggagacccagagaggggccagcaccgcttgcccgcctggccccgggcctgggagggcgactctggtggcgcagccccggctcccgccccgctcggagtagcgcccggagcccgggctgagcgctggcaggaggcccttcgtgcaggcggcagccttcaacccggcccgcccgcgctgagcctggagacgagggggccccgggagctggggacaaaggccaggccggctgtcccctgaagaagaaactgtttccggcccggagttggggtgggggctggtgtaagccgcagatggggactcggggtgcggggcagggctggaggagggtgccagtgtggaggcggcttccaggggactcctgttttccctttgtgtctctcagcccccaggcaggcctgttcagtttaggagggtgcttgggttgggccagggaccggtcaaggccaggcatggggtgggaggggctcccgccctgtccgggagtttttctgtccagctttccagcgctctgtgtaggcgagaggaggagttaaatccccaacccacatggctcctttatttactgtgatgaaggagggaggccattataagaactgggggtcattaggggacaccctgtgatgtcaccagtgagggctctgtaacctgacaggtttgctgaagccactgaaatgacaaagtaatcacccccaggcctcagggagctccgaggctctggcaggcccttgccccagctgtgtgagcctggctcagtgggaatgtgccattggggagcattgagggtgtaaccccagcgcgcccaccccaacctcagtgcggggtcatgtgtgctgggctctgagctgctgggtgctggc

SEQ ID NO: 8078 - DNA, 6000 bp, Homo sapiens
aagtgagtgtatttgcttatgcagccaaactttctgcgtgttcctctggagactgtcagaccttcgtgtctcagtaactgaaggtcaggacagtctgatctaagcttttgttttggaaaagcatggctggggtggagagagagaggatttgagtcagatctggggtggcgcttatttcttgtgtgtaaccttggccatatttagtctctctgggtcttcatttcatcatctgcaaaacagagtggtgggcttggagatctgctgcccagatcttccttccaagaaggatttgctgaccacctggggactgtgtgatcagcagccagcctctagtcctcaactccacgaggggctgcctcatctgagatcacgcccttctctgggcaacccacatccagctactgagtaagggggaggtgtaagggtccagccctatcttccttctgcaggacactccgacaggctgaatccactccggagcccaccatcaaggcctacatccctattccacttcttcccactccagcttcctcccttttccctttgcaggtattgatccttaataaacattgtgcaccccaaactccatctcggtatctccttacagagaaccaaacctgtggcaaatagggataatgatttttacttcaaaaggttattgtgtgaaagctaaatgggatgtttatgtagtatccaacattgtgcctggaacgttaacaaataatgataaatacctgttcctttttcttttctttccctcacaactgtgactcaaaatcccattctgggcctcgagcaggtgttcctaacctgtgctctgtaatattggtttggaaaaagcccagcaaggcaagtggccctgaaaatctgtgctgcggctaaatctgagatcctggctgatggcttcagagccaattcttgtccctgtcaagttcattatccatggatcacgtcagccctcttcaaggttcctcactgaaaagaaattgagcatgcaaatactcttttatcataatcaccacgtatccacagggtaattcataaaagagctggaaatatgttgaaattcaatattgttttagtccaaatcgatattaataattgtttgcatttttaaagtgcaatttgcaattgaaaagtgcacaaagatcaaccagtagttgctaacacatcaaattttcctattaaaggcacagtcccttaactttaaaatgtttcttatacaacaggggctggagctgatccatggaaatgactatctcttatttacgtgcacaacattagaattggcttccattctgcatgagctgaaaggccagtcacttttatttgtaagttttgatttctttaattaaatttttaattttgagataataatatattcatatacagttgtaagaaataatgcagagaaatcccatatatcccttacacactttccccaattgtaacggtttgcaaaaccgtagaacagtattaaaaccaggatattgacattgatacggtcgagatagagaacatttccttccccacaaggatcctcgtgttgctttcttcagatctttaaaaattaaagatttttgaaggaaaaaggaccctgttagatttctgccttgaaacgatagctatcactaaatgaggcactgtcccagctgggctcagtggagttcacacagaggaatggtcccctaggtcaggagtagcccaggtggaactcacctcagccagggaggcctcaggggagcacagctttgcacatcagaaagaacctgagaacagttttcagtttgacacttgcagtgtggcctttgatccctcaaacaaggacagggttgtcaagaagggaaacagcttggctgggctcatgtgggccacaggggcccagttatcccaggaacagggataactgttccttcctagagtgtagaactctggggcacagccctggcagcctccctgaggacatgtcatgggaccaacccagttccctggtgagggacaggcggcaggtgtgggtgaggggtgcccttgactgaagcctacctggcatgcttgaaagtaaccctatgcaaatgaaattcacaaggtgcctccctgtttcaagacatttgtctcacaccagagctgcagggaacttgggaactcatctacagcaggtattttggatgaggactgattctgagatagggaaactcaagtcctgaagatcagacttaagtggaggggaagtcaggccagagaacctggggtgccctgctctgagcctgatggctaccctgtgacatccagatgccttgttcaagctgcttccactgagggttttgggttttgctttttttttttttttaacggagtttcgctcttgtcacccaggctggagtgcaatgtcatgacctcgcctcactgcaatctccacctcccattctcctgcctcagcctcccgagtagctgggattacaggtggctgccaccatgcctggctaatttttgtatttttagtagagacgggtttcactgtgttggccaggcttgtcttgaactcctgacctcaggtgatccacccgccttggcctcccaaaagtgctgggattataggcgtgagccaccgtgcctggtgtgtgtgtgtgtgtgttgtggtttttgttgttgtttttttttttttttttttttttgagacagagtctcgctctgttgccctgactggagtgcagtggcgtgatctcggctcactgcaacctctgcctcccaggttcaagcgattctcctgcctggaaaacaggcatgcactaccacatgcagctaatttttgtaattttagtagaaatggggtttcaccacgttggtcagactagtctcaaactcctgacctctagtgatgcacccagttcataatcatttttaagtgtacagtccagtggcattaattacattcacattgttgggcaaccatcaccactatccatctccagaaccttttcatcatcccaaacagagactctgtacccattaaacaactccctgttcctccttccagtccctggtaacctgcattctactttctgtctctatgaattggactactcctggtacttcacacaagtggaattatacagtatttgtccgtttgtgtctggcttgcttcacttaacatgatggcttcaagagtcacccatgttgtagcatgtgttgctatcattgactttttgattgacacatgcaagctgtaattttttgggggggttcctagcatcacaatatattttaaaggtttggggatgcattagtccacttttgtgttgctgtaaagaaatacttgaggttgagtaatttataaggaaaagaggtttaattcgcttgtggttctgcaggctgtacaggaagcatggtgttggcatctgctcggcttctggggagggcttcaggaagctcacaatcatggcagaaggcaaagtgggaggaggccggtcacatggcaagagaaacagtgagagagagatgagtggggaggtcctagactcttttaaacagtcagatttcacatgaactgaatgagaaccaactcatcaccaaggggatggcaccatgccattcatgagggatccaccctgtgattcagtcccctccaaccagaccccacctccaacactggaaatcacatttcaccatgagatttggaggggacacatatccaaaccatgtcaggggacaatcagtcaattttgtggcatctcaatggtgtgtgtcttttgtgtaaacattgcacctgttaatgtgtatgtatatgtagagggagaatcaacatttgtctttaaaagtgtatttgtcttcaagctctgtgatctgaaatctgtcatactgacatgaggaggcaaaagtgaggtcctggtggcgagcgggcctcgggtatttcaagctttaaggctccactgggctccctgggggccgtttcttccttgcttcttccttgcctcctgtcataggattgggctactctttggacctgattccaaggcagctctgaggaaaacaaaccctcagctccctgaaacatagatgacctttttaaaattccaggttcatggagtgcctctctccagatggccccaaacacttccatctattaactcgtgctcattcaacgtgcagcagaggctattgatcaccttccctgtgccggggactgtgctaggtgctgggaatacaaagatggggagaggcctcgatgcgattcccgattcagaggcaggtggcaaatgcttttcccacagtgagggaagggctgtcaccgcgatggtgctctcagggaaccaaggttcacacattcagggaattcggggcactgagtcagcattctagactctgccaggatgaggaggagcaggggactcagtttctttacatgcagaatgactgtcccctgccctgccccactggcataaaatgtcctcaacatgtaagaagccctgggcagagatagtgtccagggtgtggtcagttgacgtggcctgtcagtctttggccacgctctcaggcccccctcgctgtggctgtgtgtttgcaggcgcccctcagactccaactggaatgtgtccgtgatggtgggaggccgggctgtggtgctcctagtagggctatggtggcaagctttaggaccttgtgagcctgattcacccggtaatctccacctcggaacgccctttctccccgctgcagagcatggggctgggggggagtggagagaaccctgccttgtaacagggcagcggacagcaggtaaattgccttccccgggagtagcgtgccgcccggcaggggcctgggtgtgccaaggcccggctctggggatttcaggacccaggccagcgctccccagcagcagggcaggaggcagcctgagagtcggcagccccgccttggagtctgagcactcgcgcccatccgtcaaccttgcagagcattgcaactttatgcctacgcataaaaactggagggactcgtcccagagtttgctgccgccgccgccgctgccattagagcggttttaattagctgcaggatttttaatgagctgaaatcaagaagagccccatctcagaagtaagcgagagccgcgcgcagggaagaactagtctgacaaaacagaaggaggtggtgctctcgggggactgggctgtaggctcccaccgatcgatcggcgacgagcagatgagttcccgaggccaggaggctgaggagggaagccagggctcagagaccagcgcccggtgcagagtccccgctgctgccaccgcggcagaaggcacggtgccggattcaaggtgacggcagtgcctggctccattctcctcaagttgccatagcagcctctctcccaacaagcagcttctccgggagccctcagccgggagggacgtcattgttctctcctgcccgtgtggtgcaaggagacccaccggacagagaactttcccgagcccggggtccgctgaccacgtgggtgcacccatgctgcctggagccaggcacagggacaggtccccacggccacagggaatcctctgggcagctgaggggagcgtccaggcccagaagcagctgcagccaagcgtgtccttggagccgtccatgcgtctgtccgcctgctgccggtcgccactggaggtgcgtgtgttttggctgaattcccaagtccttgcttgtgccctgaagtgaatttcttcaaagagacacatttttaaatcaaataaataaggaaatgggaggaatccttcgccctgccctgtgtcccaggaggggtttataagattaattggatctttttttttttttttcttaaagtaaaaattggtgacgccattcaggcctgggggagaaaagccaccaggaggactaggaattgtgaggccaggcaggagctgctggaaactcgctggggctgtttatttttcttgcctgaaccctccctcttctctgcccctggaaggctggattttcttattg

SEQ ID NO: 8079 - DNA, 6000 bp, Homo sapiens
tctcgaactcctgaccttaggtaatgatccacctgccttggcctcccaaggtgctgggattacaggtgtgagccactgcgcctggcctgagcctctcttttttaggattgcccactgtatgacactacatcccacagcctgtgctattaccagcatttaccatcatatgcagttccttatgttggccctgcagagtttgtgttttctgcactatccacccagttctagtgttttttacccaccatatgtagtattgccttttaaacattacccactatattatagtattttatattacccactataggatattttatattacacaatatattttactatcataatattgccaaacacaacagttttttgttttttgttaaagagaccaagtcttgctctgttgcccaggctgggatactgtggcgtgatcatagcccactgcagcctcgaactcccgaaatccagcgatccttctgcttgagcctcccacgtagctgggactacaggtgtgagccactacgcccggcaattttttttttttttgtagagactggatcttgctatgttgcccaggatggtcttgaactcctggcctcaaataatcttccctccttagccgccgtaagtgccgagattacaggagagagcctccgcgcctggcctacagtatttttattataatccatcatactagcgtatttttaacgttccccaccatggcgggtatttttattacccaccatgctatgctatagtatttcaaaaattaatcctattgtagcatgtaaaaatattccattctataccatactatattcatcattacctctgatactacagtatttttaacatgactcattgtgctattgtattttttcattacccacaataccacaatattactgtatttgttagcactgcctgccattccttattattattatttttgcaatggagtctcgctctgtcacccaggcaggctggagtgcagcagtacaatgtcggctcactgcacctcccgggctcaagcgattcttctgcctcagcctcccaagtaggtgggattacaggtgcacgccaccatgcccaactaatttttgtacttgtagtacagacggggttttaccatgttggccaggctggtctcgaactcctgacctcaggtgatccacccacctcagcctcccaaagtgctgtgattacaggcgtaagttaccatgcccagcctattattattattattattattattattattatttcaagttagagtctcactctgtcacccaggctggagtgcagtggcacgatcttggctcactgcagcctccatccacctcccgggttcaagcgattctcctgcctcagcctccgaagtagctgggattacaggcacgcgccaccacgcccggctaattcttttgtatttttagtagagacagggtttcgctatgtagaccaggctggtctcgcactcctggcctccagtgattcacccaccttggcctcccagagtgctggaatgacacgtatgagccaccacactgacctttttattatttttatccaccatctcgctgcaatttcagtattgcccatcgacctatattgcctcctggtaatgacccctgaggaatgagccatgccatttccataggtggaggcgacgggtcatggtggtgagaacttcactgacctggaagaggtggagaagatgctgggaagctgctgagggctgcccacctgtgttaggagaaggcagatggggacccatggggacagtaatactattttggatccacacaacgggagtggaaaatgccttgaggcacagcagcgtctgaggcgggtgagaaatccggcctgcagagtcgcggctggccttcagatctgcgggctgcctgtgagatgccgtgttacctaaatccatttgggcactgagttccaggagtgggggcaagaattccgatgacggggctttatccggtgcgcatccagctcagagtggttcctgagaccagccaccatgggcagccaggatgtgctcatccttgaggctttccgaggcatcaaggagatggttggataaagaatttagcacagagcttgactgatggcaggcgcccacaacatgagacacattaataatgtgtgtggaggccaggtgtagtggttcatgcctgtcaccccagcactttgggaggcagaggtgggaagatttcttgaggccaggaattcaagaccagcctgggcaacacagcgagacctcatctctaccaaaaaaaaaaaaaaaaaaggaaaaaattcacctggcctagtggtgcacacttgtagtctccgctactcaggaggctgaggcaggaggattgcttgagctcaggagttccaggctgcagtgggctatgattgcatcactgcactccagtctgggcaatagagcaagaccctgtctcttaaaaaaataaagtctgttgaaaagaatgaatgaaggaaggaaggaatgagagggaaaccctgtctcagctcctcccgcagggaagctggggcagggcaggcagggggggcatccggccccgctccctcccttactctggcccagaaagcactggtgccatctgcacagggtggagccaaagaaagtgccccactcacagcagagggaggccatttgaggacagcagggaaaatgggatctcagccatctaggagggggccagagatgtgggatggacacctaggaaatccagccgaggacaccagagtggcttttgactctggtcccctggctgaacgcgttccctttacagtttaaatttaggctcaaggagaagaagctggcaatcggcagggccagtgctgtagagaggatgtagggtttccggaaaatagccaacacttcagcagtgctggctgcgagctcatccaagcatgttacgggtgttaactcatttcctctccagcaaccctgtgagagggtctgagtgttcccatctccattttacagaggctcagagaggtgcagtcctttgcctgaggtcacacagctagtaagaggcagagccgggatttgaaccctggcagtctggccctagagccccagctgttaaccattaggctttatagccccagttataacaacaataataatactaatacaagtgaaccttcactgagtgccatttatagatcaagcactattctaaggattttaaagcatatttaattctcacagcactctgatgaaggaggtattcattttacaattgaagaaacagaggcctagagacattgagtcacttgcgcaaggtcacacagctggccagtggcagagccagcctttgaacctgagccttctggttgcagagctacggcttttaggcaccgtgctgagggcctccagaatgacacagatgtggcctcgagttacacagggaggcaggttgagggtgacccccaccaggcctacccaaggctgggtattaataatcacagtgcatacaccaggcccagggaggttgagccactcatccaagctcacacagcaagctcacagcacactcaggctgtcatgcagcctgggctacccccttaaccctgcctggcccctgcagccaacagagacatggcatccatcgtgtctgagatcatgatgtatgtgctcattgtggtgttgaccatatggctcgtggcagagatgatttactgctacaagaagatcgctgccgccacggagactgctgcacaggagaatgcgtgagtagggtggctgggaggtgggagggcacccagggcaccgtcacacttgccagagaggaactccggagcccgggcagggaggaggcagcggagcggcccagggcgccatctctcagtactacccagaggggagtgctccctgtcagacacaggataggggtcgtcagacccagccccttcctccctccaactcaggagcccaggctcccagccagattcctcaaagaccctgaggagtccacccatagactccttctctctctaactaaggagccctgtgtacctggggtggagaccgctaccttcccccatcccccgggggttgggtcggtctgatgatggggtcactgtatacctggcctttcccccacagctcggaatacctggccatcacctctgaaagcaaagagaactgcacgggcgtccaggtggccgaatagccctggtaaggcggatgggctggcagaggggaaggggattgggaggggccgaagtcccccaggtccctaattccccctctcttgctccccttcaggccctgggccccgcctcaaggaagagccagccgtaatggggactctccaggcaccgcctgcccccagcgtgggggtggccactcctgggccccagaaagcctcagagtcctgccgacggagccactggggtgggagggggcagggggcttggctcgcacccccactttcgcctcctccagctcctgccccgccggccgcgcaccgccatgcatgatgggtaaagcaatactgccgctgcccccaccctgcttctgctgcctgtttggggaggggggcggtgaggtgggggcagcggccccgcacccctcctccttgctgatttgcacacattggccgcttcagacacgcacttctggggccagcccctccccgcctcctccctgcctggcggcaggggtcgcgatgatgggctggagcagtttggggcagggggttctgggacccactccgactccccctccccggcatcatttcccctcccgcttcctccggctggacctggggtcccccctccctgtaatgcactcctgccccggcccaacctcgccctctctcaccagccttgaactgtggccacctagaaaggggcccattcagcctcgtctctttacagaagtagttttgttcatgaaataaagactcttggacttgatgcatagtttcgattgtgagccccgtcaccttccccccattcccgtccccgaatcttcgagcccgctttccagggaccctacctgagggcccacaggtgaagccacttagtgcctgatctgtgtcggggttgggggagccatgggctcaggggtgagggagagtggaacggagccaggaagggagggggtgccgtggagggaagagaatcgaggctgatgctggggtgcaggggtggcatggggtgtgtggtgtgcccagcagtgtgagtctctggagaggtgggcgctggggagaaggagagggaaggagagacgggtatggatggaaaggcagaggaagccaggctaaaccagcgtgtcccaatgaggggccctgggctgagtggaggaaatgggtgcggtggaggtgggtttggctgggcacagcgggcacgtgtgggtaagcgggtggggccggttgtgcgggtggcctatctggggcaagcagccgaggccgactgtgtccggcgtgtggttgagcacgggcaggtgtctggcggtgaccctgcacgtctggtgtttacctggccctgggtctgacgtgggccgcgcctggctgctggcgggacagtgtgttatctgcctgcggacgcttccggccacttggcctgggcctctgcccttagcgctgtgttttcccggccaagccccccatcccccctatctagtgctaggactttctggctccagaggtcaccgcggccgggcggaggctgccaaagcaaaccagccccgtgacttgtaggaagccagcgggggaggggccggggcaggatgagcagggcaggcgggagaggctggggctggggttggggcccaggaattgggcagggaattaggcagaggtgcagcaagtggcgggcacagccaggacctggggctggaggacgcagaaagggcggggggaagggttcgctgggtgagggtggagtgggcttagggcagctggggccctccatctgatctcttctggtcagacccccacccttcagcctgcactttctccctaaaccccc

SEQ ID NO: 8080 - DNA, 6000 bp, Homo sapiens
tcttttctggggcccttagaagggtactggtcaggaacacacacccttcccactccagaggcttcatgctgccccctgccacccagttcacccacactcactcaggagaatggtgatgtcaggtgctggcttcgcgtccccagacacacagttgaccacgtactcctgcccagctacccaggtgaccatggtgcctgcctctggggtcagcaggagcagcttgggaggaactggtgagagaagggtctggggtaagcttccagcactgagaaggacttgaagattggagttcggtacccagagtctgggagaggagaggctgggggcttggacttccgggttgcggggtaggggagggcttgaagcccagactcatgggtcctgggcgtctctcacccatacccaggatggagaggatcactctgggagacacgagctcgggccccatctcagagcggccgacctggcactcatactccgcgtcatcgctgaggtcacaggcctcgatgtgcaggtggaattcacctgcagggggagccggaagtcagggccgcagcttccgctggtggctgagggtctcaggctctgatcccttacctctagcagggtccccttccaggcggtacctcgggaagcctgggatcctggggtcggggcccaggagcagcccatctttggcccattgcaccgcactgccaggggtgctgaccccacaacgcagctccactgaggccccctccaccaccgtcaggttttcaggcagggcccagaagccccggggaacggaggcaggaatcgccaactgcgccaggcctgaggacacagcgcggtgcaaggaaagggcagagggtttgtctagggaaggtaagtgggaaatgggggccacttggcgctgggtacaaggctgggatcccactcaccttcagtcagcagccccaggagcaggagagaagccctgagcgtcgtccccagggccatcacaggtccccctactgtgacccccacagcgcccgctgccagccacctgcgtctgtctggctttctctgggtccctctctgtgtgtctctgccacctgcttttcttttttatctctttccgttactctcctccctttctcgttttcctcttcccctcttccctgtgagtatctctctctgtcttgctctcagtctcaatctctgagtctctttctctgtctctttaaaaaaacttttttttcttttttcttttttttttcttttttttttttttagagacggggtctcactatgttggccaggttgatctcagactctttccttcaagccatcctcccaccttggcctccccaagtgttgggattacaggcgtgagccactgcgcccagtctctttatctttccatctttctctccttgtctaagccgttctctctccttttgtctctgtctcttcctctctctctgtctctctctctctctctctctcaatctctatcttctctcctgccacccctcactcctgctccttgtctcactactcacagcctttcaagaaggacctgcagcccagagtccagcaggccaggagcctaggagagcgatgaggctgatgcaggcactggcagagtcagccctgctctctgacccagcttgagctcattctcacagtgcaacctcccccaggtaccttccagagcccccagctctggcctctgcccagcaggctcctcccagctggcccagctggagcataaaatcccctgtcagcacatgccaggcgcgttcctcggtgcctccccagcctccgtgaccccagggcctggcttaggctgggaagatgggagaagtcagatcaaggtggtctcccagctcagcaggggagcagccagctgggcccccagctcttccttgccctgatacatgaccttggcaagtctctttctttctttctttcttttcttgagatagtcttgctctgttgctcaggctggagtgcagtggcatctcggctcactgcaacttccacctcccatggcttgaacctcccaggttcaagtaattctcccacctctgtctcccaagtagctggtgctacaggtatatagcaccatgcctggctaatttttgtatttttactagagacggggtttcatcatgttggccacgctggtctcgaactcctgacctcaggtgatccatctgcctcagcctcccaaaatgctgggattacagacatgagccaccgcacctggcctcccttccttttttagtagacatcagtgcctaaatgatgtcagggatctctgctggggaggatgcaagagtgagtgtgacaggctgggagagtgtgggagagagggaagatatgcatgtgtgtacgtgggtgtgagagtggggaaggttagagtgaactgcgatctgtaataagcatgtggagagcgtgtgtgtgacagtgtcttacgtgggagtgcacagggtgtgggcgggagtaaaaggcagagtccaattccaccggcccccagtgtgggtgcagtgtgagcccaaagtgggcgccctttggcaaggactgcatgagctttcttctccctctttttcttgccctctctcccatctcttctttccttctccatgtctctctctctccctccctctatctatcttgatttatctttctttcttttgagatggaatcttgctctgttgcccaggctggagggcagtggcatgatcttggttcattgcagcctcaacttcctgggctcaggtgatcctcctgcctcagcctcctgaatagctgggactacaggtgcacaccaccactccagctaattttttaaaatttgtttgtagagacagggtctttctctattgcccaggctggagtgcagtggtgtgatcatggctcattgaagcctcaaacctcctaggctcaagtgttctttctgcctcagcctcctgagtagctgggactacaggcccgcatcaccactctggctatttttttttttttttttttttttttgagagggagtcttgctctgtcacccaggctggagtgcaatggtgcgatgttggctcactgtaacctccgcctcccaggtccaagcgattctcctgcctcagcctcctgagtagctgggaatacaggcattgaccaccacacccagctaatttttgtatttttagtagagacggggtttcgccatgttggccaggcaggtctcgaactcctgacctcaggtaacccacctgccttggccccccaaagtgctgggattacaggtgggagccgctgcaccccgccacttggctaattttttttaaatgtttttgcagagacagagtcttgctatattgcccaggcttgtctggaactcctgggctcaagcaatcctcccatctcggcctcccaaagtactaggattacaggcatgagccaccgcacctggcccttgatttatctttcttttttttcttttttctcttttttctttttttgagatggagtttcactcttgttgcccagactggagtgtaatagtgtgatctcggctcactgcaacctctgcctcccgggttcaggcgattctcctgcctcagcctccctagtagctgggattacaggcatgcgccaccacgcctggctaattttttgtatttttagtaaagacggggtttctccatgttgatcaggctggtctcgaactcctgacctcaggtgatcagcctgactcggcctcccaaagtgctgggattgcaggcgtgagtcattgtgcccagctgatttatctttctatctttctccatctgtttgagactctctcgctctctatattaagttgttaaatctcagtcaatctttatttcactgtgtctctccatctctatatgtctctgttattctgtttctctgtctctgttctcacctctgtcgctcccctcaccccacagtctgtctcacacacaccaggagctccataaatatttgttctcagccacactctgaccacgcctctttctcttatgtgtctctccatctccgagtggctctgctcatcacatccctggattttataaccatatgctggtgggcctgccctccccgcgtgcacatacacttgcctgggataagcttcttctgcctgcttatctcctgcgggaattggaaatgctagttttctccctacctccccaagacccccgccaatatcgttcccaggaacaagatgaggcatctggcctcagcccccagcttcatcctcgatgctggacttccatcttccctcacatgcttgactccttgccctcctcccacctcccctctcccaactgctctctacaccccctgggaaatgggctggatgccgagctgggggagtggctctgtcctgggggccctcgccagatggtgtccctaggtgccagagcgtggagctgtcccttgctggggcctttaataagcacaaaccttccaccctccaccttggctgttttccttctctgcatgctcctgggaccttgggctctccatctttccatgtccgtagccccagagagccaggaaggggaagcggcgtcaagtgcctggaaaaacagccccatgacttgagttcctccctaagactcaggagttccagccccatgtccatcctatttcaaaatccaggcactagataagccacacagaagccgggagtgtaggcccccagatccctcccctctcagaccctggggtctcagtcccttctctccaaggactcgggaatttgggcctctgatcctcctggccacactacccacccccgcacctccccatacacacacacacacacacacacacacacacacacacacacacacacacacatacacacaggacttaggacagatgttcacggtctgatttccaaatcctcctgggcctgtgtgggggtggggagagattggcagatagatccaccgactcttaagacttaagaccagatattctgacccctgtcaccctcttccaagtgcaccatgcacttgagtgcaccttgagtctccagcctctcaaggaaccgggagatcaggccatcagcgtctcagccagcaaaggcctgaaccaccagtcccttataaccctgtaagtccaacccccactcccaaccccactcccccatttagggacacggagtctgagcctaagaacagtggagaatctgaatgtggaccctccagttcttacaggtccaggaatgtcagatcagggtcccagccccccagccctccttcaggctgctcggggtccctcccacctgctcggccagctgcgcagcgtgggaacgccccagctgggctgcatggagccgtcaggacaagctgcgcggttcccagcctccctgcctgccccggcccggcaccgccgcctcccagccgtcgccgggcaaccaggccgaggggcccggccggccgagtggggagaggggttgggctgggactgcggggtcctgggaaaggaggggccgagggcctggattcctgggtcttaggacgtgctgtagtttgcagcaataacaagggaacagagggatattttgaggaggggttttgaggctgggggagtcgaggtaggggtcccaactgtcccccaggtatcggtgtgccctcttcccgacacgcaggcccgggggagccccggaccccgcatcccccagggcgcggaaactggcgaggccccaggagctcccatttatagctcagtttccactgagcgcagtccctctaggacctgggctgagcaagtttcttccactctctcccttccctcctcctcaccccttgcctgcccctcaaccccggcagggcgcaggtgtccaacccagccgggaccccctccctcctcgaacccaggtgttccggctcccagaccccaattgagctgggggcgcccacccgccgggggatcccgccctgcgtcccccattcatccgcgtctcagccgcgggagtttctcaacgggaagagggcggagctcccg

SEQ ID NO: 8081 - DNA, 6000 bp, Homo sapiens; identical to SEQ ID NO: 817

SEQ ID NO: 8082 - DNA, 6000 bp, Homo sapiens
agtgatgaggccagagagttggctggggccctgtcatgcaccagcctggaggacctagactgtccagagggcgccggagagccatgaaggaatctaagcaggagaggggtgggagcagatctgtggtatggaattctccatcagtgatggattgggggtggggagactgggctgggaccccagggggaggttgggctgcactggggcagggctgtggggaagaggcaggaggcaggtgggagagaccctcacgggctgaatggccaggcctcagagctaggggcttgttggtgagggaggtgaccaagatgaggtccagagctctggtggggcctgcagaccatggggcggtccctgagaccaggtccaggaagaggagcaggtgtggggaagacgctgaggccagtttgggacatgaagagtcaagaagcagtctcctttttgcctgttagcttcattctgatgcttcccttgctgattgggtcaccctgtccaccctgacatgcaccacaggccccaggccttggaaccaggcccagccttggcctttcctgcccccatttcaccttgagttctcagaatgagccctgagcctgtgtcccctggagtatgggcctcagtcccatgttgggagcaggacaggctgaccaggctgtccccatcctccaggggggcatgtgctctgtgtacctgaaggacagtgagaaggttgtcagcatttccagtgagcacctggagcctatcacccccaccaagaacaacaaggtaagggcagggggcaaggagataagatggggccgttgggtgctgacatggaccctgaccatattccccccacccccaggtgaaagtgatcctgggcgaggatcgggaagccacgggcgtcctactgagcattgatggtgaggatggcattgtccgtatggaccttgatgagcagctcaagatcctcaacctccgcttcctggggaagctcctggaagcctgaagcaggcagggccggtggacttcgtcggatgaagagtgatcctccttccttccctggcccttggctgtgacacaagatcctcctgcagggctaggcggattgttctggatttccttttgtttttccttttagttttccatcttttccctccctggtgctcattggaatctgagtagagtctgggggagggtccccaccttcctgtacctcctccccacagcttgcttttgttgtaccgtctttcaataaaaagaagctgtttggtctaaaagtgcgtgtgtgtgtgtgtgtgtgtgtgtgtgtgtgtgtgtgtgtgtgtatgccgtgggaatgagggtgttgtttttaagtggggtcatttgcagaccccacttccttgctttgtggttggggcaaataactggaccctacctaaatctgttttcccatctagataatagtgatagtgcctgccccagagagctcttgaggggagtgtgtatgagaagacgtcggaaggagatgatcagagtagagcttgtcatgtgattgatgacattatatcttattcaggcatgaattatgctaagtgaaaatcacagtatcccccaggaaacctaaattcctcctgtggtgcaggatacagtgcttgatggtcctttttctttgttttctctttatttttatttttttgagatggagtcttgctttctcaccaggctggagtgcagtggcacgatcttggctcactgcaacctccgcctcccgggttcaagcgattctcctgcatcagcctccccagtagctgagattacaggcgtgcaccaccacacccagcgaatttttttgtattttagtagagacagggtttcaccatgttgaccaggatggtcttgatctcttgacctcgtgatccgcccaccttggcctcccaaagtgttgggattacaggcgtgagccaccgcacctggccttttttttttttttcctcccctgagacagagtctctctctgtcatctaggctgaagttcagaggtatgatctcggctcactgcaacctgtacctcctgggttcaagcaattctcctgtctcagcctcctgagtagctgggattacaggcgtgagccaccacgcctggctattattatttttttttttttgtacttttaggagagacgggtttcaccatgttggccgggctggtcttgaactcctgacctcgtgatccgcccgcctcggcctcccaaagtgctggtattacaggcgtgagtcactgcacctggccaatgatccttttttttttcttttctgtttgaggtggggtctccctctgttgcccgggctggagttcagtggtgcagtcattgctcactgcagcctcaacctcctgcgctcaagcgatcctcttgcctcagcctcctaagtagctgggactacaggcgtgtgccaccacgcctggataatttttttatttttaagtttttcatagagacgggtctcactatattgctcaggctggtctcgatctcctggcttcaagtgatccttctgcctcggcctcccaaagtgctgcaataacaggcgtgagccacagtgctcagcggtcctttttcttgaaccctgatagcagtgacaccaggattgctgtagttcatccaatgacttgggggcaggagtgagtgcaatcttagagactggggcttagtacccagaacctgtttcccttcctcgttagatattcctgtctttttacaaatgtaaatgtattataaaacatttcaggccgggcgcaatagctcatgcctgtaatcccagcactttgggaggccgaggggggcggatcatttgaagtctggagtttgagacgagcctgaccaatatggtgaaaccctgtctctactaaaaatacaaaaaaaattagctgggcatggtggcgggcgcctgtattcccagctacttgggaggctgaagcaggagaatcgcttgaacctgggaggtggaggttgccgtgagccgagattgcaccaactgcactccagccagggtgacagagcaaaactctgtctcaaaaaaccaaaaaaaaccaacaacaacaacaaaaaaaaacaccaaaaaacatttcagacgttcaagattatataccaagaacaccaatgtccccatcagccagctgaggaaacaggaaacaatatgtactagataggacccacttcagcagcaccctaaatccattcccccagaagtaaccaggagggccgagttccttgtgtctttccctttcttgaatttgtatttttactaccttggtatttggttttaaagtttacataaacaggatctgatttttcttccactcaatttaagggaggttcgtggtgtcttatctatagcctctaattcgtttctcactcaagccctgtacagccagatactgctgttctttggctgagcctcaggtaaaatggttggctctccagtcctttatagaaaatcatggcaggaaggaatgggagagaaaacagattctgcctcccagctccacgtgaggaagagttttattattaatttttattttattttttttgagacggagtctccctctgtcgcccaggctggagtgcagtggcacaatctaggctcactgcaacctctgcctcctgggttcaagcgattcttctgctcagcctccccagtaggtgggactacaggcgcgtgccatcatgcctggctaatttttttttttttttgttatttttagtagagacgtggtttccccatgttggccaggctggtctcaaaactcctgacctcaggtgatccgcctgcctcagcctcccaaagtgctgggattacaggcatgagccactgcgcccggcctattattattaattttaaaaatagagattgcagtcttgctatgttacccagtgtggtctcaaactcctggcctcaagcgatcctcctgcctcggcctcccgaagcactgggattataggtgtcagtcacagcgcctggccagaagagttttcgagggctggcttttcaggtcgttttctgggcctcaatgtctatttctgacaatgtggggaaaagaaagatcagattgttactgtgtctgtgtagaaagaagtagacataggagactccattttgttctgtactaagaaaaattcttctgccttgagatgctgttaatctataaccataccctgttatagatgacggggttctctataaccaaccccgtgctctctgaaacatgtgctgtgtcaactcagggttaaatggattaagggctgtgcaggacgtgctttgttaaacagatgcttgaaggcagcatgctccttaagagtcatcaccactccctaatctcaagtacccagtgacacaaacactgcggaagaccgcagggacctctgcctaggaaagccaggtattgtccaaggtttctccccatgtgatagtctgaaatatggcctcatgggaagggaaagatctgaccgtcccccagcccgacacccgtaaagggtctgtgctgaggaggattagtaaaacaggaaggaacgcctcttcgcagttgagacaagaggaaggcatctgtctcctgcccgtccctgggcaagtcttggtataaaacccgattgtatgttccatctactgagataggggaaaactgccttagggctggaggtggaacatgcgggcaacaatactgctctgtaaggcactgagatgtttatatgtatgcatatctaaagtacagcatttaattctttaccttgtctatgaaccgttgttcacgtgtttatctgctgaccctctctccactattatcctatgaccctgacgcatccccctctccaagaaacacccaagaatgatcagtaaatactaagggaactcagaggctggagggatcctccgtatgctgaacgctggtcccctgggccccctttatttctttctctatactttgtttctgtgtctttttctcttccaaagtctctcgttccacctaacgagaaacacccacaggtgtggaggggcaacccatcccttcagacaattgggaggtgagggccgattgccttacacggtgagacaagcggcctgactcgtgactatttttttggacaaatcaggcagccactgactcccttcattatggcctcagctttatctctgggcaataagtgtgatcccttccttcgctgcgtcctttgcaggggcggtggcgctctgcaaggcccaagggggcgtggtccagatgactttgaatcccagttgtcgcccccagggtcagccaggagactagtcagaagcaaacgcgcctgcggcaatccgcccgatgcctttggtctctctcgggcttccgtccacccgcccctcccccgcgtttccattggctgtagctccggcccggggcgggcgaagagggagcgagtgggcggggccgcgtggcgtcagcgcaagatggcggcctcggcagcggtgttctcgcgcttgcgaagcgggctccggctcggctcgcggggactgtgcacgaggttggcgacgccgccccgccgggccccagatcaggtgagcggaacgagggtggccctctgaatgtggggtcccttccctggagttacggacatatcgccgccccttgggggttccgggacgcctcacctcagggtgctgaatgaaacgccgcttgtgttttggggcccttcccaacctcctgggtggttgctcccctaggctggaggctgggaatccaggtgtgtccttagaccccacctcccacccacgtgggtgccggaggaggagggggttaccgttccccgtttcagtgaccactcaggtgatacttgagcaggaggggcctgggacgctggagtcccagtctggccgtgggagttattttctctgtggcgttggtggtggcgaggtagacgtttgggtttccaattcgacttgcctccatgttgacagagacccagccattctgacctccaagtctatcacttctgtgccttagttccc

SEQ ID NO: 8083 - DNA, 6000 bp, Homo sapiens
atcctttttccaaataaggtcacatgcacgtaagttccggggattatgcttgcgtgggacacatcttttttgaggccaccattcaacccactacaaaatccaactgaagcccagcgaagtggctcatgcctgaaatccccgcactgtgcgaggccaaggcaggagggtcacctgaggccaggagttcaagagtagcctgggcagcgtagggagatcctcatctcttttttttttcgagatggagtttcgttcttgttactcaggctggagtgcaatggcgcaatcttggctcactataacttcctcctcctgggttcaagcgattctcctgcctcagcaatcccgagtagctgggattacaggcatgtgccaccatgcccagctaattttttatttttagtagagacagggtttctccatgttggtcaggctggtctcgaactcccaacctcaggtgatccgcccaccttggcctcccaaagtgctgggattacaggcatgagccatcacgcccagtggagatccccatctcttaaaaaaatctgaagcagatcacatcatccttccctgctgggaacccacacgtgaccctgttctactcatcacagtccaggcagccctgcaggatctggccctatcacctctgtgacatctcctctcccactccccccagcccacttcactgcagacacactggcatcctcactcttctccatccacaccaggcacattcctccctcagggcctttgtactgatcatttttcccacagatgtccatctcaccccaccttgaagtttttcttcaggtatccccttctcagtgaggccttttctgacctccttattaaatatcacaaacaattccacccccacccccttccctgatcctctatggcacttactaccttctaacattatatcatttatttattatcttgtttattatcaccttttttttttattttttgagacggagtttcctttgtcgcccacgctggagtgcggtggcgccaactcactgcaacctccacctccctggttcaagcaattcgcccacctcagcctcctgagtagctgagattacaggcgccctccaacacgcccggctaatttttgtatttttagtagagatgggatttcgccatgttggccaggctggtctcgaatgccagacctcaggtgatccacccacatcggccccccaaagtgctggcattacaggcgtgagacaccgcgcctggcctctgtttttccctcgtgtctattttgttcacagctgtatccccagtgcctaaaacaatacctgatgcacacaaggcaaccagtaaatgtgtgtaaaattaacgaacagcaaatgctattgttaccatgcccattttgcagatggagaaaccaagagcacagaggtgttgtcacttctccaaggtcaaacagtcactaagtgcagaagctcagattcaaacacaggtatctggctctagcacttactgtattgtcttgccagtctcatccaatcgaaatcacttctccagtactagtttttatttgtttgttttttatgagacaggctctcactctgtcagctgggctggagtgaggtggtgcgatcactgctcactgcagtctccacctcccagattcaagcaattctcctgcctcagccttccacatagttggaactacacgtccacaccatcataccaggctaattttctttcatttgttgtagagattaggtctcactatgttgcccaggctggtctcaaactcctgggctcaagcaatcctcccaccttggcctcccaaagtgctgggattacacgtgtaaaccaccgtgcctggccctccaatattagtttactttttaatcaaaagttaacacaataagaaaaataatacaattaaaacatcaaaagttaaaattaaactaatcattacagacctgtaatcactgtacaatttggaagccaaaacatcactgacaatttgaacgaagtccatctattttcttcctatttttattttgtttttgtttttattttttatgttcttgtagagactgggccttgctatgttgccaaggctagtctggaactcctgggctcaagcagtcctctcacctcagcctcccaaagtgctgagattacaggtgtgagccacggtgccaggcctttctccttatttttggtttattagtgaccatcccagttctccagccctgacgctgccagccctgttacttcagatctccatgccccaccttgccttcggttttgtttttcttcatcttggcttccctaatttcacattgcctgctgttccaactccatattcttcaataaaaatatgtctcaccaaggccttcaaagaaaattgaagacaagcatttcctgcactccctcctgcctcctccacccacaatgttgtggtcaaccgcctctaagactgatgttatcttctgcttctcctagtgacctctggagtttcaaataaccttagtctgttgctgtttcttgctagatttgtttgtttgtttgtttgtttgtttgtttgagacggagtctcgctctgttttaacccaggctggagtgcagtggcgcaatctcagctcactgcaacctctgcctcccaggttcaagcaattctcctgcctcagtctcccgagtagctgggattacaagcgcccgccaccacgcccagctaatttttacatttttggtagagagagggtttcaccacattggccaggctggtcttgaactcctaacctcaggtgatccacccacctcggcctcccaaagtgctgggattacaggcgtgagccaccacacccgacctgctagatcctttttaggcatccccatttgtcttcctgccatgaaaagaggggatctagcatgttctaccctcgccagtctgggatctgacattggtagggaggagtttgcaagttatccctacaaatctaggttggatcttggagtaaggggagcacctagctctgagagttttctttttcttctttttcaaaaaagagtaatgcgcgcccctgattttttaaaaggtaatgaaactggtgacgcctgtgtttgctttataattatttctcaacctacaccgagatattttctatacttctctgaaaatagcttatgtttcacaattttaaaaaagaaaataggctgggcacagtggctcatgcctgtaatcccagcactttgggaggccaaggcaggcggatcacgaggtcaggagttcgagaccagcctggccaacttggtgaaaccctgtctctactaaaaatacaaaaattagctggtcgtggtggcaggcgcctgtaatcccagctactcgggaggctgaggcaggagaatcgcttgaaaccacaaggcggaggttgcagtgaaccaagattgtgccactgcactccagcctgggcaaaagagcgaaactccgtctcagaaaaaagaaaataggggccagatgtggtggctcatgcctgtaatctcagaactttgggaggccaaggtaggaggatcacttgagtccaggagttcagcctgggcaataagcaagaccccgtctatacaaaattaaaaaaaaaaaaattagctgcggctgggcgcggtggctcatgcctgtaatcccagcacttttgggggcctagacgggcggatcacgaggtcaggagatcgagaccatcctggctaacatggtgaaaccccatctctactaaaaaatacaaaaaaaaaattagccgggcatggtggcgggcgcctgtagtcccagctactcgggaagctgaggtgggcgaattgctcgaaccagggaggtggaggttgcagtgagccgagatggcgccactgcactccagcgtgggagagacagagcgagactgcgtctccaaaaaaaaaaaaaaaagcagctgggcatggtggcacgtgcctgtagtcccagctgcttgggaggctgaggcaggaggattgcttgagcctgggaagttgaggccgcagtgagctatgatcatgctgctgcactccagcctagggaacagaactctggcactaaaaaaagaaaagaaaagaaaagaaaataggcttacaataaaaagcaatcttgacctaccccaaaatcccactcccttgaagacaaccacttctgccctgttgcttctctcagtaatactccttttctgcagttatctcttgacttcctgccatgtgtgtttgggggagcttgagggaagagggtgtccctgtctcattgagagaggtgccaccctgccgtgaaaagaggtgccaccctctgtcaattaggagaggagggatgagagaggaaaggggtctccagtgtatttctccagccggggccttaaatccctcttgggagatatgggatggggtggatcggaaaataaatttttttaaatccctaccaaaatatcagctggctttttttaaaaaatcaaataccaaaatctaaatagactccaacagaaaattcaccatctcctctgaccttttcttcccatctcatgctgtgaactgtcttctgttgactttatcgctacctttcttcattctgttattcaaccatgatctctccgtttcattttataagcgttttattaatttcatttatgtatttatttttgactaggtaatgcatgtccatggtacacaaattcacaaggtttgtaaatgagaaaagacgtgaggttccttttgttctttacctgtggcctccctgccctacacggggactctagggtggaatgtagcaaagcccatccaccagccatgtactaccccccaacccggccaggctggagcgaccgtgtctggggagccgagccccgcttctcgctgcggtgagcccggactggggcacgcactgcgcagactccccgctgcagtgggcggagctcccacaggccccgccccctcctcccaccctcgttcagcctgtccagacagaagctggggcccaccggaggtagctgcagacgcctgagagcgaggccgaggcccctcaggggtaggtggggggaggctggctggggggatgggcagcggggtggcagggaggccccgatgatccctggctgagctgtgtggtgtgggggcacctgagggcggaggagccacctagaatataccccctgtcccagggctgagaaaagccaggcacaaagacctggggctccgctgacctcatccagcgctgcctttcttggggtgtctacaggttggaggagggagaagggggctgctagaggggagctgcgtgggtgctgatgggggcagggtgggcactgcagagtgaagagcaggcagcagagcgttggattttgagggatttcgaaatcctgctgaccagtgaccagcttcctctttttggggtggtgggcagtgtgccagtggcccccatgattatgaatagccccaagactaatcactcttctgtgatgtctgtccctggaaagcgtagaacaccccacacagtgcccacttttgttctgccagtttggagaccctgacacacccaccttctcacctgggctctgcgtatcccccagccttgagggaagatgaagcctaaactgatgtaccaggaggtaggtggattggggggctcagcagggtggaactgggtacagtgggggtgggggttcccaagagccacctgtcacccccgttgttgtccccatccccagctgaaggtgcctgcagaggagcccgccaatgagctgcccatgaatgagattgaggcgtggaaggctgcggaaaaggtaggagccctccgccaccctcgctctgtctcagagacaggctgggctgcccccctcgggctggctgaccacctcctcctccccacagaaagcccgctgggtcctgctggtcctcattctggcggttgtgggcttcggagccctgatgactcagctgtttctatgggaatacggcgacttgcatctctttgggcccaaccagcgccca

SEQ ID NO: 8084 - DNA, 6000 bp, Homo sapiens
gtataatgtccaagagttactcaaagaggctggatgtgatgactctcacctgtaatcccagtactttgggaagctcaggcaggaggattgcttgaggccaagagttggagaacagcctgggcaacataatgagatcctgtctctacacaatatagaaaagaagtgagccacgcatggtggtgtgtgcctgtagtcccagctactcaggaggctaaggtgggactacaggatcacttgagcccaggaggttgaggttgcagtgagctgtgattgtaccactgcactccagcctggacaacagagcaagatcctgtctcaaacaaacaaacaaaccctcaaagacatataatttcatggatcaattgtgtctgtcaaagtcaaaaacggaagttaagtaaaagaaaaaaactacagacatttaacaaataatgaactgtgttttccttgccctgggtgaagtgctgatgagctggcagtgagcagacaggccaggtggggtgttctgcccgggtgcagctggaggggtcatcaaagaatcactaggttatttttgagttctccataacttggtgtctgtgagacatgtaggtgaagggtctctggctagcacctccatctcattcatgccaggtgtttaccatctctcttatcaaaatttctcaagagactctgggatgtaaatgcagaggctgcatggggaggtagagacccaggagctatagggaaacggggacaagaagactgaagagaaggacaggaagaaacagtgacacaggcaggaggaaagagacagatggagggaccaaaacaaaaaaatataggttgggtatggggctcatgcctgtaatcccagcactttgggaggctgaggctggcggatcatttgaggccagcagttcaaaaccagcctggccaacatggtgaaaccccatctgtgctaaaaatacaaaaattagccaggcttggtagcacgtgcctttaatcccagctactcaggaggctgagacaggagaattgattgagcctgggaaatggaggttgccgtgagctaagatcacactactgcactccagtctgcatgatagagtgagactctgtctccaaaaataataataataataataaaataaagaacggcaggggggagacaaatatacacacagagagacagaaagaaacaaaggcaaagagaaattgaggcagagaaaattagagagacagacagacaaagcttaggaaaaggtctgcagaggaatgagagaagacaggcaagtgagaaccagagagaggctgcactaacctgatgttcttgggtccttacagaccactctccctccagctggggccagtgctgagcctggtgtatacaggtatcacttaacaagtacagaataattcccagaagactggagagccctagatgtggaaagaagagattaagggggagtaataggtaggggtggaaagatggttttttatttgttttaaattagagacggggtctcactctgtacccaggctggagtgcagtggcacgatcatagctcactgcagcctcaaactcctgggcccatgtgatcctcccacttcagcccctggactatttcaactgggactacaggcatgtgccaccatgtctagctacatttttttttttttttttttgtagagacagggtctccttatgttgcccaggctggtcttgaattcctgatccttttgaatcaggctcccgaagtgctgggtttagaggtatgggcccctgtgcccacccagggctttttaatttatataagcaattgattgaacacctactctgcccagcccctatccctgggatttaactgtactcactcccagagtcagaggtggggcctgagaggaggtgcagagtgagaaccggctgcatggactctatagctgtgttgcctgggtctaaatcctggcctcagtaatgagtagctgtgcaactttggtcaaattactcagcctctcggtctgcccatctataaactggagctaataatcaaattgcatctgcctcacattgttgtagtgagagttcaatggaattacgcgtgacgtgctggtacataattagctgttacggttattctcatgtttaccattactgagtgatggcagacaatcacacagagataggtgacagcctgatgttccccaggcacttcagtctgtgtccttgacctgctgcttcttcctaggggccctcatggaccccaccttcctcttccagtccattaccgccaacatcatctgctccatcgtctttggaaaacgattccactaccaagatcaagagttcctgaagatgctgaacttgttctaccagactttttcactcatcagctctgtattcggccaggtcagggagacggagagggacagggggtgtgggggtgaggtgaacacccagaacacacgagaaaaggatgacctgtcttgggggctcagaaatgcagcttatccttggaagaaacgcagacatgtgaagaatcagggacatggagacctggagggaggagagacggtgagacagggatagagacactgagagagagaatgaggcgtgatggggaggcagaaatagagtcagagagagactgagagaaggaagatgagcaaaaacaagacaaagaagagcagaaatcaagagattctgagagacagagttgatgagaatgagtgtgaaagagagggagagagagagaacgaataaggctttgggcttcatgtctattctgctcctggatgtcatttctgttttattttttttagacggagtctcgctgtttcattccagctggggtgtagtgttgccatcttggcttactgcaacctccacctcccgggttcaagtgattctcctgcctcagcctcccaagtagctgggactgcaggcatgtgccaccacacctggctaatttttttttttttcttttcgagacagagcctcgctctgttgcctaggctggagtgcagtggcacaatctcagctcactgcaacttccacctccctggttcaagcaattcccctgcctcagcctcctgtagctgggattacaggcgcctgccgctatgccaggctaatgtttttgtatttttagtagagacggggtttcgccatgttggccaggctggtctctaactcctgacctcaagtgatctgcccgcctcagactcctaaagtgctggaattacaggtgtgagccaccatgcccagactgcttctggttcttctgtatccttgcttctcagtctttggtaaagctctccacctaaagaaaatgaaggataaatgacaataaggaacagcatttcttcattttctcccatttctccttctccctctgtgtttttttttttaactttccccagattgtaaaggcagtcttctgctcttttaaaacaaaatactaaaatgtctccttatttattaacctggaaatatgcctattacatattaaatttaagaatatcaagctgcagaacagtatgcatagctgtagtttgttgttgttgttgttttcagacagtatcttgctctgttactcaggctggagtgcagtagtgtgatctcaactccctgccacctccacctcccaggttcaagcaattctcatggctcagcctcccgagcagccgggactataggcgagcgccaccacacccagctaatttttttgtatttttagtagagatggtgtttcaccatgtcggccaggctggtcaacatagctacagctattaagcagggatgtatgttggattcacatgtggggttgtcacagttatggattttcaggaccctactttctgggcggtctgatctggaaagtctgggatggggcccaaggtgagtacttgtaacaagcccgaccagtaattctaatgttctcctcccaccgagaaccacagagaaaagtctggaaggagacccaccagacagttaacaatggttatctctagaaggagagattaagaaggaaatttacatctgactatatatgtttgcatttttgcaattatttgcaataaattaggcattccattcttcatcaaagtaatagaaataacctccaaaatacgtagtcctaacatgtcagcaggcttatcttgtgtaagaatcattttattaatatctgacacagcaagggagatgaggagaggtgggaagagggagagaaaagtatgagaaagacaaataaacaggctgaggtagacaatgggtgacacagaaaggaagtgagacagagactaagagagatagaaaggagagaggcagggagatggggcagaggccaagaaaaagacagaaggatgagggaggaagatgcagaaagaggtaaatgtgagatagatcaaaggagatatagagtcagtgagtgaggggttcagaggcagaggggagtggggaagtggggttcccatggagggattggggcccaggaggcgctctctccctgtgacctgctagctcagccctaggcaaacctcaccaccccttctttcttgcagctgtttgagctcttctctggcttcttgaaatactttcctggggcacacaggcaagtttacaaaaacctgcaggaaatcaatgcttacattggccacagtgtggagaagcaccgtgaaaccctggaccccagcgcccccaaggacctcatcgacacctacctgctccacatggaaaaagtggggtctgggagaggaaaaagggaagggaggggagggagggcaagatggagaggtgagaagagggagggaaaaggggtagggaaggggaagatggggagggaagaagaaagactagggaggggagaatagggaaagggaggagagaacatgaggaaggaaagaaagatgaggtgaaaggagggagaaaatagggaggaggaactgagacagggagagaggggaggtgggaagacagaatgaaagacagagggagagagagagaagactggctgaggaaggaattcggggcaagggacaaaaatacagcaacaagagaaaaaactcacagaggcagaaagagacggggacaaaaagagagaaacacatcaaagagatgtggagagagatagaaacagagttaggaagactaaagagaggctgagagagatgagttagagatacgcggttggatgtgtagaggacagagaaaagcaaactgggccagatagtgtcaaagacctttaggccaacggagggcagccagggagatgggcgtatacacagcaaggctacagcctcccctgaccctccccttccttccctactgtggacgcaggagaaatccaacgcacacagtgaattcagccaccagaacctcaacctcaacacgctctcgctcttctttgctggcactgagaccaccagcaccactctccgctacggcttcctgctcatgctcaaataccctcatgttgcaggtgggccagggacagccagtcaagggggtcttctgacctccttctgagctgcagaaatggggctatgggtaccacctggatgagagaggggatgctggcttcctattctgggagcactgtaggctctgggctagattccaaccaagccaattctgttggtggatgcatggatgcatgaagaatctgtccatgcgttctcccactgttttcttccatcacttaaggattttttgttctaaggtttttgtttgtttgtttgttttttgttttttggtttttttttttttgtcttttttgagacagagtctcgctctgtcacccaggctggagtgcagtggcatgctcttggcttactgcaagcttcacttccagggttcacgccattctcctgcctcagcttcccgagtagctggaactacaggcgcctgccaccacacccggctaattttttgtgtttttagtagagatggggtttaaccatgttagccaggatggtctcgatctcctgacctcatgatgtacaaatttagggggtacatatgca

SEQ ID NO: 8085 - DNA, 6000 bp, Homo sapiens
ctttaaacattagacatggaatctttataataatcttgccatatatatatatatatatatattttttttttttttttttttttttttttgacactgagtctcactttatcgcccaggctggagtacagtggcacaatcttggctcactacaacctccacctcctgggttcaagtgattctcctgcctcagccaccccagtggctggggactacaggcgtgcaccaccacatccagttaattttttttttttttttgagacggagtctcgttctgtcgcccaggctagagttcagtggggagatctcagctcactgaaacctccgccttgtgggttcaagcaagcaattctctgccacagcctcccgactagctgggattagaagtgcccaccaccacgtctggctaatttttgtatttttagtagagacggggtttcatcatcttggccagactggtcttgaactcctgaccccgtgatccacccacctcggtctcccaaagtactgggattacaggcgtgagccactgcgcctggccggttaatttttatattttcagtagagacaggatttcaccacgctggctaggctggtctcaaactcctgacctcaggtgatccacccgccttggccactgtgcctggtcaacagtctttctatttttattctaggctggagacctttgtctcaaaaacaaaacgagaatgctccctggagtctgtactgatccctcttccctcccaccgtagattagttttctccttgcatttaaaaagacctttctggctggcatccagtgaatgaattgtggaggagggggagaaggagagaggaagcaggtagctcagtggggaagctactgcaaaatcctggcaagcaatgacagtaccttgaatcagggctggtgtcagttggatcagggtggtagggaaaggaggaaatggataaatttggaatgtatttggaggtagagccagcaggatttgctgacaaactgggtttaaagtcaaagagagaaatcaaggttaaacctgacaaataaaaacagatgtggtctcaggcgagtagagacattatgcagaaagactattgcatcagggggaaagatggctgtaaaaacaatgaacaagaccagaatctgataacccagaaggatgtgttgtctaatgaaactaattttttcccctcctcctattttttttttgagacggagtttcactcttgttgcccaagctggagtgcaatggcgcgatctcggctcactgcaacctccgcctcccggattcaagcgattctcctgcctcagcctccctgagtagctgggattacaggcatgcaccaccacacctggctaattttgtatttttagtagagacggggtttcaccatgttggccaggctggtctcaaactcctgacctcaggtgatctgcccacctcagcctcccaaagtactgggattgcaggcatgagacaccgcgcccggcctctcctatattttgttgtcatcagcaagtgaaaagatggtgataccttttacagaggtaaggaaggaggtgagagaaagtattcccagatggggtgggaagctggtacagcccactttgcaggaggtgggggaatcgggaattcttttatatccatgaagtttgagatgtctgttagctctcccaggggtagaacagagggagcagataggctcaaggttggatttggaacgtcctagaaaccttccagaacaaggcaaaggaggaactgagaactggcatttacttcatagcaagagcgtatgagcctccccacccctcctcctttggcttcagggcacccctggaatgttagaggctagaatcaatgctaaagaagaccacagtcaaggattccccagactccagggagcactctggctatgctcttgagagaaagggctctggactagaatacaaattgcaagattgcaggccgggggcagtggctcatgcctgtaatcccagcactgtgggaggccgaggtgggtaaattgcctgaggtcaggaggtcgagaccagcctggccaacatggtgaaaccccaactctactaaaaatacaaaagttagctgggagtggtggtgggcgcttgtaatcccagctactcaggaggctgaggcaggagaatcacatgaacccaggaggcagagattgcagtgagccaagatcgtgccactgcactccagcctgggcaacagagcgagaccctgtctcaaaaaaagattgtgaaaattctaagaatctaatttttttttttttttttttttttttgagacggagtctcgctctgtcgcccaggctggagtgcagtggcgggatctcggctcactgcaagctccgcctcccgggttcacgccattctcctgcctcagcctcccaagtagctgggactacaggcgcccgccactacgcccggctaattttttgtatttttagtagagacggggtttcaccattttagccaggatggtctcgatctcctgacctcgtgatccgcccgcctcagcctcccaaagaatctaatattttaaaactccagcatatgcaactcaaagctcatctaattatacacttaagagttatgtatttcattgtatataagataccttgaggaacaaaaagtatctgtaaacaaatactgagctctagctactgatatgcatgctgatgtatttgggagtgaagtgtactggtatctgcaactgactttgaaatgcttaaaaaaaaatcaatggataggcaaaatgaacagatatgtaatgaaaaaagggccaggcacagtggctcatgcctgtaatcccagcactttgggaggctgaggtgagaagatcacctgaggtcaggagtttgagaccagcctggtcaacatggcaaaaaccccgtctctactaaaaatacaaaaaatagccaggcatggtggtgcacgcctgtaatcgcagctacttgagaggctgaagcaggagaattgcttgaacccgggaggcagaggttgcaatgagccaagactgtatgctattgcactccactctgggcaacagagtgagactctatctcaaacaaaaaaagaatagataggtaacaaagaaaggataataaaatggtggaatctgatgggtatacaggtgttcactgtatgtttgaaattttaatatttttataataaaatacgaaatcaaaatgcaaagcaaacaaagtaactgccctgctgaaaacccctccagacagcttccgtttgcaatagaaataaaatgcagtcttttccaagaccttgcaagatggcccctgcagacttcatgaatcttatctcctacattcaatctttgaaaatataacaaatatttattgagtgcctactgtgtgtcaggcactgcactatatgttggggatacagcagtgaaccaaacctacaataattcatgcacaaatggttctaacattcttccttctcaagaagcccattcccctggcaggccttctcacttcctgaaattgttttcatctcatcttcatctgcatgtggatatgagctcaggaaggccagagcccttctctccatcgctcatagctgcaccctcgggtctagaacaaggtcttgtttatagtaagacctcaataacagttagttgcagaaatattagctaacatctatttagtgcttgttacatgtgcacctgcgtctgctttaaatggtgtgcacagatgtactatttaatcctgaaaactagccccattttacaaggctaacagaggcacagaggaattaggctgtgaattcaagcagtctggcttcagccatcacggtcctaaccgctctgcaaactgcctctaaacgaatgaatgaatgactcaatcattctaactggcccaagtcaaaatattaactctgccactcagccaagttgacctggggccaaccgatttatctccctggacttcagattgtttatccttaaaggtcaagtccttcctctcagttcgtgaagatgtaagatgctggagaaaattgactcaaagacaccccatacacgcacgcacacaggaacccacatccgaacaatgagcgaggtaggagctggggagagtggcgcggggtcaccgccagatgcggggtgtggcaacctccaggcggccaaagtctctgacttccaggttcttctgtttgcttactccctatccgggggcccaaggcgctgtctccgccgcccaagccccgcgtaaacctgggtgacctcggagacatccgttggagcatgagttcccgacatcaggcggcggcggtggtccgggagaaacccggcggcggggagataagcctgcccaggaggcagggggctgggctagctgccccgccccgcgcctgacttcgttggggagggagacgcccggctcccgcccctaactagcccagccgcgcggagcgcctgggagaggagaaggagccgacctgccgagatggaggcgaccggcacctgggcgctgctgctggcgctggcgctgctcctgctgctgacgctggcgctgtccgggaccagggcccgaggccacctgccccccgggcccacgccgctaccactgctgggaaacctcctgcagctacggcccggggcgctgtattcagggctcatgcgggtaaggggctctggggacgtcctggctaggggtgggaggattcctgggagagaaacccgagtgccagggtgaggggcttttcgggtatcctagggaggaggcaggggcaggggtcccaaggcaaaggggctgctgctgtcctggggttgggggcaggagcaggttgtccagggctgagaaggggagaggtgcccgggagagaggatcgtggggtgggggaccagggctaggaggggcagagacctctgcctacagaatcctgggaaggtgatgggcagggaccgaggctgaaagagacaggagtcctccagccgaggagaagctgatgcagctgggcttgtcccagagggagaggtagctggagccatacaggtggggcatgctgaagagggcacaaagaagaaaagggggaggcgtccctgcggggagttggaggcagagaagaggctggagggttgcaggctcagagagggggtcccgctgaaggaatctgccagcagagaatgcaggatgggaggatgggtggagctcagttgggagttcctgggactggggaggaaggagagcaagaaagaaggcagaggcagccccagccttaggggatagcaggtgggagtgggcagaggcctgaagtttcccattcaaaaggattctgggtgacttcaaggacgtagaaaaaagggtggggtcttgggggagagatggggcggatactcagcagtgtctgctccagaatttcagggttttgtggtgactgaaaggggtggctggatatttggggggcagggagggccctaaggaattaagggagacccaaactgcttctggattgcccagcgtcagaggttagggttcagcaggaagcaagggaacgacaggaagttgggggatgccactgaaggatgtactgggggaggaggcccgggagcctagtgcaaaaagagaactgagcctcagctatttctgctgggatgggggcaggttcctggtagagggcgtagaagctagacccggtggctcctcaagtgacaggggccatgatggagacaccttggatcgaagaggtcacagcaccctcctctttcttcctccctacccccagctgagtaagaagtacggaccggtgttcaccatctacctgggaccgtggcggcctgtggtggtcctggttgggcaggaggctgtgcgggaggccctgggaggtcaggctgaggagttcagcggccggggaaccgtagcgatgctggaagggacttttgatggccatggtaagtcaagggctgctaggccctccgctcacagcctgccaccacttactggtgtgtgacctttgcacatggctta

SEQ ID NO: 8086 - DNA, 6000 bp, Homo sapiens
ctgagatcaagtaattgtaaatattttgaggttaattcacaaacaacctcacagccaaatagcacttatcctacttattgaaaggaaattgaggcacagggagacagtcactaacaagggtcacacaggccataggtgtcagattgaagtcacatgaggtctgtctgtagccacagccccctcctctcctcaactgggggtgggtggggctgtttgttgttaggcatctgcatctgagaccagtcatgggcttgcgttcttttgtcttgggcatccacagctcagaagcggagattctggtctggagagtgataagtaaatggagaaataatcagttttactctagaactagatcacctcaacagtcagggtcagtgccgggattgtccaggcctctccctgagatccacagccccctcacatgacctcaaatcctgtgtttcccgatgtgtcagtgtcactcccacggaaggataaaggaaaggacttcgctttctctccccactcacaccctgtgccaacagaggcccaaagtgagacacacgcttgctcagtagctctctcatgaaggggggaatgagtgaaggaatgatccataacctctatagagactggatcctggatgcagaatcctgggaggttctgaccacacctgttccgtgtccatcaggggctgagatccatgtaccattcctctgaccccctgtcccgaaagccaccctatctcatgtgactctggggttccttggccatgggagggttttcaaggctccctggtcctggtcgggacagccaagggactcctagtcctggggtctccgaggtcactataccccgcatggctcattgccatgggcatttctgactttcttctattcctccatgttcttcgtcttcctccctcttcattccagctgagatgcccatccctgaacatcttcctccactcttaggccttccccagacactcccttgaacaaggctggctgtcctgttttcttgccgctcacactgtgtcctggcccacttcccaggcaatagggaaggcacagaaatcacaggcaatagggaaggcacagatggagcccctgccaggctccatcacaagccaatgtcaacaggtcaccaggagaatgagcttccgctgtgttcctgcccagggctctttacttccatgaggccaacacacggaacaggcagcaggacgggaatgagcgactcctccatccactccctacactgactcaccagggggtcagaggcagaaggacaggtctgcagtccccaaagcccgcatgcttatttcactcacttcactacccactccatcttcatcctggtgtggggctcacatcctccagtggatcctgggacctcccccaggtggagctggccaggcaggtgctgtctgataggtttgctgcccattccacatacacctgtgtcctcatgatgatgccattgtcataaggtggagtcccttggactgagaagtgaaccagccactggcgtctcacttagactctacccagttacaaaaacttaaactctagttgtgttttctgaggttgataggagaggaagaaaacctttcacatgcctgttttgaggcttctcctctttttgcctaactctgcacaggaactaggggcagggagcgctttctaaatttactaacatcacacacattgcttctcctaacttggcatcatttctccctttatgtaattgacacacctaagagttcctctctgaccggttctgtcctcttaacaggtctcacatccctctctctgttcagggagtcactgatttcaaaccactttcagcatcttcctttgagcataatgtgatcactttggaattcagagcagacctaaaccttagcataatattaaaagaagtactacttccagcaattgatcttagatctttaggccattgataagaatttccacttatggaaaaaatttaatgtttcccccaaatgtctttcacttttttaactatagtcagaaaataacatgagatctaaactcctgacaaatttttaagggcaaattatagtactacagattgagtatcccaaatcctaaaatccaaaatctgaaatgctccaaaatccaacattttttgaccactgacatgattctcaaaagaaatgctcactgaaggccgggcacggtggctcatgcctgtaatcccagcacttcgggaggccaaggcgggaagatcacaaagtcaagagatcaagaccatcctggccaacatggtgaaaccccgtctctactaaaaatacaaaaattagctgggcgtggtggcatgcacctacagtctcagctactttggaggctgaggcaggagaatcgcttgaacccgggaggtggaggttgcagtgagctgagatcgtgccactgcactccagcctggcaacagagcgagactccatctcaaaaaaaagaaaaagaaagaaaagaaaagaaaaaagaaaggctcactggagcactttggattccgtattttcagatttggggtgctaaactggtaagtatattgcaaatattcaaaactcaaaaacagtcagaaatccaaaacacttttagtcctaagccttacacataagacatactcaatctgtatgaactataggcaccaagctgaacagcagatccctagaacctcctcatcctgcataactgaaactgcagacccatgaacaactctccattcccccagttcccaggctttgacaaccaccattctactctctgattccacaagtgtgactactctagggacctcatataagtggaatcctacagtatctgccctgtgagtggcttatttcatttagcataatgtccaatgggagaaaataattgcaaaacttcttctcaaagttctgtctcataactgtcaaacacacatggtccttgagggccagatttccagcagttcatgctcccccttttccaccagtcagttctgcatttgcaaatgtccacatgtatttatggagagatccacagcatcctcgcctgccctctgcaaggggagaagggacattaaagaccaaagacaggccgggtgcagtggctcatgcttgtaatcccagcactttgggaggccaaggtgggcagaacacctgaggtcagaagttcaagaccagcctgaccaatatggtgaaaccccatctctactaaaaatacaaaatttagctgggtgtggtggtgggcgcctgtagtcccagctactcgggaggctgagacaggagaatcgcttgaacccgggaggcagaggttgccatgagccgagatcgtgcctggccaacacagcaagactccatctcaaaaaacaaacaaacaaacaaagaccaaagacaaagaacatacatatggttctgctgttaaatccgggcagctcctgcctgtcacctgaagttctagatcattccctggactccactctatctttaggggtctctggctcaagtcagtcatcatcaaacacctgggaaaaactgccccaccttgtgcctccactgcctaacgactgagctgacctccaggcttgcctctggtgtcccctgtgttatttctactgaaacatccagtcccaggccaggctgcacaatatgtacagggtttaaggacaatgggaagacccatcactatccatttctaggatgtccttgcaaagggaaaccacagaaaaaatatacctagggaaacaaagtaggactgaaggtggaagggacccagcacttgaatgttccaggtgaggaccctacagtgggccaagtagtcaactggtcagggagggaccaggagaggcaccaggagctgtgacctcccccccagtcctgtgtctgttcacagcccaatgctgctgcttaattcacacttgagaaagtctgtgcttcccccacaccgagcaggcagcctcgcagtctctgagatctcagatcatcgtgcatctgtcttgtgacacatgcacccaccgtgggtttttaagggctcaggtgggctgagaggtggaaggtgccaactctgattgaaagatgcctgtgaggaatcaaaggtgccacacagggcaatcttctctctgttatctgcacagcggagctgcccaagccctccatctccagcaacaactccaaacccgtggaggacaaggatgctgtggccttcacctgtgaacctgagactcaggacgcaacctacctgtggtgggtaaacaatcagagcctcccggtcagtcccaggctgcagctgtccaatggcaacaggaccctcactctattcaatgtcacaagaaatgacacagcaagctacaaatgtgaaacccagaacccagtgagtgccaggcgcagtgattcagtcatcctgaatgtcctctgtgagtatatctgctcctctctggcccaggctgccagcccaaatccacagggccagaggcaggatttctcagtccctctcaggttcaagtacacagaccctcaaccctggacatccagactgtctgtgactttctgccccagaaaaacctgggcagaccaagtcttgaccaagaataggaggggaggggctgcttctgtcctgggaggctcagggtccacaccctatgatgggagaaacaggtgaatatctcagactcaggctcagtagatacaagaggggtttggctgagactttaggattgtgattcagcttagagggacactgtggtccttccatagaccaggaacttccacttccctctgacaatatcacctgtggctttattttgtttgctccagatggcccggatgcccccaccatttcccctctaaacacatcttacagatcaggggaaaatctgaacctctcctgccacgcagcctctaacccacctgcacagtactcttggtttgtcaatgggactttccagcaatccacccaagagctctttatccccaacatcactgtgaataatagtggatcctatacgtgccaagcccataactcagacactggcctcaataggaccacagtcacgacgatcacagtctatggtaagtggatccacgaagcactgacatcatgttttgaggtggagtctgtctggttttcaaacaagagccaggaagacattttctatcccagcctgtgtccagtgggcacaagcaaatcccagattctcccactgaacctccccaatatgtctctacagactcttttcttcttgttctgatttctcatggcgggccccaggtccagcttggaatgtggggaggaggctccctcagccccacagccctgtgtagtggaggaagcttcacagagcgggaaggagcaagggttctcaaggtcaagttgcttctctctgtcaccaatgtgtccctttctgtcacctctttgtgttcttttgcctactccatgagctacaagcaacattcaaggctttgaaacaagctcatacttttttcccaaatgagagaaggaagccccttgggtgagggagacacagctcagactgctccctgctctgctctgggctcccctgggtgactggccttgcctgactccacctaggtgggaacgaggtgtgtggagaaggagcccgggtggtctgtcctgaattcggctaaatcaagctgccaatcaacaccaaagcttcccttcgtcccagtcaggctgcaggaaaatggaaagagagggagcctcagggcagactcctgagctgcgtcctggctctgatgtcaccagctatatgaggctgtgggcacagcacatgggacacagcacaggggacagcaagtgacccacacttggagaaatcaggagattcaccacaggggctctgcacggcagggaatggcagtgtcaaaaatcgtgtgtttatacagatggtaacagtacatatctaacacaaacttaccatcttaacttttctacacatgcagttcagtggtattaaatatattccccttgttctgcttccatcaccaccatctaccca

SEQ ID NO: 8087 - DNA, 6000 bp, Homo sapiens
tttctcagtcagatctcaaactttgcttgtattgtttatattctttagagtgcaccaagcatgacatactttaatgctattcaatggtagctaataaacggaagaaaatcctatcaccaggtagtgtccgtatttgaagctttagccacaccaagccctgctgcaacagtgcaccatttgggtagcagacctttggctaaggctttctaatctgctccagttttcactacaaccaaagtggccaagccctttgcaaagaaatcatgcagaagacagcttagccccatgtatatttccacttgggagcaccatctccccaagggccactttgaggtgaaacagctttgttacatactcagcgtcaacttggtcctaaaatcaggagatgttcagccttctccactccaatttccaatgttccttgctttgtagagagagcgctctggaagctgctgagccccatagccctggggcctaaaccaccattcaggaagggaaggtttttccatcactgtgacagacacccaggccagagtcctcagcctagactaaaaggtctagccccaacctccgtttccagtgcaaccccctccactcactaaaaattactctctctccacccaaactagactgtttgcccttccctgaacagggcttgtgttttcccaccagttcaactttgcagatacactcaactcaaaaaccatcttcccacaggccagacaagtgctcagctcctcccacacccagacaatcactctccatcctgaaagctggcttagccctactggactctctcttcttgcacttatctgctgccttatattgaagaccttcctgtgtctctcctgcctccacccactacccttagaggttgcagcctccttggcagcacagactggtgcactgtttccatatccctcatgctatccagctcagcactcagcaaccattagctaaccgcacgaatgcgtcctcaggtttctaaatcaaaccagggcttcagagcaggtctactgacaactgggctgaccgattccttgtagtgagggctgttctgtgcattgtgagatgttcagcagcatccacatgccctctctccactacatgccaatagcagccttccccctccctcaagcaccctcttccttcatgaaagcaaaaaatatttctagatattgccaaatgtctccttgagggaaaccacccctagtcgacaaccattgctttataccaatagttctccacctggcccacacatttacacttatctaggcatttaccctcagcctggaagtcaggggggcctagatccaaatcctggttctgtcactccctttgcaaccctggacaagtcgcttcattttttttctagcctttttatcgtcttaagatgaataaataccactgttcacacaggcttgttgtgaagattagatgaacctcagtgtaacctggaaagggttcaataaatggactgaatggaatttctaaagtcgctcctaaagcactagggtgaggaactggggaaagctcgctgcgccgccagggggcgccatcacaaaccacctcggtgggtggcgccgggctcgagctttgtttcccagccaagtagtttgtaatgcgggcctgactctgagctacttagtggctggaagaaataatagcccctccattcccaaaataaatctcaaaataaaatctaatcttattttatatccctttttttttttttttgagatggagttttgctctgttgcccaggctagagtgcattggcgcaatctcggctcgctgcaacctctgcctcctggattcaagctactctcctgcctcagcctccctagtagatggaactattggtccctgccaccacacccagctaattttcatgtttttaatagagacgtggttttgccgtgttggccaggctggtctcgaactcccgacctcaagtgatccgtccatctcggcctgccaaagtgccaaagcgtaaaccaccgccccgagtggctggcattgtttattatgtcgctgatattgtcccaaatttggccattgggagttccttctagttggtttctgtgacttttgacacaaccccatcatttttcaagcagttccttacttctggccccacagaatgtttacttctggccccacaaggctcctcttgtgctttcttgcccagccctggatcagctatttctccagggacccctggttcctttcatgggaaaatgatgtttacagaccatgggcacccatatgcccattgctagtaggtgccggtgcttctatgccctctagtggtcggagctgggaaataacacacccacactagtgtactgttacccacatttcacaaattaggtaaatgaggcacagaaaagttagacaacttgaccaacatcacagagaaaataggtagtagaactggaaaacaaaaataatgacagatgcacaagtcctaacaagcaaaagtaacttcttcacacatgcatgttagcagaaagccacaagcccaatattccagcatagacactctctttggaaaataaccagaattccacagcaataaacacaatgataaccatcacgtactcaacacccgcctggacactgggctcccacatattcccaacaactctgcaaggaggattttaccatcctccttttacaaatcagggaatcaaggatcatagaagccaagtgacttgtccaagtcaacatagttaagtgacagaaccattagctgagcccaggtctatatctggatataaattccatgcttatgccactatataagcatttcccaaaactgattttaggtgaaacataaataaacttttaagtttaactgtgtttattttaacgcatgacaggaaaaaaaattaagcacacatcaaatctctgatttcatggacaatattgcataagacaaaaatattttgtcttcagttcctggcctcaagccatcctctcacctcaacctcttgagtagctgagatcacaggtgtgagccaccaagccctgctaagacaaggatgttttgtaaactaaatttaattacaaaaaaagtatgaagtaaataataataaaggtggtaaagctgtagagaaaatcataaagttggtctagaaatgtctggggtctggatgacataatactacagcaccatgcagcttcattctcagttactcccaggaaattagagtcacataacactgcagaaagaacaattcagaatcttagacccgggctttagccctggatgtgtccactcctaggaccccaaacatctctgtgacctccttgctggaggtaaatccaaccttcccagacgtgtgagaacactaggaacatcctgcacacatagaggggtttctctgtcacagagaaaataacaccaggtttgaggaccccagggactctctgtgtggtgctgacagacccaaggcccagacacagcagaggtccgtgctggggagggcgggtcgtcctgttatggaacaggggtccaaacaagcttgcttctcagagcatcttctggggaactgaatataaacagaaagggaagaggaggagggacaaaagagacagaaatgagaggggaggggatagaggattcctgaacagagaccgcacccatgacccacgtgaccctgggaaatgcttctatccctgagaggaggctcagcacagaaggaggaaggacagcagggccaacagtcacagcagccctgaccagagcattcctggagctcaagctcctctacaaagaggtggacagagaagacagcagagaccatgggacccccctcagcccctccctgcagattgcatgtcccctggaaggaggtcctgctcacaggtgaggggaggactccctcggagtggatgggaggagggagcacagagactggctagggtctcctggggaggacaaggctctgagaggagacagagggcttttgttgaagcctgaggaaacagaacaccagagagggacaggggtcacaacaggaaagtcacactaaactgggattgataaaaagggaggaaaatcaattgatcatgttttccaagttaatcatcatttgtcattaccatttgaaaaaaaagaaaaatgatagaaatcagaactgcattaggatgacactccaaataaaaatataacaaggaaactaaatgctgcccttactcaccaatcagaagttgaaaaataaccaccagatacactcattaactcatccacaagcatttgcaatcaattttagtcaatggcatacaacaagcatcagacaagtctcagtcatcacagagcttatgctgtcatgaagaggaaaacacacacacaaagagatatagaatgtgaggtcaggtgttgacaagagccctggaaggaacagagcagggaaaggtcagaaagaaaagacccagggtctgtagagggggtgtcagggaagggatctcccaagaatgccctgatgtgagcaggacctgaggccagtggggagggagccatgcagacccctggggaagagcattccacacagggaaatgccaaggtcaaaggtgctgaaggaatgggggtgtcacactgctgactttgactcagtaggacacacacacacacacacacacacacacacacacacacacgctccaacgtggaggggtgaagagacctgctcaggacccagggccctgtttttccaccctaatgcataggtcccaatattgaccgatgctctctcctctctcctagcctcacttctaaccttctggaacccacccaccactgccaagctcactattgaatccacgccgttcaatgtcgcagaggggaaggaggttcttctactcgcccacaacctgccccagaatcgtattggttacagctggtacaaaggcgaaagagtggatggcaacagtctaattgtaggatatgtaataggaactcaacaagctaccccagggcccgcatacagtggtcgagagacaatataccccaatgcatccctgctgatccagaacgtcacccagaatgacacaggattctataccctacaagtcataaagtcagatcttgtgaatgaagaagcaaccggacagttccatgtataccgtgagtatttccacatgacctctgggtgttgggggtcagttctacttcccacatacgggattgtcaggcctgggttgtgcctgtggccctctctgcattacatcctgtatcagggtttggacatttagtgcaggacacacacgggggagacaaacttccacagatcagaattcctttcctggatccagaccctgcagacactcgctgcagaggaaggacagtctgatggggggactcagcagggcgaggtcagtgtcagacaagcaccccatggtctccccatggacctgaccctgagaaagaccctggagaactggatcagggcctggcctgaggggtccccctagggacccctcagagagaagctcaactcttccctgaactgagcccctgtacaaagccctgtccctggttcctgattccaggtgatcctggggagtctgtgccagggctgtgtggtggcctcttgggcagggctggctgggagcaaggatgtgagctatccaagggccatgactcctggagttggtcaccagccaggtccgagcacccagagcctcatctagctgaggatagggcctcctccttcacttgaggctcagcatggaaaggacagatggaaaaaattactagtgcatgagcccactgccctgggggacacaggttactccctgggaagttcagagtccccaaggggaggaacagagaagagaggatgctcctggcagctccatgtccaccagggatcaggcccagggccctctgtcttggaagcaaataatcatagataactgttcacttgggcagctcctctgtgcagagctgagatcaagtaattgtaaatattttgaggttaactcacaaacaac

SEQ ID NO: 8088 - DNA, 6000 bp, Homo sapiens
cctcagcctcccgagtagctgggattacaggtgcccaccaccacatgcagctaattttttgtatttttagtaaaggcagggtttcaccatgttggtcaggctagtctcaaactcctgacctcaggtgatccacccgtctcagcctcccaaagtgctgggattacaggcatgggccacctcgccgggcccatgcccattttcttctgttcccctctccaactttgtgtcctggcttctttcctcaacccccatcctctctctttgccctcccttcccatttccattcctgaccctgtgtccccagattcttccatttctcttttgtatccccactgccttccccaccctccttgatctctccactctccccctgcccctgcccaaattctgccatcacaggccactgttcaggaagaagcatctggggtggcacagggtgaagcttttgggctcctgggtcggcaacaggagggtacagcaccacatcttttttttttttttttgagacggagtctcactctgtcactaggctggagtgcagtggcgcgatcttggctcactgcaacctccacctcccaggttctcctgcctcagcctccggagtagctgggactacaggagcacgccaccatgcccggttaagtggtttttttttttttttttttttgagacggagtcttgctctgttgcccaggctggagtgcagaggtgcgatctcggctcactgcaacttctgcctcccaagttcatgccattcccctgcctcagcctccctagtagctgggactacaggcgcccaccaccacgcctagcaaattttttttgtatttttagtagagacggggtttcactatgttggccaggatggtctcgatctcctgacctcatgatccgcccgcctcggcctcccaaagtgctgggattacaggagtgagccactgcgcctggcccccaccacgtctattctttgccctggttcacatcctatctgacattcttggtgacagttctaatattcattaatttattcatcaattgttcactgggcacctgtcttgaaccagtctgtttcattctaggaacatccatatgcatttactcctgccctcttgtttaattgtcagagcagctccaggagagggtggataattgacattgttcccactacacagagcggggaagctaaggcccagagaggagaagtgacgtgccagggctccgtggcctttggcggcaggcaaatactttgaaccctatccttctccagcagaccacaaggtctgaaatgaaggggaaccagaaagggcaacaggcatgacccagtgtcccagcttctgactccagggatctacaacgtaccccgtgtagggagtgggcccagccaccgagggaggggacaggtccccatcctttgcctcagaggctgacataggtacagactcgctcaccttcccaggctggtctatcctgaagctctgcaggaagtcagaaagggacagaaagaggagaaatgctgagaacccatcatgtgctgggctctgcaccagtggttttcatttccaccctctcatctttccaagtaggcgctacagtcccttttccccacagcgaggctcagggagtttaatcaacatgccccagatcccatactcagtgagctacagatcccagaggcgggatgcaggctcagaacggcaagcacagcgcccttcctgctgtatctcagccagcttccttcctaaggatgctcacgttagctcagcacagctccacctgggtatctcaacgctcattgctttcagctccttgttcatttttttcagcacaaccttagaagagctgtgttaggtttccgggatatggcggtggagtcacacccagtccctgccttcacagcctatcagactaactggtaccagacatccctacattccaccaatatttatttatttatttatttattttaaattttttttttttgagatggaatcttcctctgtcgtccaggttggagtgcagtggcatgatctcggctcactgcaacctctgcctcctgggttcaagcaattctcctgccttagcctcccaagtagctgggattacaggcgcaccaccacacctggctaatttttgtatttttagtagagatggagtttcaccatgttggccatgctggtctcaaactcctgacctcaggtgatccgcccgcctcggcctccccaagtgctgggattacaggcgtgagccatggcgccttgcccaccaatatttactgaaggcttatatgcgccaggcatggttctagaaggtactagggactcagtagggaacagaagagtctggttcctgcctcatcgagacattttagagtctattagttgctgtccaattgaactttctgtatttatgaaaatatcctattacctgcactttccaatatgggagctactaaccacatgtggctgttgagcacttgaatgtgggtagtgcatagtgagtgtgtagtgaggagtgtgaccaaaatttaaattttattttgattaaatttaagctacatgcagccagtggctatcatacagtgcaggacgctgaccctaagcaatcagtgacagctcagtgatcaggcctctgatggaggaagcacaggccgagttttgttgaagggaaaaggtgagggtccagggcatttggagagcccagaggggacgcctaatccagtgtgaatggcttcagggaagtgtggtggatgtcaactgaaagggaatccttcggaccccaagtttatggggacagcctccggcctgacagtgcctctcacacctgctcctggccctggcctcagatcatgacccgcccatcagcggccaacaagaacttcccgtaccacgtgcgcacgtcgcagatcgcttcagccggagtccctggacccggagggagccaatccgctgacaaggccttcccgcagcacgtctatgggaacgtgacgtttatcagcgactcggtgcccaacttcacggagctcttctccatccccccgcccgccacctccgtaagccccgcggccccagcgcccgaggagctgctggcgccgcccctggagtacctgaccccgctcccggccccgccgccgcccccagcgcccggacccctgagccctcctcctgcctttcgcactccccgcgccccaacaccgcgccgcgaccgtcccctggcgcccgcgcccaccctgcctgactgggttctggcgctgttgcgcacacccccgcagactccctgcgccgtgcccccaccgcccgccttccgcggctctcccccagctccccggccgccgccggagttcgccccgcgcgccccgacgccgccctttgagtacctggccccgctgcccaggcgccccgccacccagtccttccctgactgacaacgtgcgtccacacctggggtggaagggttctccgggggagggggacgggccttcggggccgcatctgccccccgagggtcccggacggcctctgaccctgacccccctcccaggccgggaagcaggtggaggagacagcggtggcggcggcggtggccccgaggggccgcgtggtgaccatggccgagccgggcgcagcctcccccccacttcccgctcggttccccaaggcggccgactcgggctgggacggcccgacgccgccctaccagccgctcgtgccccagacggcagcgccgcacaccggcttcaccgaatacttcagcatgcacacggccgggggcactgcacccccggtctgagcacccctgcccgcccctgccccatgggccatgaccgggccccggccgggctccggacccctgctttatcccggcccgagagctcgcccatccccggccttcccgacccttcccaccccgcgcgcccaggttgggtacgctgcgtcccgcccccctcccctctgtgccaaacggtcccgcgggagccgctctccccgtcccctccctcagcccctgccccgagcggcgccggattctgggctcccgctgttccgtgacctccggccccctggcccccttcgagacctctgaccccgctggactccggaacacccgtggtgaccgccgggaccctgcctgtgactctccaggactctgcgaccccgggatggatattgcgatgctggtctcgaccctgaaaccctccctcggatctgtgacctcggacccgtactccatctgccgcatctccattccgggggccttccctcgggtccctggcagaaagacattttaccccttcttgccaaaataaaaaaggattcgtttttatctataacatggcttcttttgcatcttgatggtgttcagcggcggggctgagccagaactatgtcaggctcgggacctcagtgtgtccatctgtgaaatgggaatttggaaccggaggcaggggcctgtataacctgatctttatgttgccccagaatgtgggaacattgaagatgatcaaacatctagcagggtcttgcaccgctcctttatttttgccttcctttcctcactcagaggtagaggcgccctccagtggcccatgctttgctgaaccacaggcacccagagtttgggttacgatcttagcactgcgcatatgtgtatttctctccctccaggaggacgctgctgcgcatgcggttgggaacaaatgggcggggatttccccggaagtctccctttatggagggttggggttgggcgctccgcagtcctcccagggccgctctgaccggccgctctgtaacttctcgcctcctcttcgccgtccctcccacagcggctgctcggctcccgccccctcgccctcccacagcgggtcttcccgcggccgctctggcccaagcgtcccctcgtctctctgatctggcccatccggcttcggagggaggcgagggtgggtgagcaaagggattgggtctgtggggtccaggcccgaacccctgaagacgggctccgcccccggcacccgctcgcgccccgcccccggctggaggagtctctcctggaccatccgaacctagcctgtcccggcccgcagcctctatggaggctcctgccgggccgtagagcccttcgccccctggggacccacccgtctataaggtccgtttggcctgcagcagcctgagtccgtaatgctgggcactgttcatgggatcggccccctatggagccctgtgtctataggggactcctacggtccctagggttcggccccgtccataatgactccatatacagggccttccatcgctctatagggctcagccctcggcttccagagcctgtcagcagtggccgtacccttcgccgggactgccgggtctccgggacctcttcgatctacaaggtcatgttatgcctatagaggtcgcatttgcagggcctcaccccgggtagagggtcctctccaggtttttacggcctgtccccgctctaagggtcagtgcaggaggcggcgatggccctgggcaaggttctggccatggcactggttttggccttggccgtgctggggtcgctgtcccctggggcccgggcgggggactgcaaggggcagcggcaggtgctgcgggaggcgccaggcttcgtgacggatggtgcgggcaactacagcgtcaatggcaactgcgagtggctcatcgagggtgagtggggccgcgtgggtcactcactaattcgctggtagttcattcatgtgtgcattcatccactcaccacattcccagagctcggttctggtccaggccttttgctctaaaatgcctgacacccagggttgcagccaacctgggccctgccctggaaggcctccaagtctggtgggggagatgcacctacacccagatttacaattacaagacaggagcatcagtgccgggccttctgagtaactgttaagaactcagggtctgggtccaatcatttggctttgaatttggttctactactactact

SEQ ID NO: 8089 - DNA, 6000 bp, Homo sapiens
acttcccacagcctcaatcctggtcctctggatgctccaaggctcccaggcagctctctacatccagaagattccagagcagcctcaaaagaaccaggaccttctcctgtcagtccagggtgtcccagacaccttccaggacttcaactggtacctgggggaggagacgtacggaggcacgaggctatttacctacatccctgggatacaacggcctcagagggatggcagtgccatgggacagcgagacatcgtgggcttccccaatggttccatgctgctgcgccgcgcccagcctacagacagtggcacctaccaagtagccattaccatcaactctgaatggactatgaaggccaagactgaggtccaggtagctggtaagtgttagggtctggggatgaggtgaggaagctaatgagccctgagcagctaccatgcaccaggtgctgtgcaaacaccatttcatttggtcctctcatttattcacttgacacatattgagcatctactgtgtaccaatccccagagatagtctttaaccctcacatgcattaactaataaaatatctatgaaatgcccgccttgtgcctgacactggagaatgcaccatctcatttacctttcacatgcactaacattaaccaaatttttatcgagcacttactgtatgcctggttgtgaggaatgcatccctcaatctttatgtttataaagcgagtatttactgatgaatccactcggggcaaagtgtgagggaaagggtggtgggcaataatgacagctggcatttcttgggtgatcgttaagagccaggcaccatcttaaacattttccctaaagcatagtttctcagcttcagcactactgatgttttgtattggccagttcttactagtagagggtttgtgcattgcagagatttcagcagcaccccggcctctactcactaggtaccagtagcagcttcctagtcatgccaaccaaaaatgtcttcagatattaccaaatgtctccaccctgggataagaatcacccctggttgagaaccattactctatatttactcatttttaccttaaaacaactccatgaggccagcgccattattgtctccattttacagattgaaaaatggaggcacgcagtggttatgacttgctgagtaaagaatacgaaccagaatgatgtgacatgggaaaggaggtcatcagggagacctcactcaagaagtgaccttagaggagagaccagaagaaggtgattgagggagggaggtgctgtggccccttgccatttccacaggacacagatccccttagaatttatatgttgaaatcctaacctccaagatgatggtattaaaaggtggggcttgggcctggcacggtggcttacacctgtaatcccagcactttggaaggctgaagtgggtggatcacctgaggtcaggagttcgagatcaccctggccaacatggtaaaaccccgtctctgctaaaaatacaaaaattagctgggcatggtggtagatgcctgtaatgccagccacttgggaggcaggagaatcacttgaacccaggaggcagaggttgcagtgaaccgagatcatgccactgcactccagcctgggcaacagagcaagactccatctcaaaaaaaaaaaaagtggggcttgtgggaggtgattagatcatgagggtacagcacttgtaaatagattgtatgcccttatttttttttttttcaatttaaaagcaagattgtggagacagggtcttactgatattgctcaggctggtctcaaactcctggcctcaagcaatccttccaccttggcctcccagtgctgggattacaagaataagccaccatgcccagtctcagctcactgtaacctccacctcctgggctcaagcgatcctcccacctcagcttcccatgtagctgggactgtaggcgcatgccatcacacccagctaattttttttatttattggtagagactgggtttcaccatgttgcccaggctggtctccaactcctgagctcaggcaatccacccacctcggcctcccaaagtgctgggattacaggcgtgagccaccacccctggcccctagttaaattttaaaatgagttttggacagtgaatagaaaaaattttacagaaatggatgaaataggcaaaagtcaactcaacatatgcattaatttgattacacaaatctgcataaaatgacactctagtccggttggagataacagtccttacttcacttgtggagcctgaagtgacttctccccacatttccggggttcccaggtcacaggtgccccctttggaagctgcacagcatggtcattaaggagttcaggtggcctgggtatgatcccagcactgcacttattgtgagccatcaagcaagtcaatttactgttccatgcctcagtttccttatctgtaaaatggcatagagcttacttctttgttggatcattcagagaacagcgtgtgtgtgtgtgtgtgtgtgtgtgtgtgtgtgtgtgtgtatttcaaacttcataacaaccctaagaactaggtattcatattatcctcatttcacagacgaaccaagtcacagagagattgagtaatttgcccaaggccacaccgccagtgggcagcattaggatcccatagtctatgagcttagctgccaagacgggttgggatagaacagatgtccagcttgagagtaaagctgggaggtcagagggtaagagccaggtaggcgtggtcttaattctagcaagtccagtttaagaatcctccaagtcccctacatctcctgcaaaacacagcccagaacctcatccttctgctgaagggattcaggtatcatcaaccgaagtgagaaaaagcaaagcagattgggtctgggctcggtggccacgtctgtaatcccaacactttgggagaccaaggcagtagaactacttgagtccaggaatttgagaccagcctaagtaatttagtgacaccccttctttacaaaaaatttaaaaattagccaggagtggtagtgtgtgcctgtagtcccagctacttgggggactgaggtgggaggatggcttaagccgaggagttggaggctgcagtgaaccgtgatcatgccactgcattccagcctgggcaacagagtgagacgctgtttcaaaaaaagaaaaaaaaaaatcagtttgatggggtagggttggggagcatgtcagcaagcagattttggatgtgctgaggatcgtatgaaatcctagggaagcagcaacatcgagatataggacagctaaggagttccatctgggacatgttgaaattttttttttaatagagatagggtctcactatgttgcccaggctggtcttgaactcctgggctcaagtgatcctcccccatcggcctcccaaattgctgggattacaggtgtgagcaccacgcccagcccgctgggacatgttggattttatgtgccacccagatggttggatactcagatctgaaaagcaggagaaagctctgggctggaaataggaaactgcacctcagttctccatgcagtcactgatatagtcggtgagggactgggggagccctcaggagacatcgcacagtcccccctctctctttctttctctcacccctcagaaaagaataaggagctgcccagtacacacctgcccaccaacgctgggatcctggcggccaccatcattggatctcttgctgccggggcccttctcatcagctgcattgcctatctcctggtgacaaggaactggaggggccagagccacaggtacagggtccccaagtgtccctctcctgtctgctcccactgtcttctcaagccccatggattcttccacaagtcacatcatccggctcatacacaatctcatcaaatcttggaactcctggggtgaaaagaatctttctatcctgtattaaacagaattctgcattgcaagggacagaaaacctattcttaaactgacttaccaaaaagaaggaattttagtcagggtctcgctctgtcacccaggctggagtgcagtggcacaatcacgactcactgcagcctcaacttccccggactcaggtgagtctttcacctcagcctcccaggtagctgagactacaggtgtgcaccaccaagcctggctaattttttttatttttgtagagatggggttttgcccaggctggtctcgaactcctgggctcaagtgatcctccagctttggcctcccaaagtgctgagaatacaggcatgagccactgttccctgcccaaaaaacaaggaattgtttaatactacataacttattcaggtaggctgcatccaggggctcaatgttctcaaatgactcctttatatactcgtcaactctgtatttttcttcggtggcttcattctcaggcaggctctcccctgttgccacaagatcactcccagggggcccaggctcatactccactggtttagccattcctagcaaggagaccaccttgttcctggtagttccaacaagagccccaagtctacctctcattggcttaactcagatcacatgacttttcatgaaccaatcactgtggccaggggttggtggccagggaaagctctgattggccaaagttgggctatttgtgcagccccagagactgggctagatccaactccgtttaatcaagtggattgagagtgtagaccggctctccaaaggaaaacaaaactggttgctattgtcaaagaaggggagtgggcagcagcaggcacagctatcagatgctacctacttgtatggagagagagagagagagagagagaggagagagaggagagagagacagtcctgtttcccccagggagagtctattcgtgaaaaattcctttcttatgacatcagcgtcttcagaactttgtctcttgaaattgattctgaactgattgtagataagatgtctaatttttctgccactcaccagttcccagaatatgaaagcagcaattttgtctcctttctcaactcttccttatgtgccatggattctgttttcttcttcttcttttttttttttgagacagagtcttgctgcagtgtagtggcgcaatcttggctcactgcaacctccacctccgggactcaagcaattctcgtgcctcagcctcccaagtagctgagactacaggcgtgcaccacaacgcccggctaattttttgtattttagtagagatggggtttcaccatgttgccctggatggtctcaaactcctgatctcaggcaatccgccagcctcggcctcccaaagtgctggaattacaggcatgagccactgcgcctggcctatttctttttcttttttaaagagacagggtcttgctttatcacccaggctggagtgcagtggcatgatcatagtttactgcagcctcagactcctgggctcaagtgatcctcccacctcagcctcctgggtaactgggaccacaggcctgtgctaccacacctggctaattatctgtattattattttttgtagagatggggtcttgctatgttgcccaagctgacctcaaactcctggccttaagcggtccttctgcctcagcctcccaaagtgctcgaattacaggcatgcatcaccatgcctagcttattttttactttttgtaaaaataagatctccctgtgttgccctggctgtcttgaattgctgggctcaagccatcctcccatctcagccccccaagtagctgggactacaggagtgcaccatttccaagcttttttttcttcttcttcttgttttgctcttgtcgcccaggctggaatccagtggcgcgatctcggctcactgcaacttccgcctcaggggttcaagcgattttcctgcctcagcttcctgagtagctggaattacaggcacccaccacctcgcctggctaatttttgt

SEQ ID NO: 8090 - DNA, 6000 bp, Homo sapiens
gcccactcattcgtaggccaggagaaaggaggtgctagaggccttcctagaagaagacttcctggggactggttcttttgttcaatggataaacgggggtcccaggattttgcaaagcaagttagtagcaaggctggcactaaaacccagaggtcctggtccacaaacctggcctcagattggggagagaaggtcagagagatctaaagcacatttattgccaggcgcgatggctcacacctgtaatcccagcactttgggaggctgaggtgagaggatcacttgagggcaggagttcaagaccagcctgggcaacaaagcgagaatcaaattctacaaaacatttaaaaatgcaccgagcagccgggcacagtggctcacgcctgtaatcccagcactttgggaggccgaggcaggtggagcacgaggtcaggagatcgagaccatcctggctaagaccatgaaacctcgtctctactaaaaatacaaaaaatcagctgggcgtggtggcaggcacctgtagtcccagctactcgagaggctgaggcaggagaatggcatgaacctgggaggcggagcttgcactgagccaagatcgcgccactgcactccagcctgggcgacagagcagagactgtctcaaaaaaaaaaaatgcaccgagcatagtggcacatgcctgtagtcccagctactcaggaggctgaggcagaggatcccttgggctgggaagtttgaggttagagggagccaagatctgcactccaacctgggcgacaaagcacaaccctgcctcaaaattaaatacataaataaattaagcacatttatttattttactgttttattttattattatatatattttaagagacggggctctaccatgttgccaggcgtgtcttgaacccctaaattcaagtgatctgccagccttggcctcccaaagtgctgggattgcagacatgagccactgcgcaaggcctatttgtgtatttatttattttagagacaaaatctctctgtctcccaggctggagtgcagtggctcaatcacagctcactgcagcctcaacctccctgggctcaggtgatcctcccacctcggcctcccgagtagctgtagctgctatgcatttattatgtgtgcgcctatttgtccagccatcctcacacccagtttgtgccaagcctgagacacaagctatctggagctcacatggcatggaggttaaaagcacagactggccgggtgcagtagctcacccctgtaatcccagcactttgggaggctaatgcaggcagatcacaaggtcaggagttcgagaccagcctgaccaacatggtgaaagcccgtcactactaaaaatacaaaaattagccgggcgtggtggtgcgtgcctgtaatcccagctactcaggaggctgaggcaggagaatcactcaaacctggggggcggaggttgcagcgagccgagattgattgcgccactgcactccagccttggcaacagagccagactccgtctcaaaaacaaaaagagcacagaccatccgggcccaaaagaagcacccggcctgctatgtgtctttgctgggtggcttggggcaaacaaccaccctgtgcctcagtttacttttcagtgaaatggggatcaccatggtgtccccttcatgggatccctgtgaggaactaactaagagaaataaggtgcttagaagagtcagctctggctctgccattttgtttatttttatttatttttaatttctattttattttatgtttttcagactgagtctcactctgttgcccaggctggagtgcagtggtgcgatctcggctcactgcaacctccaactcccgggttcaagcgattctcctgcctcagcctcccaagtagagacagggtttcaccatgtcggccaggctggtctcgaactcctgaactcaagtgatccacccgcctcagcctcccaaagtgctgggattacaggcgtcagccagggcgccccgccctggctctgccattttgtaactcagtgagtcacttcatctctctgcttcagtttccctatcgcccatggcgctgcatggcttacatgagataatattcgcagtgcacttagatcagtgcctggcacacggtaagtgctgactacatgtattaacagtatcgtaagtgccgggcgcggtggctcacacctgcaatcccagcattttgggaggctgaagcgggtggatcaggaggtcaggagtttgagaccagcctgaccaacatggtgaaaccccgtctctactaaaaatacaaaaattagccgggcgtggtggcgcgcgcctgtaatcccagctactcaggaggctgactcaggagaatcgcttgaacccaggaggcagaggttgcagtgagccgagatcgcgccactgccctccagcctgggcgacagagcgagactccgtctcaaagaaaaaaaaaaaaaaaggatcataactaagactcgaatgcggagggataacagcctctgctacttgaaacctagtccttctggggaggaaagcccaggtgtgtggcaggtggaagggagggcgagcctaggtggtcctcttgctagggcaagaagcccccaagcacctgcccccagctgagcagctccgcgcctcctggccctggacgaacttgggcccagactggcgctccgtggcaccccctcccccggcctcccgcttcgcgccctcatcccgccccccggcgcggcctcaccagctccccctgggcagcccaaagaatgcgaagaggtaggtgggggtagggaggagggcgagccgctgggagagacaaagggcccgagtctgagcgagagacacaaagacgcgaggaggctggggagataggggaagtgggacaaggacgcggggagtgaccaggtccggaggccggactggagcccagccccacccagcccggccgggccagcgcagcgcgggggccggtctctgctgccccctggcgggtggctgcggtgagaaggcggcgcggagcaggtgttgggaggggaggaccagggcgcgcagggaggtagggagggaaggaagcagagaacagagcagggacagagagacagcgagagagactcgcacgcagagacaagagacgccgagagggagacacagagaaagagacagggacagagagacacagatagagacagagagagacacacggagagacagagacagagaagcacagagatagagaggcacagagatagagacagagaaacacagagacagagaggcacacagagacagagaggcacagagacaggccgatagagacagagatacacagaaatagagacagagacagagaggcacacagatagagacagagagacacagagacagagtcaaaggatggaaagagacatggggaccaagtgacccagaaacagtgacagacaggccgggcttggtggctcacgcctgtaatcccagcatcttgggaggccgagccgggaggatcgcttgaggccagcctcagcaacatagtgagaccccgccgcccccccgccccgtctcttttattgaaataaagaaacagtgactgacaaaggaagaccagaaacagagcgacaccgaagcatgaggacggaaagacccagagaggcagaaatacagggacagagaggaagacccaaagagagtgagagagacacaaagacacgtaagagagacagagaaatccagaaagaaacgagtgcagcgacacctagagttcggggcagagattagaaacgcacgagggtacgagaaacaggctcagggcgatgggctcgacctgcggggaggtcgcacaaccgggacgtgctgggggcagaaccgtaaagccccacgtgcctcaggcaactgtgatgagaggacccgggcaggcaggaaagggcaggattcgaactgtgggtgggacagaggccaggacggactgagctaagagaccgagagaactccggctagggcgaggggcggggctggtggaggcggggctggtgggggcggagtcggccggaagggccgaaaggggcgtggcaagaccttggcgaggcggccggtaggcagggggcggggcgtgggaactactcgggagcagagggggcgtggctagaccttagggggcgtggtttaacgccgggagcgaaggagacagaattctttggcaggggcgaccttagaatcctggggaggagcgagaatggaatcccggggaggaacaggggtggaatccggggggcggggtcagaacgccaggagggggcggggccggagccagggtcggcttgactcgggggagcagcgggtggatcctgtgacgtcagcgggttcgaaccgccggagctgagcgagaggccgggggtgccgagccgggcggggagagctgggccgggagagcagaacagggaggctagagcgcagcgggaaccggcccggagccggagccggagccccacaggcacctactaaaccgcccagccgatcggcccccacagagtggcccgcgggcctccggccgggcccagtcccctcccgggccctccatggcccgggccgctgccctcctgccgtcgagatcgccgccgacgccgctgctgtggccgctgctgctgctgctgctcctggaaaccggtgagacgagcggacggccccctgccctcgcgcggaccccctccaaccttaccttccgagctggggaagccgagcaccttccccgcccacccccggctccccgagccccctctcgcgtgcccccttcctggctggccccacagactccgaccccctacacgtccgattctctcgaggagactctgacccctcctttctgcatctctctcaccaccacccccatccttcttaatccaattgcccatcctacgcctgcttgtctgtccccctccccatttctcggattcccgcgccgaaagggttaaatcccaggaaggcctggtgccccctccccaccccgcgccgagtagttcacccggatctgggtctctgtctcctctacccctctcaggaatgtggggaatgttccccccacctaccgcagtaaggtctcgaggaagaggcgagaccacctccctcccctatttttccttcttcccggcttgggcgtctgaggcccggagagaactgaggacaagcggacctgattcgggtcccttggagggctaaggataagagttctggcgacttagggggaagggcctgagctcggagctccaaccccgaacctcagggagttgggggttctgactccgtggactccagaaaaattaggggccgggggctccgtcttcagggtccctggtagaatggaggctaggcgctaagtctaactgggatctaggtaaaactgggggcgagagaggatcaaacttgtagcttctggatttaattgtgggcagggggcttcgttttcagggttcccggcagaaccgggggacaggagactcgatctcgtgggcttcagacttaattgtaggcagaggaacgtcttctgagatccaaacagaagtgcgagcagcgggccccgtctcttgggctccagatatgatcaagggtcgaaggctctgtcttgaggctggagtctcagtcgcctgagtcccagatagaacgggaggccccgagtcccagaggctgggagactcctccctttccctatgaatggtcgggggcgacggagacgtcgccggggaagttttcctggtttcactctcgccgagccagggaggggcggggcgggcgctcctggctccgggttccggactccccggtttcgggaccttatctatcctctggtagcgcctttgtcctcagagccatagcaggaggtggacgagtggagccgccgcccttatcccccgtccctcccattgctatgccttggaccccctggcgtccttccatccaccccactaggggaggagagcggcccccctggggaggg

SEQ ID NO: 8091 - DNA, 6000 bp, Homo sapiens
atttactgaaaaggaaagtactggagtgtgcaggaggtgggagggaatcaatagtttcgttttgggcgtgttaagtttgagatgtcaattatacagccaaaggcagaggttaagttgtccttcactgcaaggagacctgggaaatgaatcttcctgagtccgcagttcaggggaaagtttgaggctaggcatataaattggtaagtcaacagtattgtagattgcgatgaacactatggcactgcatgatatcatctcgtgagtgagtgtagctagaaagggctaggactccccaaattttagaagctagaaaaaggacgatccaatgaagattgaggagaaccagccagtgaagaaggaaggaggaaaagcaagagggaatttgccagtaaaggaggaggggatcaggtgaattcaatgggtagaattgctgttctcaaacgttagtgcacatcagtcaccaggaaggcttgttaaaacacagactgccaggccaggtgcagtggcttgcctgtaatcccaggactttgggaggccaaggtgggcagatcacctgaggtcaggagttcaagaccagcctggccaacatggtgaaaccctgtctctactaaaaatacaaaaattagctgggcatgatggtgggtgtctgtaatcccagctactcaggaggctgaggcgggagaatcgcttgaacccgggaagcagaggttgcagtgagccgaggttgtgccattgcactccagcctgggcaatagagtgagacaaaaaaaaaacacaaaaaaaaaaacagattgccaggcccgcccccagagtttctgattgagcaggtatattcgcttcccgagactgctgtataaattactacaaacttggtggcttaaagcaacaaaaatatattatctcacagttctggatgccaaaagtccgaaattaaggtgtcagcacgccacttccttcaaaggctcagaggacaatccttccttgactcttcagtttctggtagctcctggtgttccacttttttttcccctgtagggtcttgctctgtcatccaggctggagtgcagtggtgcaatcacggctcactgcaacttcgatctcccaggctcaagcagtcctcccacctcagcctcctgagtagctgggactgtaggtacataccacaaagcccagctaatttttttgttaatttttgtagacagggtctcactatgttgcccaggctggtctcgaactcctgggctcatgtgatcctcctgcctcagcctcccaaagtgctggaattacaggcatgagccacctcacctggcccataataatgttttgatatatatagtgtatgcagtaacaggtattctatttgtagttgttaggatgtttaaggttagctgatttaacaaacaaccgtaaaatcttagtagcttaatacaacaggttgttacttacataaagtccaaaatgctttatgtaagtccaaggataattctcagcttcctgcagccagtgagtgaagggagaaagagtaaggattatggaggacatttcaggctgagtctagaaatgggctgtgtcccttctgcacccattccattggcccaagaccagtcacatggcctcaacttcactgcaaggagacctgggaaatgaagtcctcctgtgtgcctaggaaagaagaaaccaagttggtgagcatcaaagctgcagtgagccgtgattgcaccactgcactctgccacctacccttcgacttctggttaatcatgtactcatctctgaggagggatcagtgggtgggaaggagggattggtgtattagtctcctatggctgaaatagcaaattaccacagacttactacttagaacaacagaaatgtattctcacatggttctgtaggccagaagtccaaaatcaaggtgtcaccagggccacactccctccagaggctctgagagaaaatcagttctttgcatcttccatctcctggtggctccaggagttccttggcttgtggctgtagaactccaatttctgtgtctaccatcacatggtgctctcctcttctgtgtcttctcctctgtgtgtttcttagaaggacacttgtcagccgggtgcggtggctcacgcctgtaatcccagaactttgggaagctgaagtgggtggatcacgaggtcaggaattcaagaccagcctggccaagatggtgaaaccccatctctactaaaaatactaaaatcagctgggtgtgctggcaggcgcctgcctgtaatcacatttactcgggaggctgaggcagagaattgcttgaacctgggaggcggaggttgcagtgagccgagatcacaccacagcactccagcctgggtgacagagcgaggctctgtctcaaaaacaaaaacaaaaaacagacacttgtcatcagatttaggggtcacacagataatgcagtatcttgagatcctgaatgtaattatacccgcaaaacccttttttccaaataaggtcaccacaagttctggggattaggacatagacatatctttttggagaacgccatgcaacccactataatcagctataattatttttgtagaaaatgatgggaacctgacttaggatggtggccttggaaagaagtggctgggtttgcaatgtactttaatggtagagcagagaggcgttggtggtggttagaaacagaagctgaggggctgggcgcagtggcttacacctgtaatgtcagcactttgggaggccaaggcagttggatcacttgaggtcaggagttcaacaccagcctggccaacatggtgaaaccctgtctgtactaaaaatacaaaaattagtcaggtatggtggtgcatgcctgtaatcccagctactctggaggctgagacaggagaattgcttgaacgcaggaggcagaggttgcagtgagccataatcgtgccactgcactccagcctggtcaacagagtgagactccatctcaaaacaaacaaacaacaacaacaacaaaaacctgggtgtggtggctcatgcctgtaatcccagcacttggggaggccgaggtgagcggatcacttgaggtcaggagttcgaggtcagcctggccaacatggtgaaaccccgtctctaccaaaaatacaaaaattagccgggcgtagtgggtcatgcctgtaatcccagctacttgggagaatgaggcaggagaatcgcttgaacccaggaggcggaggttgcagtcagctgattgcaccactgtactccagcctgggcgaagagtgagactctgtctcaacaaccaccaaaaaaataaaagctgagggatgaggcaggtggtgactcagcgtttggatacagaactgtgtggctcaggactgggtttcaaaaagacccctctggggctatgtgggggacagactggagggagaaactagaagccagggagaagcctaaagtcagggtccaggtaggagagcaggagcccagagcctgcctgagccctcaggacagagaagaggggtggagtggagactcagcaggcaggagggatctggctaagagactgatgcgctgttggggaagaggggacaagatggagctttgacctcatgactagatagatggtggggctgcctcagatgaggaaaccaggtgagagaatttggggacatcagaggaaactgcagaggccactgggtgtgcacctgcaaccaggcactgcagacccagatctgactgtcaggatcccaggctcagtgcctcctcctctggggcctccgctcctcgggccccactgcagaggcaggaagtaccgcctgatgctcagcttccgctgggggtgttggcacggcccagcgccctccccactcccagggaccttcccacctcgagcctgtagcactttcacttccccaggtacccagcccctgcccccagcacctgggtgctccctggtccagaacaggctgcagactctgagaggcacaaaaacaagtggggaagggggagacagagaaaagaagacaggctgggcacagtggctcacgcccataatcccagcactttaggaggccaaggcaggaggatcacttgagcccagaaatttgagaccagcctaggcaacacagtgagactcccatctctacaaaaaatgaagaaaattagccaggcatggtggtgtgcacctgtagtcccagctacttgggaggctgaggtgcaaggattgctcgagcctgggaaggttggggctgcagtgagctatgatcgcactactgcattccagcctgggcgaccctgtctcaaaaacaaaaacaaaagagagatgaagagagaaaggaggaaggacccaaagaaggggccagaagcagagagaggccaggcacagtggctcacgcctgtaatcccaacactttgggaggccaaggcaggagggtcgcttgagtccaggagttccagaccagcctgggcaacctagtgagaccctatctctgtttttttttaattaaatataaaaaatacaacactcccactccatagcaagaccccatttctacaaaaaatacaaaaattagccaggcatggtagtgtgcacctgtaatcccagctactcagaaggcagaggtgggaggatagcttgagcccaggctacagtgagctgttttccccaccgtactccagcctgggtgaaaagtgagaccctgtctcaaaaagaaacaaatatataaataaaataaagaaacacagagagagggaggatagagaccccaggaggcaggaggacagagacccagaggagggagagactctgctgagataaggggacagagatggggagtagcaggaaggtggggacaaagacccagagaggaggaacaagagacccagggcaggaaatgggagacacagctggatgcagagatgggagagcttagcaggccatgaggtcagagtgtctgtgaggtcagctgctgtccagggtcagccctgaggtccccatgcccagaggtgggttccagtagatcaggggtccctttagatcccccagcgcctgagacatggagacctgggagggactgccccatgagtccttggtgcccacaaattccaaggcccctcaggtaccagagcatgtgtcccagtggagcaggtgagggagacagggacagagagagagacagaaagccaccttacatgaagcgggagtgggtggagccccacccctggaacttcctcttttggggttcttcctttctctctcagctctccgtctctctttctctctcagcctctttctttctccctgtctcccccactgtcagcacctcttctgtgtggtgagtggaccgcttaccccactaggtgaagatgtcagcccaggagagctgcctcagcctcatcaagtacttcctcttcgttttcaacctcttcttcttcgtgagttgcctcatggctacccagccggggcccagcccctgccgctaacccagccctcatcttcccctgtggcccacccccgtatccgcatctcctctccccaggtcctcggcagcctgatcttctgcttcggcatctggatcctcattgacaagaccagcttcgtgtcctttgtgggtgaggggggctggggcaggtgggagggcctcccccaacccaagcaacttcctggggtctcccttgtctcagggagacctacggtgccctactctgcaggcaggctacaggctcccatccactgctcaccggaggcttcttggagcctgagtcttcttccggcaaatggggttgtgcatacaaacaacaatgatcatgagagccatttctcaagcacttcctatctgtcgggacttgtggctggtcagatgcccccacaaaccttcccctcgcttgaggttcagagaggggaagccccttgatggatgtcatacagcaaggacgtaaaagagccaaaataacattaataataggaaaataataatgaagtatgaccctaaataa

SEQ ID NO: 8092 - DNA, 6000 bp, Homo sapiens
tagtgtggacttcaggacattgtagctgtcctgggggagcccaggtgacagtctaagggggttctaatagagccctggggacatgacagcaggatcccagggggagagagggtgtagtcagggctcattagaacagagccctgaggatctgatgcaagtcaaccagctgatgctataaatgggctccagagacattgcaggaacccagggcatctgcaagggtttcccaggtggcactaagggaccttgaggcctttttctttttctttttctttttctttagggtctcgctcagtcatccaggttggagtgctgtgatgcaatcatggctcactgcaacgttgactgagacctttttcttccgtgacaggaaggagggctatgatggggaatgtctaggcagacccctgggaggcctcctggttaaagccccaggccattacaacagcaaggagaggagatcagaatggggcaaggaaagacactccagatgaccacggccagctgaatcatggcctcagagacgtccatgccctaatcccccaaaacctctggctgtggccttatatgggaaaagggactttgtgatgtgattaggttaggttcagatggggagacgatctcggattatccaagtagccctaaacataatcacaggactcctttggagagggaggcaggcgggttggtgtcggagagagaagacgtgaggaccgacatatgggtcagagaggggagaggatgccgtgctgctggccttgaagatggaggactgggccatgagccaaggaatgctggtagcttctagaagctgggaaaggcaaaaacaccgattcttccctggagcctccagaaagaacacaaaattgttgggtgcggtggttcacgcctgtaatcccaacactttgggaggccgaggcgggtggatcacgaggtcaggagttcgagaccagcctggccaatatggtgaaacgccgtctctactaaaaatacaaaaattagccgggtgtggtggcgggtgcctgtaatcccagctactcaggaggctgaggcaggagaatctcttgaacccgggaggcggaggttgcagtgagccgagttcgcaccagtgcactccaagctgggcaacagagccagactccatctaaaaaaaaaaaaaaaaaggaacacaaaacctgtgagtatcataggtggtccaaggagctttacgaatgtcctggtaatgttacagcagggccctgggggtggggacgtgagagctaaggctgggttatagaggaccccacagtgatggtagtcagacttccaggaaaagcatagcaggctcctgagggacactgtaacagggcattgaggattctgtcagggtccaaggaaccttaaaatggggcccaggggctgctggaatagtgtcctgaagacattacatgatcccaaggaaactagaggggacagctaaggacagggcagttgcctcagggtattttggggaagagctgagggtgctgtaattaggattcttaagaaattaaagcaggtggccaggcgcagtggctcacacctgtaattcccagcactttgggaggccgagtcgggcggatcacgaggtcaggagatcgagaccatcctggctaacacggtgaaaccctgtctctactaaaaatataaaaattagccaggcgtggtggcaggctcacgtagtcccagttactcgggaggctgaggcaggagaatggcgtgaacctgggaggcgcagcttgcagtgagccgagactgcaccactgccctccagcctgggcgacagagcaagactctgtctcaaaaaataaaaaaaagaaaagaaaagaagaaaagaagaagttaaagcaggttctttctgtctcttaggagtggaccttgggatgggtgtcactggatctcccttctagtaggacacagggagaatcaggtaggacacagtaggacacaggcagaatgagaaaaatgaagacattctggacaaggagaacagagatttacctggttaattttatgtgtcaatttggctgagccacagtgagtgaagagatattcggtcaacattattctggatgtctctatgagggtgttttaggatgagatttacatatatatttgtgagacagggtcttgctgctgcccaggctggagtgcagtggcgccatcacggctcactgcagcctccaactcttgggctcaaggggtcccccagcttcagcctcttgagtagctgggaccacaagtgcgcaccaccacacccggctaatattttaattttttgtagagataagctctctctgttactcaggctggtccttgaactcaagcgatcctcctgccttggcctaccaaagtgctgggattacaggcatgagccactgtgcccagctgagatttatgtttagattgttaggctttgagtaaaggaggttccccttcctgaattgagggaggctcatccaaccacttgaaaccctgaatagaagaaaagtctcggctgggtgcggtggctcacgcctataatcccagcactttggaaggctgaggcgggcagatcacgaggtcaagagatcgaggccatcctggccaacatggtgaaatccccgtctctactaaaaatacaaaaattaaccgggtgtggtggcaggtgcctgtaatcccagctacttgggaggctgaggcaggagaatcgcttgaacccgggaggcggaggttgcagtgagccaagatcgggccattgcgctccagcctgatggcagagcgagactgcgtctcaaaaaaaaaaaaaagaagaaaagtctgcccagagggagagggagtcctgctaggcaattgtgtctcccacctgctggctcccccattagactttggggtttctttctttctttctttcttttttttgagatggagtcttgctctgtcgcccaggctggagggcagtggcgggatctcagctcactgcaagctccgcctcccgggttcacgccattctcttgcctcagcctcctgagtaactgggactacaggcgcctgccaccatgcctcgctaatttttttatatttttagtagggatggggtttcaccatgacctcgtgatctgcccgccttggcctcccaaagtgctgggattacaggcttgagccaccgcgtccaacatttttgaaattttttttaaaaatagagacagggtctccctatgttggccaggttggtctcaaactcctggactcaagcgatcctcccaacttggcctcccaaagtgctgggatgacaggcatgcaccaccacacctggcccccgcatcagactctgaaccagctgaacgtccactaatcctggaagccaattcctcaaatgaatctctttctgtgtatgcatatacacattctgtggattctgtttctctagagaacctgaactacctgaccagcagttccactcccagatgtatgctcaatagagctgaaaacaggccaggcatgggtgtcttgcacctgtcatcccagtgctttgggaggccaaggtgggaggctgtcttgagcccagcagtttgagaccagcctgggaaacatagcaagacactatctctgcaaaaatacaaaaattagctgggcctggtggcaagtgtgtgtaattccagctccttgagaggctaaggcaggtggagtgcttgagcttgggaggttgaggctgcagtgagccatgatcgctccacggcattctagcttgagtgacagagccagaccctgtcaaaaaaaaggaaaggaaggaaggaaggaaggaaggaaggaaggaaggaaggaaggaaggaaggaggcaaggaaggaaggaggcaaggaaggaaggaaggaaggaggcaaggaaggaaggaaggaaagacttcatattatatgattcaatttctttgaaatgtgcagaataggcaaatctatcaagacagaaagcagatgaatggttgccaggggtctgggagcagcggctgtttaacggggacagaccttctgtttggggtgataaaaaagctctggaactcggatagaggtgacagttgcacagcactgtaaatgtgttaaatgacagtaagggtaaatattttgaatattttaccacaatgaaataagtgtatgggaagctttgtagcaggagtgtgggcgggggctggtgcctggaggggccttcgagtgaggcagcattgtatggggaccatgtggtcactgaagtcctagcagaaggatgtggtttttttttttttttgagacggagtctcgctctgttgccagtctggagtgcagtggtgcaatctcggctcactgcgacctccacctcccgggttcaagcaattctcctgtctcagcctcccgagtagctgggaccacaggcccaccaccacgctcagctaatttttgtattattagtagagacgggggtgtcaccatattggccaggctggtctcgaactcctgacctcgtgatccgcccgccttggcctcccaaagtgctgggattacaggcgtgagtcactgcgcccggcccgcagaaggatattaaagagcacctgcaggaattttttaaggggatgccgggggaagggcttgaaggaggaactaaggaggcttccagaagattttgattaacagcgagcgctagggaaggccacggggatacagaggggtaggaggaggatccagagacctccaagttgtggactccggaggcatcgagttcctttcccagttttgtcaagaattccctgagcggcagacaccctcaaagtaaaaaacgggaaccacagagaaggaaaaagaagaaccacaagcgttttgagaaacaaacaggctgggcctagggcctggggtgtgccctgcaactggggggtggggctggatgttcttggagtcagggagcagcagcctcccacaggatgtgagagaggaactggggtctccagtcacgggagccaggagccggccagggccgcaggcaggaagggagcgaggctgaagggaacgtgagccgaccagggcccgactgagggaggaggggctgggggcctggaaccctgggtctgagggaggagtggctgggggtctcgacactgggtctgagggaggaggggtgggggcctggattcctgggtctgagagaggagggactgggggtctggacgctgggtctgagggaggagggaggaggggccgggggggcctggactcctgggtccgagggaggaggggttgggggcccggactcctgggtccgagggtagagcggttgggggcccggactcctgggtccgagggtagagcggttgggggcccggactcctgggtccgagggaagagcggttgggggcctggactccggggtctgagggaggaggggctggggcctgaggggggcggaaggggcgtggcggagctcggggccgggactctcagcctatcaagtgtctgtaattaattaaccaactgagatccagttcaggggtgaaagttcttcaggtacgaggagggcattgttgtcagtctggaccgagcccgcagagcccctcctcggcgtcctggtcccggccgtgcccgcggtgtcccgggaggaaggggcgggccgggggtcgggaggagtcacgtgccccctcccgccccaggtcgtcctctcagcatgggggtcccgcggcctcagccctgggcgctggggctcctgctctttctccttcctgggagcctgggcgcaggtgagggccgctccgggccagggccctgctgcaggcgggcggcgggaggcggccccaggcaggcaggggcgaagccagcgggacccgagttccccgcgagcccctggcgctgccttctccgctcaattaactttctcaacgtctcctgctgggcctgaggctgggaaccacctgtcgcctcttgtgtctgtttccctctctctctctgggtctctgtccccctctctttctgggtctcttgtctctctct

SEQ ID NO: 8093 - DNA, 6000 bp, Homo sapiens
agggtggcagctagggcggggagtgtagattggggggggagtggtgggggaggaatggtggcagcgggggtaggggatgggggcagccggggtgggggatgggggcagctggcgggggcgagcacctctgcctattcccgggtccccaagcccctcagccccatgcctgtctacacagcaggattgcttgagcattcaccggaagttatgggcctggggacccaggctgaaaccctgccctcctggtgcttccactctagacaagggggtcagtgacatggtgatgccagttggaggtgacctctgtcaggctgggagcagggcagacaggtgttggtgtaggtgggctccagggcaagaggcagcccccagtagagtgcacggggttttctagcccagctgggaggcatgagaggagaaaggcagctttttgttttctgctcccctttctttttcctcctgagcacttggcaggagctgccatcacctgagatcagggggcttccgggggagctgggggggcttctcggagacagggtctgggcagagatccagtgtggtgggtctgagcaggcaggaggatggaaggcttggagcctggagtcgccgggagtggtctgggttggaaaagtgggtcccggccgatgggtgcgagggtgggtggcactcagggtagtcatggaatgtggaccctgggacacccacgagcctgtgacagcagcagttgtcaactgggcagttttactgccccctccgctccccgcccccccccaggacgtttgccaccgtctgtggaaacatttgtggttgtcactccggagaaggggtggtcctggcatctggtaggtaggggccagggggctggtaaatgtcctgcagccacaggaccaccccctacaaagactcatgcagcccccgggaccacggcactagctgggaaacggatactggagagggaggaggagtcctcgggcgttggtgactttgtctcatcttcatgtgctggagggtatggggggaggagaggaagtggagacagcaggctggaccattgtgtttcactggaacgtttgcctgaggaggaagtgggcttgggagaggttttcttttttatgaaagaagcaatcactgcattgctgatgggaatcatcctgatggagaaatccaagggcaagggacagcagctgggctctactcctgagtgagtctagtgggcttgggggtgtccatgtggtgctgtcccttggcagggtcagggcagctgctagggtgggaccagcagttggggtctgcagcgtggagatgggcaggaagctggagcccggctcatcgtcgcatagcctgcctgcacccgccccccgccaccacctcctggtgggttccgccctcatgccccacctctccctgcagcgggacctggacttcaccatcgacctggacttcaagggccagctgtgcgagctgtcctgctccaccgactaccggatgcgctgaggcccggctctcccgccctgcacgagcccaggggctgagcgttcctaggcggtttcggggctcccccttcctctccctccctcccgcagaagggggttttaggggcctgggctggggggatggggagggcacatcgtgactgtgtttttcataacttatgtttttatatggttgcatttacgccaataaatcctcagctggggtctggctttgtttcctgggggcaaaggaggtttggggttcctttcgcaggtactgcagtgccagcctcagcagtggggggaccggccttggcacctgctggtggctgccattctgtggatctgcgtctcccgtcccccgtctctaggcctcttgctccccttccttggttccttctcggggtccctgtcctccacagctgtctctcagggtctttgtccaactcttttcatccctctcctgggtctgcgcccctcccctctgcggtacccgtgtcctgcctagtaggggatgggggtggctttccagcacagccagccctcaagtttcccagaacagtctccccacctccccccaacactcgacattgttcctctctggctgttttttcctgttcgggtcccttcaaggcccaactgtgcccagccctctgcagctggggacactgagtgggttgggggtgtatgtttgcaaggatagaatttctcatgggggagtggccctgcttcctcccctagaatggcttggggcttagggctggggacttgccctccatggaggtcagtgggagttgcagctgtaaggtggcagggcctacccatcttacagaggtgaagacgaggtccctctgcctctgctgcagacatggcgtctgcacccacccttccaccctcagggcctggccacggggtcctgggtcccccacaatactgtgcactcgacctggttgacccaggacaccctcctcgttgaacagccctggctacacctgcttcagtgcaactggagccctcaccggcgagtgcctgacacctcggccttttctcttccggaggggcgctcctcagtgtgtttggggtctccctcgctccacgccctccagggggccgcatgtgcacttgccctgcattgcctggcccccgaggttccagggtcccaactgtctactaaccggcttcccgacagggtgagggtgaggtcgcatctacaaccagagccagcgcttccccgccgccaccccttttcttggaatcccgctgcttagctacctgcgggtgtcattggccccgccccatttccccacgctttgaagggggcgagtctccacagacctcctagggggatagacagcagctggtgtgaccccacacacccagtgaggtctctggagccgcggtgcgggaagcggggacccgggtttgaatcctgcccctctggtgtggtgcggcctcttcccacagacttttggcctcagtgttccccgcctgggaagtggggactggccctggtacctggctccagagctgcacccagaggcgatcagcccggtgcgggaacggggcggggtggccgcaactacgggccacggatcctgacccgccctgcccacgatgactatccacatcctcatcctgctgttgctcctcgccttctccgcccaaggggacctggacactgcagccaggtgagaaacccgggtggcagcagggacagggcgggagggagaccgtaaagggcgagcgccctctcccggccgcggaacgggcaggtgatctgtaagcctccccgctggtcttggagtgcttgggtgcccacctccatcacgctccatctctcaattcggtttgaacccggttttctcccacgctccctctccaggcgaggccagcaccaggtcccccagcaccgcgggcacgtctgctacctgggcgtatgccggacccaccgcctggcggagatcatatactggattcgctgtctccaccaaggagccctcggggaaggccagccacgagccccaggacccctacagctatgggcgccgccggtggcgcgaggcggaagcccggctcggttcccaggattccggcctgcagcgagggggctagcgcagtgcccagctcgctgggtgacctcgggcacggctcgtcccctcctcggcttcagtttgcctatctgtatgttggagcttctactccacatttcttctcccctaactccagcccctgaaaccgtcttccccagtccctccccgggctgcgactaggttggacctagaagcacacgggaccaggctgggcgaagaacactgacgcccagagccgaataaacaagagttccgtgtttcagtctctgcttctctgtacctatttcgacctctcagtcgaggctgggtctctaatatacctttctctattagccatgctgcttctccctcacggaagtcccactgtctaccttgaatccaacccgctgtggcgcctttcttgccaactcaatccatgcaccttccgtgggtggttttggcgggccgtcctgacccccaaacatccctcctccctccctggcgtgaaagggctgagatttgctccggcaccctacgcgcctgacgttataatgcacctggggtgggctgcgacctcccagctgagccttgttcctcgaagagacaggagactaagagacaatgagctgagtgaggagcccaggaacccgggttccgaacagctgcgtagaatgcgagcggccaaatggtggagaatctggccgggtaaaaggagacggaggactggggatcgaacggatgtaggggattggacgccgtggctcgaagggggcggggatagaacgcggggattggaaggaggcggggataaaacccgggacctgaatacccggctagggacacgagagagaggaatcggggtttctgggtgacggtgatctcggggtgggcaggactccaaaggcccgtcgacccggtggtggactccttgcactgggattggacatatgcaagcgggagatttggggccggcgctcaaaatcggggggcgggggtggactcgggtttggaccccaggatccgatcagcggacccttgattcaacgtggtaagtactggaccccaggggctcgggctccggcggggcctggagtcctgtgtctagggttgggcgtgcaagcctctccatcacttgtcctcgacgctcgcctccgctcacagcctcagcatcccaggctgcgaggcatgcgcagtgggtgcttccttccccattccctccagcacgggcggggggaggggacgctgagcggatgaatttatagacaccatccccctcgccttggcatgaaaagcggcaatggggtggacagcgtcaatgtctaacaggtgtttgtttcatatgggtctaaaactaatgcttttctcaagaccccgcaactcagcctggaccagtttccctcctccacccacccccgaatcttgagaatcctgtactggggggagggcactgcccccgcaccatgttcttgggagagcaggtaaaggggttaacgcgagctatccctctggcctctctatgcgttcccagaggtcccgaattgacgtccttccctcaaaacctccgggtctacaaaccaggaccctcaagacccttcaggtgcttagagaaggatgagctaggttatgtagtcctgggtcggcgcaaaaaggcagctgaaagcgtgagatcccgggtctgagggaggaggggctggggcctgggcttctgggtctgagggaggaggggctgggggcctggactcctggatctgagagaggaggggctggggcctgggcttctgggtctgagggaggaggggctgggggcctggactcctggatctgagagaggagggactggggcctggactcctgggtatgaaggaggaggaggggctgggggcctggactcctgagtctgagggcggaggggctggggtcctgaagtatgactctgcccgactcagggctccagcgtgacatggctgaagcgcaccaggccgtgggcttccgaccctcgctgacctcggacggggctgaagtggaactcagtgcccctgtgctgcaggagatctacctctctggcctgcgctcctggaaaaggcatctctcacgtttctgggtgaggagcggtgctggtcggtttccttccggggatccaggtttctgcttccgggatgtctgaggctcacttccggcatttcagctggttcatttctgggagactatcacccctttttcttagaattttgatgtctgctcccaggacccctttagcaatttctccgtggctcacttctgggatccacagccccacctgctgagaacctctgctcacttctttcacccaagaggggaactgggccccccaaaaactacccacttccagtttctagaactccatatccttcccttatggtgaaattatcatttcttcctttcatctccagcttcttttgtagttgttgtttctgagacac

SEQ ID NO: 8094 - DNA, 6000 bp, Homo sapiens
acagggccagtttggagtcatcatctttggggtcggggtgctgttacaggatgggtaaccactctgaaccaggggtacatgccagatgatcccagattacaaagacctgtgaactcaagagtgccatttctttcttttatttttctctctcttttttttttgagacggagttttgctcttgttacccaggctgaagtgcaatggcatgatctcagctcactgcaacctctgcctcctgggttcaagcgattctcctgcctcagcctcccaagtagctgggattacaggcacatgccaccccgcccggctaattttttgtatttttagtagagacggggtttcaccatgttggccaggctgatctcgaactcctgacctcaggtgatccacccacctcggcctccctcccaaagtgctggaattacagacatgagttgctgcatcggccaagagtgccatttcttaggaccacacccgatgactcactcttcaaatttttatttgttttgttgttattttttgttttgagacagagtttcgctcagtcacccaggctggagtgcagtggcaatcttggctcactgcaacctccacctcccgggttcaagccattctcctgcctcagcctctggagtagctgggattacaggcggcgccacaacgcctgattaatttttttgtatttttaatagagacggggtttcatcatgttggccacgctggtcttgaattcccgacctcaggtgatctgcctgccttggcctcccaaagtgctaggattacagaggtgagccaccgtgaccggccttcactcttcaaatgtttgcttcctgttcctgctaccctgaaccctgctgttgaggggttctagtgtctacaagggaaccgctgccaccacgaggaataacacagtaagttgtgtaagtggagaccacctctgggccgtttggggtaccttgagtgtgtcactatggggttaggcagtgactaatttaggcaggaaggggaaagatttgctgctacacttggggccaaggaggcctgtgaatagaacctagaggcgtcccaggggagtctccaactaacaccatgtcccgactccctatctgtccacagccctccctccttggacaaggacaaggcctgatctgggtgcactgagacctccctcccctatgcagggcccagagtgacaaagagggtctgtgtccccttccctttgcagaagcacatcaagcccgcacacaggctctaccttcctctacccaaccccctctccactcctgcagacccccgccttcctgcaggtccccctccggcccctccctgctccgtagggcacgtagacccggatccccagctcccggaccccttccgactgctcccttcgccactcgcgcggcttccactcctggactcggcctccacccctgggcttggcctcaaagcctcctcagttgtcggccctggaaggtgcccagcggcggcagcgccagacgcgccccgttagctcagcgtcgctgagcatccgcagccgccaccaggccccgcccagcggccgcagccagccaggccgcgcccgggacgactgcagagcgcggtgagtgaacgcggccagagggagggactcaggcgtcccaggtccccgccctgcccctccccgggggcccgacatcccgaccctcagctccctctttttcttttggctccggcagtccgttttagggccgcagagccgccttttaaaaacacaccctgcatcccttccctgccctggggcttcgggcccaccagccccttggatcccttcccctcttgcaggatccgtgaatccagagccccaagccccagccccagccccatcctcattaaaattctgagtccctccctccatccaggagtcaggaatgtaggccaaaaatatcgctgccttccagacccaggcggctaggcttgcaacacctgctcggaaaacccgagtctgagctttaatggttctattatgatgatcatgatgatttatttttaatagagcagagtctccttatgttgcccaggctggtctcgaactcctgggctcaagggatcctccctcctcagcctcccgaaatgctgggattacaggcgtgagccaccgcgcccaggcctgattgttcttttgagccaagaatctgggcctcagcctaggcatcctgtggagcccaggaatccgggcccccaactgctaccgcgctagctcccaggaattttgcccccaacacaccccacccctatccactgtgatatctgagacctgcgtccagcccgagtcccttaccctgcggcgcccggtgccagtgggtactaggggagcattttgccgccccttcaagtccttaaatacaggaatctagcctctgtttcttggggagacccatcagtcagggatcgtagcccagaaccacctaaagcccaggaatactgctctcaattctgctctccctcagggctccaagagacagagatcctagcccccccattgaactgaggggcctggtcccccaatccgctgcgacccaggtgtctaaggtttcatccggcaaggaaggggtgggggcggaacagaccaggaaggagggggtaggaagggagcggaagaaaggagtgaggtgagacgggggcggggacctgagctggggggctctgcactaaacaaaccctaaacatgcggggtttctatggtaacggtcttccctggcctacccgggagactcctctagggctgtgtcgaggagggcagcccccaggagtctccacgccgccagctgttgtgtcttcctgttttgtcaccacggcaaccgtgacctcagccctccaccctgctcactggggtggggcgggagctccacgctacttttactctggggggcgtggtctgctcttggccccgcctcggggcggggctgggatagcccagactcggggaagtccctgtccaccgccctagccggagctgcgccccgccccggccccgcccccgtcccgcccgcgctggctccccagccctccaaccccacccagccctcagacccttccagctgccgctgtcgtctttgcttcagccgcagtcgccactggctgcctgaggtgaggttgtggggaccccagagggcataagcaacagtctagggtctttatggccagagagaggaatgggctgggtctcagaatgtctgggtccctagaaagactggggctgggccaggattcttggggttctgcagaggagagggctgaggacctggactgtggaggtcatacgtctggaagagtggggaaggggacctggactccggggtctgagggaggaggggctgggggtctggactcccgggtccgaggcaggaggggctggggggtctggactcctgggtccgagggaggaggggctgagggcctggactcctgggtctgagggaggaggagctgggcctggactcctgagtctgagggaggaggggctgggtctgcgggagtagagagatggggactcgtaggtgccctagttggaggctggaatctggtacgtggaggtcctttaggaggggaagcgcttagggttaggtgtcctgggtttgggaatgagaatggaaggaattcagaattactgacccctccccatccaggggacagacagaatcggaactttgggctcctgaaaggccgagggaggggggtgttaagatccagccccgtgcttccgaagtgcagaaggagctgggaaaggaggagaagacagggctgcgtcccgcacctctgggtgccgagagccgaagctggggttccggggcccgattctcagcgtgagcgatgggtgtggcgtctggagtggacgagggaggacactgaggggctgggtgtggcccggagagtcgggtgcgctgcgaggaatcccggaggggtgtttcctcaccctccagggtctggctgcgcattcctgagctctgatctcgggcgatggctggaggccctaagggcggggtggacccctcccctcccctcccctcggcgcgcccccctcccctgcgcgcccccctccgcggctagcccaccttccgcgggggacagaatgagtgacgccctcgctcgtcctcctcccctgcttgggacggggcagtagcccgccttctagagcacgggacgctgggccagtcccgatttccttctccttcgagggtcctggaggggcgtgggggcaggcagtgtctggctccgggtggagcctcccaggtgctcccgcaagccccgaatggcgattagggaggccgtgggaggcgtagctgggcctcgggcctgacgccagcaccgcgtgcagtttccggcctggagcctgagcccctcagaggcccgggtccctgcccactccggtcttagagatgctcttgggggggctctcagcccatgtttatagggatccagaaatgcaggcctccaaccctgagagtcggggtccccaccccccggaaatccgggagagggcgggcagccccggaggcgggcgggggtccgggcaccgcctcctggtccctgacacattccagatgcctgggccgactcgaagcccttataaggcgcggagacaccggctctggctgggccgcccgcctccacagccgccgcccagggttctcccgccactgccgcccgcacccccgcccccgcggggttaagatcacacacgcgcccacgccggcccgcggggcgtgcactttcgctgggttccgtccgccgcagcccaaacagttaactgaacggggaggggagggggcggggcttacccggggtcaccgccagggccctgctgggttccacgccacgttcctgtctccgcagggcgttcgatccctagagggaggagcctgtccaaacggacgctaacggcctacctccccctcaggtgctcttacagcctgttccaagtgtggcttaatccgtctccaccaccagatctttctccgtggattcctctgctaagaccgctggtgagtaggcagcgggcctggactccggggtccgagggaggaggggctgggggcctggactccggggtccgagggaggaggggctgggggcctgggctcctcggtccgagggaggaggggctgggggcctgggggcctgggctcctgggtccgagggaggaggggctgggggcctgggctcctgggtccgagggaggaggggctgggggtctggactccggggtccgagggaggaggggctggggtctggactcctgggtccgaggaaggaggggctggggtctggactcctgggtccgaggaaggaggggctgggggcctgggctcctgggtccgagggaggaggggctggggtctggactcctgggtccgagggaggaggggctggggtctggactcctgggtccgagggaggaggggctgggggcctggactccggggtccgagggaggaggggctgggggcctggactccggggtccgagggaggaggggctggggtctggactcctgggtccgagggaggaggggctgggggcctgggctcctgggtctgagggaggaggggctgggggcctgggctcctgggtctgagggaggaggggctggggtctggactcgtgggtctgaaggaggaaggattaggtcctgggctcctagatcctgggagaaggaccaggaagcttgggctccaaggaatagggtcccagacactgaggtatctgaggaagaagcgagtccaggccctggctcctttgtctcagggagctgctgtcctgcgactgccacgaagaggttaaggcctgtgctactgccctgcaaagtgcctgaagctgaaaggaggaagttactttcctgtggctaggagaggccttgggtttagtcctgtggctgcgttgagacagtttacagcctaaggaaagaactgggcacctggtttctaagaggacgggcacttgattcctgggggccattaggac

SEQ ID NO: 8095 - DNA, 6000 bp, Homo sapiens
taaagggccaagacaggggtgtggatcccaggggcctcacacccactcaatctttccctttgttaaggagcctctcactcactcaccccttccccgtgttagggagcctcgcactcactcaccccttccccgtgttagggaccctctcactcaccccttccccgtgttagggagcctctcactcactcaccccttccccgggttagggagcctcgcactcactcaccccttccccatgttagggaatctctcactcactcaccccttccccgtgttagggaccctctcactcactcaccccttccccgtgttagggactctctcattcactcaccccttccccatgttaggagcctctcactcactcaccccttccccgtgttagagaatctctcactcactcaccccttccccgtgttagagaatctctcactcactcaccccttccctgtgttaggagcctctcctggctcccaccttttctcttctcttctttccatgtcctcatgtttctcaggtgaaccccagcatcctcttggaagatccacttgacctgttggtatttactcactattttgggtcctcttagtgagtaggcagactccagccctttccattcagccaacttgaacctcagcccacaatcattttcttgtcactttttactcttgggaaatccggtcccaatgtgcttgtctttcatttgagaataattttcattttctccagtagttttaaaattactttgtatctattctaggtatcttttactctatcatagttaagacattgatgttatttattaatttgttcacattaaactcatgttctttcttcatttctgtaaaaatgtcaaccattttctttgcaatatttactgaataacgtactccttatttccttcattctgaaagtgtgatccatagagagatacctgtttcctcttctcattccatttcttgtgtgcattaattatgttttctactttattcatttctagtttttctctgatgactaatgaaaaatttaatagatattccacaccaatactatgctcatcatttcagctgtgtcttgttcttatgcaattatttctaaatgtgttgatatgatttactatttttcacctcacagtagcttcctaattcatttctataattgcctgttttttctgtaatggactttttgatttttatttctcttgggtgggtttttctcccacacatgtgatcttccatacagtttctccccgggctgactcaggaaggaaagctgatgaggagcattgctgtggtcactcctgccctgcggtgtccatgctgccaagcttagaatcagctctgtgttctgtccggcatggtggggcccatgtgagcctcacactcacgtgctagagatgcctggtccagcagtgataaagcgcatctgtgtcatgcacacccgggaaggtggctcaatgctgagtgtggcccgggtcactgaggggagctatcccagggtctgtccacaaacacagaagagggagaacaacagtctctctagggtcccacggtttcctccattttttgctttgttctgagagagagacaaagtgccatgactgctctgtgggttggacagatgcatgctttcacctgcaggctggaacccaagctgaggtcttcagcatccccaagtactgataaagcactttaggttgtttttagaaaacactgaaaaattaacccttttgctaaagaggtagaaacaagccctcccctcaacgaaattcctgaaactctcaggttaaacttcgtaacccaatcccttcactgcagacacccaataggaaagtcacatgtgcaaggatgagatgactttggtcaagctcagaccccacagggccaggaaggcctgaaggagaggaggcccatgcttccagctctcagataagagctgcttctaaggactttttaaaaaccccacaagaaacccttccatgtccttcaccccctcctgctttgacaaggtttatcactagatattctttaggatgtcaggaattcagataagatgctctcgagaaaaaacttgcccagcaacggcatctcctccaatggactgacagcaactctggctttgaacctctggaatcagggaactctgtttctaagcagctctgtcagcctctctcttgttgctgataagaacttcctttacttctgtatgtcagagagctctctctatggtgcttttcctctactctcacaccacaggaatcatcctcacagaagaagacttctaggaccagatgtgtgggattttttttcctagacccagtagcggacgccagctgagtgtttaaatgcttcttccccagtgccgtaaacaaatagcacttgaacataaatttaatttactcagcaagaccatttttattttctgcagcaagggtacactcaccagcagttttgcttcgagagtacacaaaacaaaagagacagggtcatttataacctgacacgtccaccctactgctctgtccggtttccactggctggaacaggacctcacactctgtatttgtcccgattggctagtaacttagaacttctgaaaagaggcaaaggtagagcagaacaaaggaaggaggaagtaacttgtggaatgctgagaaaggtgaaaacaccttcaaataaggaagaggaacaggctatgacctaatgcttgcttggaccagtataagcatgccagggcaaatatttaggctaaattgtgggagctaataacataaagtacattgatttatttatcacggctagcagatatttgagaatgttagcatagctctgacactgtctacccagagacagtcccagatcccacagattgaatggttcagtccccaacactgcccccacaccattcccaagtccagacctccagaacttctgactgactggcttcaagttggggaccctatgaccacctctttgggtttgattaatttgctgtagcagctcacagaactcagagagacactgacgtttcctggttgaatacaaagcacactgcagaggacacagatgaagagactcataggaggaggcatgggggaaggggcgcagggcttccataccctccctgggcatcaccctccaggagtctccacatgctcaaccacccagaaacccacgaaacccagtcttcttgggtttttatgaagcttcatgatgtcagtatttcctcccacaaggaacaggctgagaccatcttctgggagggtcttaagagccaccatcagaaaggcagggacattagagtcttgccttgggcaggtgaaggaagggcaggaggaggtcagaggcctcccctaaggcctaacacagccaatgttataacaaaagactgtaacaagggctatggagctatgagccaggaaccgcaggtgaaaaccagtgtgtatcacaacatcacacttccctctccggacacactgtggcttgccatgccatgcactccagattgtaatccttgcttctcactcccaaataaactcaaaatccagacaaccctggagcaacgcagccttgaattcctggggtctcttatatgcacacttttttcaaccaaacgggggtcaaaactgtagcatttgtgggatgcaagacttgtgtatatgaacggcagacttttcctatatgcaggcccagcagagacaatgtcggggctggagtacgagcaggtgttggtgcatgtagggggtactgaaacgaattgcctgtgtatcccaagaaacaactctactgagagatcatattctctaggggtttatttttgtttttatttttattttaagttaaagcttcgggtagaacacccagtgtctccttgtccatctgaagaagatgctgctatgtggaagcacatccttgagatccacaaggagacactgggcaaggagacgagggtgccccactgtgcagaagtctccctaataaatgatctatgaacaccctggtgtttagtgcttctttctttggaatcccagcagctctgtcactggacggtttggtgcactcccttgagggaattcccctgggctgcttggggtccactccagcctcaggtgtagctggaggacgcagcctcccaccttggtctggagccctgagcccctcactgtcattgcagatcccgaggttcctctcctggctccactcagtggtggaaacctccaccctaatgagcccttgatggtcccaggtccctgtggcatctcacctgtggcctctgttctttcctgtggatccatctacacttgggaacttccacatctctttttctgctcatgacattgatgctctgggtatttcagaaatgcccagatagatggacaaatacacgtccatctatccattagggtcagatgtgagatccagagtggacacatcaatcacctacgtagactgtggagtccaacgccaagatcctcttatgtcccaaacacctcaggtcttaccctggtctggaaatcaagcacaaatgagcccctcctaatgttccagcaccactgaccgtacaaccactgtcacgagtgggatttgtgacaacagtcggcaaaggaagaatctgaggctcagagatggttcattaccgcccgaggtcacgtaggcagtggatgataaccagtcgttgaataaatataactcccccccaactccccaaatcaaagctcaaatataagtcattgttcccaaagcgttgaacagggattgaggtgcagagggacggccaagtaagcaaagggcaccgaggaggcaggaaagactcagagatttgttcccggggggtggggttggacactgtagcaaaatattttaaaaaggggaagttaagaggggactatttggttgaaagaaaacccacaatccagtgtcaagaaagaagtcaacttttcttccctatttccctgcatttctcttctgtgctcgctgccacacgcagctcagcctgggcggcacagccagatgcgagatgcgtctctgctgatctgagtctgcctgcagcatggacctgggtcttccctgaagcatctccagggctggagggacgactgccatggtaaggaccccacaacgctgagctgatggacggctgaaggagggagggtgaccatgtgggaggctgtgagaaggaaggagatgcctccgctaccctcgtcaggaagggcagacacaggaaggaaccagttttatttgctgctacatcctggctctcagtgggatgaaaacaaaccagacagacggtggctgggggtcaggaaagggcccattaccatctgaaatgatgcagagggcctagtgactgcccccacctcagccctaatggaatgagagcaagggtcctggggagggcagttccacttcctgtgtggctgcagatgacagcaccccatgagaagaaggacccagcctccgattggccacactctgtgtgtctctctatcctgccagcaccgagggctcatccatccacagagcagggcagtgggaggagacgccatgacccccatcctcacggtcctgatctgtctcggtgagatttgaagaaggaggggagcttctaacctaagagggacctcaccccacagccaaactctggtccctaaggagaccccaggggctcacaaagatcccagggaggggaggacctgcccaggcttcagggggcaaatccctcaccgggaactctcttccagggctgagtctgggccccaggacccacgtgcaggcaggtgagtctgtccccagctcttccaggtccctcctcctcactggggacaaggggccacccccgtgccgctggggatggggaatagcagttctgggctgactgatcggggcgtctggagggtcctgggctgagagctggaatctgctgggttgggtgggaaatgagttagaatccgactcctgatttccttccagggcacctccccaagcccaccctctgggctga

SEQ ID NO: 8096 - DNA, 6000 bp, Homo sapiens
catatagaaaatgtgaaagcccgctgaatcctccagcacagatcctggaatagagaaagtgctctggtcatcacaaaaaaaacttgcccactcacccaaatcccccacctcacccctacttccaatcacctgtggagattcagatagaccatggggaggtaaacattaacactccttggagtgagtccagatcttggaatcagagatcagcgacagcactagctcctgctcccctttcctactaattcacaggaggacaggtggttttgaagcaatagatggccgagggggtggtcctccccccagcctctcgggtagaacagcagcctaatatgtgtctcccgagatcacaaagagcagcaggtttcacacgggcttcaacactatttcctggccgtttgacataagagaattctatttcgctttttttatcttgatttcacttttgttttctttccttggagaatgcaagttgtttgattcaagaatgctgtggatgtagaaaccctaaagcacattcgctgtgaatcaatcccagtccagtcttcccagagaagactctaaacacctcctggactgcacctgggcctatgccaattcctatcactcaccgtcactccagggagacagaacacacagagaatacgttacataggcaggttcattactaacagataagcagcgagtgacaacagaaacctatatttcaatgtgacccagtccctcaaggctcagaaaagctcctcgggacatatggagtcaccccatttgcagtgtagctgcgggaagccagaaagcagcccagcctgggttttgtaccctggagccacaggaagcactcagctaaagcactgcatgacgtcctccaggaagaacaggaagacagcccagggtgttctgagacgttcctcctgatctcaggaagttgctgtcttaggccatttttgttgctctaaaggaacacttgagcctcggtaacttctaaagaaaagagattggtttgcctcaccgttctgcaggctgtactggaagcatggcaccagcatctatttctcgtgacggcctcaggctgctcccactctggcagaagggaaggagggtctgtctgtgcagagaccacagagatcacacggcaagagagggagcaagggggagggggagtgatggagcttccaagctctttttaacaaccagctctccgggaactaatagagggggaacttgctaaccccgtctccttgggacagcattgatgtgttcatgatggatccacctccatgacccaaacacctctcaagaggcccaacctcccacagtgggggtgaaatttcaatgtgaggtttgaaggggtcaaacatctcaactaaagtagtcgtatcctcagcacgttctatggttactatgagagctataactgaaaaagcaggagaaagctgggtctcctgccatctgggtgcttgtcctaaagaggtgttttatgtggttacctgtcaatcaagaaatgcgagacaattcataaagaggaactgctaagattagcttcttattggtgtctcatcttcttccaggtaacccccgacacctgcacattctgattgggacctcagtggtcatcatcctcttcatcctcctcttctttctccttcatcgctggtgctccaacaaaaaaagtaagtcttacgaagcagaggccagagagctcagggccatgtggggaagcaggatgggagcactcaggtgtgtgttcctcacaaacaggatggtccctggcccaaggcagcagccacagaggcaggactttctagagagggcaccagactccctgtccctgccttcaactcacagaccgttgcctgattctgaactgtatccccatgtcccctgcagccactcacatccaggagaaggttccatgacaggcagaaagtgggagacagaatcaatgggatgggaactcagagctattcatgggatgggtccttgagctcagagagatagaatgtctgagtctgctgttggcaactgagggacctcagccacctatggtctccccctgtatgttggtatctgcttatgaaatgaggacccagaagtgccctccgagctgttttgttgacttccatcttctacagatgctgcggtaatggaccaagagtctgcaggaaacagaacagcgaatagcgaggtaggtactcctcggcccgggctcgtggctactgttattcccaaagagtcctggaaaatgtgagcaccctccctcactcagcatttccctctctccaggactctgatgaacaagaccctcaggaggtgacatacacacagttgaatcactgcgttttcacacagagaaaaatcactcgcccttctcagaggcccaagacacccccaacagatatcatcgtgtacacggaacttccaaatgctgagtccagatccaaagttgtctcctgcccatgagcaccacagtcaggccttgagggcgtcttctagggagacaacagccctgtctcaaaaccgggttgccagctcccatgtaccagcagctggaatctgaaggcgtgagtctgcatcttagggcatcgatcttcctcacaccacaaatctgaatgtgcctctctcttgcttacaaatgtctaaggtccccactgcctgctggagaaaaaacacactcctttgcttaacccacagttctccatttcacttgacccctgcccacctctccaacctaactggcttacttcctagtctacttgaggctgcaatcacactgaggaactcacaattccaaacatacaagaggctccctcttaacgcagcacttagacacgtgttgttccaccttccctcatgctgttccacctcccctcagactagctttcagtcttctgtcagcagtaaaacttatatattttttaaaataacttcaatgtagttttccatccttcaaataaacatgtctgcccccatggtttcggtaatgggactcttttcttgcctaaggcttccggtgttatcagtaccatgtccatataatcccatctgttccccactgagttctcatccccggactctgagtttctggaagcagggtggagcctcatttgtctctgggactccaatttccatccaaagatgtagcacataggaggttccaaggatcacgaatcatatgaacaagtgatactcttactctctgcagacctggaaagctggcagagtcattccacaatgaaacatttgtagaatcataggccttgttagtctcatctccatggggacacatatcaacacatcatctttcataatataaatatacggtcactcctccatatctgcggggtttacaggtgtttattgaaccaagtataaatcaaaaatattgagagaaagtatccacagagtttcaaaaagcataactatgttgaatggacacaaatgaagctgtgtgtaggctgtatcaggaattataagtaatctagagatgatttcatgtatacaggaggatgtgcataggttatttgcaaacgctgtgccatttcatataagaggcttgagcatctacagattttggtatctgagtggagatctcaaaaccaatcacccacgaatagtgaaggatgaccgtatatgacttttatttctcaaatttaaatataaatcataaaaaatgtacaactagataaaaactaagaagtgtttttatagtgtgagttagatttattttttcctaggtgtaaccaattggtttaatattatttattgagaagacattctatgccaccttaaaccacacggcagcctttgtcaactctaaagggactgtgtgtacatggatgtattttagacactgtttctgctaaggggctctctgtgtccacactcttgatgatgctgcactttatgtagccttatagaaccctttaaatttagtagccagagccctctaatttgttattataggctgtttgctttttttttcttgaggcggagtcttgctctgtcgcccaggctggactgcagtggcacaatctcagctcactgcaacctccgcctcccaggttcaagcgattctcgtgcctcagcctcttgagtagctggcgttacaggtgcctgccaccaggcacggctaatttttggatttttaacagagacacggtttcactatattggccaggctgctctcaaactccttatctcagttgatccgcccacctcggcttcccaacgtgctggggaaaacttgattttctatagcattatgttactggatatttctgtaaaatttaaaacgagggagggagagagacagacagagagcaaactccagagttgggactctggaatcttgggtcatgagacaaattttagattaaactacaaaactccagaatttacaggtgtggtttttgctgataaagtacaattctaagattgtaaataattgcataatccttccctgggaatttaaatcattttagctggttctgctgtaatactagaaatacaagcatgaaaaattctaatggtttattagtcacaatgactccgaaaacattaataatacctattagatactttgcatattacacaggaagaagagtttgaatctcagataaaaacaaaaaaaatacatgaaaagtctttcatgttagcacagattttaggcatctcgtgttcggataaaaatacatgaaaagtctttcacgttagcacagattttaggcatcttgtgttcgggaggttggatctgagacgtgttgtgagttggtcatagtgaaggacgtgaggtgccaattctagtgagaacaatttccaggaagccgtgttccgctcttgagcaagcatccactgggcctcatgcaaggtagaaagagcctgcgtacgtcaccctcccatgatgtagtcaacatgtaagctgcatgggcagggcgccaaataacatcctgtgcgctgctgagctgagctggggcgcggccgcctgtctgcaccggcagcaccatgtcgctcatggtcgtcagcatggcgtgtgttggtgagtcctggaaaggaatagagggagggagtgccacatcctcctctctaaggtggcgcctccttctcccccaggtggtcaggacaagcccttcctctctgcctggcccagccctgtggtgtctgaaggagaacatgtggctcttcagtgtcgctctcgtcttgggtttaacgaattcagtctgtccaaagaagacgggatgcctgtccctgagctctacaacagagtattccgaaacaccgttttcataggccctgtgaccccagcacatgcagggacctacagatgtcggggttcacacccacacttcctcactgggtggtcagcacccagcaaccccctggtgatcatggtcacaggtcagagggctcctgtctgggattctccttgtcccacctcctgagtcccagagcttctggtgggagtgtccaccagcgtcccatcatccagaccctaactgtatttggggtaaaaggggattgaatacagggaaatgggtgctgtggtggaaagaataattgtccccaatgatgactgcattctaatccctgcagtctgtgactatttatgttataggggaaggcactgaaggggaagatggagctcaggttgttgagttgaccttgagatggggagacagcctggactgtcctgctgggctcagtgtaatcacaagggtgcacatgagaggagaaggaagaggggagtggcgattagagcagtgcaatggaagtctccatcagctttgaaggtggaggaaggccatgagccatgaatgcaggtggcctatagaggctggaaaagtcaaggaactgattctcctgggtctccagagggaacgcagccctgcagatgccttgattttagccctcaaaaaacagggtccgatttctgtctccagaaacggaaggggtcagtgtgctctctcctgctgccatgcttctgataattttccacagcaccaa

SEQ ID NO: 8097 - DNA, 6000 bp, Homo sapiens
cattaggcaatgagcttaaaacctcttccctatttggctttctgtgagaatgagatcacatagaaaatgtgaaagccctcagaatcctccagcacagatcgtggaatagagaaagtgctctgttcatcgcaacaaaaaacttgcccactcacccaaatcccccacctcacccctacttccaatcacctgtggagattcagataggctatggggaggtaaacattgatactccttggagtgagtccagatcttggaatcagagatcagtgccagcactagctcctgctcccctttcctactaattcacaggaggacaggtggtattgaagcaatagatggccgagggggtggtccttcccccagcctctcgggtagaacagcagcctaacatgtgtctcccgagatcacaaagagtagcacgtttcacacgggcttcaacactatttcctggccatttgacataagagaattctacttagctttttttatcttgatttcacttttgtttccttttcttggagaatgcaagttgtttgattcaagaatgctgtggatgtagaaatcctaaagcacattcgctgtgtatcaatcccagtgcagtcttcccagagaagactctaaatacctcctggactgcacctgggcttatgccaattcctatcactcaccgtcactccagggagacagaacacacagagaatacattacacaggcaggttcattactaacagataagcagcgagtgacaacagaaacctacatttcaatgtgagccagtccctcaaggctcagaaaagctactcgggacatatggagtcaccccatttgcagtgtagctgggggaagccagagagcagcccagcctgggttttgtactgtggagccacaggaagcactcagctaaagcactgcatgacgtcctcctccaggaagaacaggaagacagcccaggctgttctgagacgttcctcctgatctcaggacgttgctgtcttagtccatttttgttgctctaaaggaacacttgagcctgggtaacttctagagaaaagagattggtttgcctcacagttctgcaggctgtactggaagcgtggcaccagcatctatttctcgtgacggcctcaggctgctcccactctggcagaagggaaggagggtctgtctgtgcagagaccacagagatcacacggcaagagagggagcaagggggagggggagcgatggagcttccaagctcttttgaacaaccagctctccaggaactaatagaaggggaacttgctaaccccgtctccttgggacagcattggtctgttcatgatggatccacctccatgacccaaacacctctcaagaggcccaacctcccacagtgggggtgaaatttcaatgtgaggtttgaaggggtcaaacatctcaactaaagtagttgtatcctcaacacgttctatggttactatgagagctataactgagaaagcaggagaaagctgggtctccctccatctgggtgcttgtcctaaaggggtgttgtatgtggttacctgtcaatcaagaaatgtgagacaattcataaagaggaactgctatgattagcttcttattggtgtctcctcttcttccaggtaaccccagacacctgcatgttctgattgggacctcagtggtcatcatcctcttcatcctcctcctcttctttctccttcatcgctggtgctgcaacaaaaaaagtaagtctcacgaagcagaggccagagagctcagggccatgtggggaagcaggatgggagcactcaggtgtgtgttcctcacagacaggatggtccctggcccaaggcagcagccacagagggaggactttctagagagagcaccagactccctgtccctgccttcagctcacagaccattgcctgattctgaactgtatcctcatgtcccctgcagccactcacatccaggagaaggttccatgacaggcagaaagtgggagacagaatcaatgggatgggaactcagagctattcatgggatgggtccttgagctcagagagatagaatgtctgagtctgctgttggcaactgagggacctcaggctcctatggtctccccctgtatgttggtatctgcttatgaaatgagggcccagaagtgccctctgagctgttttgttgacttccgtcttctacagatgctgttgtaatggaccaagagcctgcagggaacagaacagtgaacagggaggtaggtgctcctcggcccagcctcgtggctagtgttattcccaaagagtcctggaaaatgtgagcaccctccctcactcagcatttccctctctccaggactctgatgaacaagaccctcaggaggtgacatatgcacagttgaatcactgcgttttcacacagagaaaaatcactcgcccttctcagaggcccaagacacccccaacagatatcatcgtgtacacggaacttccaaatgctgagccctgatccaaagttgtctcctgcccatgagcaccacagtcaggccttgaggggatcttctagggagacaacagccctgtctcaaaactgggttgccagctccaatgtaccagcagctggaatctgaaggcgtgagtctgcatcttagggcatcgctcttcctcacaccacaaatctgaacgtgcctctcccttgcttacaaatgtctaaggtccccactgcctgctggagagaaaacacactcctttgcttagcccacaattctccatttcacttgacccctgcccacctctccaacctaactggcttacttcctagtctacttgaggctgcaatcacactgaggaactcacaattccaaacatacaagaggctccctcttaacacggcacttagacacgtgctgttccaccttccctcatgctgttccacctcccctcagactagctttcagccttctgtcagcagtaaaacttatatattttttaaaataatttcaatgtagttttccctccttcaaataaacatgtctgccctcatggtttaggtaatgggactcttttcttgcctaaggcttccggtgttatcagtaccatgtccatataatcccatctgttctccaccgggttctcacctctggactctgagcttctggaagcagtgtggagcctcatttgtctctgggactccaatttccatccaaagatgcagcacataggaggttccaaggatcgggaatcacatgaacaagtgacattgttactctctgcagacctggaaagctggcagagtcattccacgatgaaacatttgtagagtcataggccttgttagtctcatctccatggggacacatatcaacacatcatctttcatactataaatatacggtcactcctccgtatctgtggggtttacaggtctttattgaacaaagtataaatcaaaaatattcagagaaaatatccacagagttccaaaactcataactatgttgaatggacacaaatgaagctgtgtgtaggctgtatcaggaattataagtaatcaagagatgatttcatgtatacaggaggatgtgcatatgttatttgcaagcgctgtgccatttcatataagaggcttgagcatctacagattttggtatctgagtggagatctcgaaaccaatcacccacgaatagtgaaggatgaccgtatatgacttttatttctcaaatttaaatataaatcaaaaaatgtacaactagataaaaactaagaagtgtttttatagtgtgagttagatttattttttactaggtgtaacccattggtttaatattatttattgagaagacattctatgccaccttaaaccacacggcagcctttgtcaactctaaagggactgtgtgtacatggatgtattttagacagtttctgctaaggggctgtctgtgtccacacacttgatgatgctacactttatgtagccttatagaaccctttaaatttagtagccagagccctctaatttgttattataggctatttgcttttttttttcttgaggcggagtcttgctctgtcgcccaggctggactgcagtgacacaatctcagctcactgcaacctccgcctcccaggttcaagcgattctcgtgcctcagcctcttgagtagctggcgttacaggtgcctgccaccaggcatggctaatttttggatttttagcagagacacggtttcactatgttggccaggctgctctcaatcccctcatctcagttgatccgcccacctcggcttcccgacgtgctggggaaacttgattttctatagcattatgttactggatatttctgtaaaatttaaaatgagggaggcagagagacagagagagatcaaactccagagttgggactctggaatcttgggtcatgagacaaattttagattaaactacaaaactccagaatttacaggtgtggtttttgctgataaagtacaattctaagattgtaaataattgcataatccttccctgggaatttaaatcattttaactggttctgctgtaatactagaaatacaagcatgaaaaattctaatggtttattagtcacaatgactctgaaaaccttaataatacctattaaatattttgcatattacacatgaagaagagtttgaatctcagataaaaacaataaaaatacatgaaaagtctttcacgttagcacagattttaggcatctcgtgttcaggaggttggatctgagacgtgttttgagttggtcatagtgaaggacgctaggtgtaaattctagtgagaacaatttccaggaagccgtgttccgctcttgagcgagcacccactgggcctcatgcaaggtagaatgagcctgcgtacgtcaccctcccatgatgtggtcaacatgtaaactgcatgggcagggcgccaaataacatcctgtgcgctgctgagctgagctggggcacggccgcctgtctgcaccggcagcaccatgtcgctcacggtcgtcagcatggcgtgtgttggtgagtcctggaagggaatagaggaagggagtgtggggttggagatctgggcccagaggtggagatataggcctggaggtggagttgtgggcctggagtggagatctgggcctggagtggatatatgggcctagagatggagtgatgggcctagaagtggagatctgggcctggagtgccgataggaacctggaggggagataggagcctggagtggagatatgggcctggaggtggagttataggcctatagtagagacatgggcctggagtggagatttgggccaggagtggagatatgggcctagaggtggatatctgggcctagagtggaaatatgggcctaggatggagatatgggcctggttgtggagatatgggactggagaggagatatgggcctagagtggagatatgggcttggggtggagatctgggcctggggtggagatatgggcctggaggtggagttacgggccttcagtagagatatgggcctggggtggagatatgggcttggggtggagatctgggcctggagtggagatatgggcctggaggtggagttactggccttcagtagagatatgggcctggtgtggagatatgggcctggattggagatatgggcctaggttggagatctgagcctggagtggagatatgggcctggattggagatatgggcttacagtggagatcttggcctggattggcgatatgggcctggattggcgatatgggcctatgatggaaatatcggcctggagtggagatatgggcctggagtggagatacaggcctagggtggaaatattggcctggagtggagatatgggcttgtggtggggatatgggcttgtggtggggatctgggcttggaggctgggtctctgcacagccgacagccctgttcttgggtgcaggtaggcactgagggtgagtttaacttcagtccaggaag

SEQ ID NO: 8098 - DNA, 6000 bp, Homo sapiens
cctgtaatcccagcactttgggaggtcgaggcgggcggatcatgaggtcaggagttggagaccagcctggccaatatggtgaaaccctgtctctactaaaaatacaaaaaaaattagctgggtgtggtggtgcgcacctgtagtcccagctactcaggaggctgaggcagaagaatccttgaacccgtgaggcggaggttgcagtgagccaagatcgcaccactgcactccaacctgggcaacacagcgggaccccatctcaaaaaagaaaaaaaatagaaaaattatctggacgcacgccaggagtcccagctacgcaggaggctgaggtgggaggattgcttgagccccggaggttgaggctggagtgggctgtgattgtgccactgcactccagcctggatgacagagcaagactttgtctcaaaaaataaaataaagcaaacaagaacagttagatccccggccttgccactcgcaggacaagctttgtccccctcggcactgtggacattcaaggctgattagtctctggggtggggtatcctgggcactgcagggcactgggcagcatccctggccaccacccactctgtgccaggagcatcctccagttatgacaaccacaaatgcccccagacatcacccagtatgagtccccggggtgcagaatcgccccccaggtgagacccccactgcagctgagtgtggctgagagctcttcacagtggccacgaggaggcgagactggggtgggcccctggctcccactgggcgggctcagagcatggctcctgcccccacgttcagactgaagccatccaggaggccaagaaggcggtgccaagtcggtggtgcccagtcaagcccagatcctgcggccctgggttaggaaaaagttccgtgaaaggagtgtggccctgggttgggatggtagcttggggcgttcctccctgtggcttcctctttctgacacttggtctcttgtctcttgaaactttgggctgagtcctctgaagcaggcaccacaggtgtccgtgacgtctcatcactgtaactgtcccctaggtgacacgatcttagctttgttttgagacagggtcttactttgtcccccaggctgcagtgcagtggcacaatcatagctcactgcagccttgatctcctgggctcaagcaatcctcccacctcagcctccaagtggctgggactatacaggcacatccaccatgcctggctaatttcttaactatttcgtacagagatgggtctcactatgttgcccaggctggtcttgagctcctggcctcaagcagtcctcctgccttggcctcccaaagtgccaggattacaggcgtgagccactgcagctggccagggcttcttttaggggtgaggaaagtgttctggaattagataaaggtggtgtttgcgcaacgccaaacgtgccaggagtcacgtaactgtactcctgaactgtaactgaaaaggttaaaacgtgtgggatgtgagtcatatgtcaatctaaaaacagaagaaaagactatcaggagaattaggacagtatgctaagccctcgatagcacctggcccagaggggcctgggcaggccttgcttcctgcctgtctgctttcccacgagagaagtcagagatgcagtaggcacagtggctcacacctgtaatccctgcactttgggtggctgaggtgggaagatcgcttgactccagaagctcaagaccagcctggacaacatagcaagaccccatctctacaaaaatacaaaaattatacaggtgtggtgttgtgtgcctgtagtcccagctactcaagaggctgaggtgggaggatcacttgagcccgggaggtcaaggctgcagtgagctgtgattgcactactgcactccagcctgggcaacagagcaagaccctgtctctaaaaaaaacaaaaatgtaaaccagacaaaagcacaaaacagtgacaggatgcacgcctgggtgatcagggaagacgcagccatcctccagcaggagtgagggtggcctaccagcaccaggagcagttgtaacgtttaaaagtaaaccctcaggccaggcatgctggctcacgcctgtaatcccagcactttgggaggccgaggtgggcagatcacctgaggtcaggagtttgagaccagcctggccaacatggtggaacagtttctcctaaaaatacaaaaattaggcaggcatggtggcgtgtgtctgtaatcccagctatacaggaggctgaccaggagaatcgcttgaacccaggaggcagaggttgcagtgagccgagatcacgccactgcactccagcctgggtgacagagcaacacttcacctcaaaaaaataaaaataaaaaagtaaaaataaacactcagaggctgggcgttatggttcacgcctgtaatcccagcactttgggaggccgaggtgggcagatcacttgaggtcaggagttcgagaccagcctggccaacatggcgaaaccccacctctactaaaaatacaaaattagtcgggcgttgtagcgggcacctgtagtccctgttacttgggaggctgaggcaggagaatcgcttgaacctgggagacagaggttgtagtgagctgagatcgtaccactgcactccagcctgggcaacaagagcaaaactccgtctcaaaaaaataaataaatgaaagtaaaaataaataaatactcagattttggaaggtggctccgggatgctgcctttttttttttttttttttttttgagacagagtcttgctctgtcgcccaggctggagtgcagtggcacaatctccgctcactgcaagctctgcctcccgggttcaggccattctcctgcctcagcctcccaagtagctgggactacaggtgcccaccactacgcccggctatttttttgtatttttagtagagacgagtttcaccgagttagccaggatggtcttgatctcctgatcttgtgatccgcccacctcggcctcccagagtgctgggattacaggcgtgagccaccgcgcccagcgccttttttagcaggacagattctgggctgggagcatcttccagccaagtatgagggctgggctgccaggccgggagccagtgttgtgcactgacctagaacatatggaactgacttctccactcagggcttgtctctcaggcgcctcccgtgctctggggcagcggtccccgaggcagtggcaggatgtggaaacctccggaaggaagtgggtgactgtggtccgtgagctgctacacctcggtgggggaggggtcataccagttggttgcttagagaaactgtgttgttcaaaaaaaaaaaaaaaaaaagtgttgcagcaggggaatttgtcatttcacctttcatttctctagaagtttccaagggtcacttgtgtctcgtccgtgggaagaccgggggagcccagaaggccttggtgtggaattctgagagctgattcctgccttgtcttctccactgttcctggaggaatccgagaagagcagagcggagggagccccagacacggtaacctgcccccggcctcaggggacaacgagggcgggagtcagggtcccgaggccaccccggcctttctttggaaaagacccctttctgtggccaatcacccctccgccaaggagcctgtgtttgttcctgatagaaaacgctttgctcgggccggacatggtggctcacgtctgtaatcccagcactttgggaggctgaggtgggaggattgcgtgaggccaggaattggagagcagcctaggcaacatggtgaaacccctgtctctaaataaaaaaaaaactaggccgggcacggtggctcacgcctgtaatcccagcactttgggagggcaaagcgggcagatcacgaggtaaagagtttgagaccagcctggccagcatggtgaaacgccatctctactaaaagtacaaaaattagctgggtgtggtggcgggcgcctgtagtcccagctactcaggaggctgagacaggagaattgcttgaacctgggaggcagagtttgcagtgagccaagatcatgccactgcactccagcctgggcgacagagtaagatcctgtctcaaaaaaaataaaaaggaaaaaaaaaaccgtctgctgtgacgggaactctgccagtccacaaggttcttcagaagatgttaacttccactgaaaatcctgcacctttttctttttgtgacggagtctcactctgtcaccagggctggagtgcagtggcgtgatctcagctcactgtagcctccgcctccctgggttcaagcgattctcctgcctcagcctcctgagtagctgggattataggcacatgccaccacacccggctagttttttgtatttttagtggagatagggtttcaccatgttggccaggctggtctcgaactcctgacctcaagtgatccacccacctcggcctcccaaagtgcagggattacaggcatgagccacctcgcctggcacccctcaccttctgaaaggagacagacatgccaagaggaagtttacaagctcctcgggctgccctgtcttgttttctggaactgtcttggtgtgagtctggtagacaagcttaaaaggatatagacaaagataagcctcagccaggcacggtggctcacgcctgtaatcccagcactttgggaagctgacgtaggaggatcacttgagaccaggagttcaagaccagcctgggcaatgtagtgagaccctatctctacaaaaagttttaaaaagacaagcgggggcctgtgggaacagccgctttctccctgaggctcagcccaggtagggggtctcctcccatggctgcagtcagcccagggctgcaataccactgctggaaggccccgcctgcccaaccaggtggcacggttggaagctaagcccccaaattggcatgggaggccctgaaatcaacaaacggcagcaccaggctgtggcaggttgggttttgctctgtgctgtgatttctgttggagttggaaagttggctgtgagtcggcccagatgtgaagcggaaacggggaggagggaggtgagtgggcctggctgggtggatggggatctgctcgcctgcacggtttcctctttggtaaagtggggcctgcactcgccccatctagacaggcatgtggggactgaggtgattgattcccagcgtggaggagcatctcgctcagtgccaggcggaccatggcctggaggtggccggcattttcccttctcctgaggggatttattgatcttgtgctgcaggtggtgtggcctgagggcaggtgtggcttgcagagctcatcactggggcaggtgcagggctctggggtgctgagctgtcactggcgaagggcctcaggtcccccccaacagctcccacctgctcagccacagcgtggatgcgtcccgggctccccggccccgggggataccataagcacagaggtggcctctttgaatcaggggcttcccagggagggtctgaggctgggctgcgggattactccttccttgggaagcaggcaggggtggccaggcacagtggctcacgccagtgatctcagccccttgagaggctaaggcggatggatcgcttgagtccaggagttcaagaccagcctaggcaacatagtgagctcccgtctctacaaaaaatacaacaacaacaacaaaaaattaactggtggtgaaaaaattataaaaaattatggcagtgagtgcccgtggtcccagctactcaggaggctgaggcaggaggatcccttgagctaggaggtcgaggctgaagtgtgagccatgatcctgccactgcactctagcctgagcagcagagcgagaacctgtctctaaaaatggaagagaagcaagcggggggacctgtgtggtgaccctggggttgtgccccgccgagcaaaaccaagatgggtcag

SEQ ID NO: 8099 - DNA, 6000 bp, Homo sapiens
cataatgggataaacaagtgggaattgattaaattctgtgacccggacactggaacatggtctgctaatggtgatccccatcgaacgaaagaaaagcacccattcgtatgcatagaagaaagactggaaggaggccgggcgctgtggctcacgcctgtaatcccaacactttgggaggccgaggcgggcggatcatgaggtcaggagtttgagaccagtctggccaacatagtgaaaccctgtctctactaaaaatacccaaaaaattagccgggcgtggtggtgtgcgcctgtaatcccagctactcaggaggctgaggcaggagaattgtgtgaacccgggaggcagaggttgcagtgagccgagatcgtgccactgcactccagcctgggcgatggaacgagactctgtctcaaaaaaaaaaaaaaaaaaagaaaagaaaagaaagactggaaggaaatggttagcctcagggccatcgtatttgctgttcctcctgcctgcaactctgttgtcataggtgtttgtatgtctgatttgctctcttcctccaggtgtaaatgcaattatcaccacttctaagaggctcccccagggaccccccagtttttgcagccttgcagtgtggtttatttaattatttttggcatctcttagcactgcccggccttatgttattgacagtgtttgtttttctgtgggtgtccatcccccctgcaactagtctgtgccccccaacaggggcaggagtgctggttccatcatgcttaccactgtgtcctcagcacagcacacagtaggtgctcagcacatgtacagggaaagaatgaatgagaacggccgcatgaaacagtttctctctaggcgagggatggattgtgggtaacttttattttcttctttatgctgattttacctaattttctgctgcacgcgcctattttataattagaagaaaagttattttgaaaaaaattaccccccaacgtcccagctgtgggagctgacgtgatccagccccgtgttcctccccaagggcagccgcctcctgggtgtatacagaggacatatcaatggaacgtttttggaggggtccaggggtcagcccccaagggcacggagtaggcggggcaatcagggagggcttcctggaggtggccacccttaacctttagggtgctcaggccaaaaacccagaagtcatccttgagtcccctcttttctgtacatccccaaatgagccgtttagaaaattctattgggtctgcctagaatgtgcctttctccctcatcctctacccagtccagccccagcctagtcatcccccacagtctgccctccccacagcagctgagcatgtctgtgagtacctgagtcagggccttcctctacccacagccctccatggctcccaccttcctcagggtcaaagcccaattcctcctggaggcctctgaggccgtgcgcatcttgtccccattccttccctcccctccctcccctcccctcctctttgtctccccttcctcactctgctccagcaacactggcctcctcgccattcctccaacacgccaggtgcagtgctgccccggggcctttgcatggactgagctctctgcctggaatcctctttcactttctctcaccttctcctggtctttgttcgcatgtcacctcccctctctcctatcctgtgtttattttattttacatttttttagagatagagtctcgctctgtcgcccaggctggactgcagtggcaccatcctagctcactgcagcctcaacttcctggcctcaagcgatgcttccgccctcagcctcccaagtagctggaaccacagtcatgcgccaccaggcccagctaatttttaaaagtttttgtagagatgatgggctatattgcccaggctggtctcaaactcctggcctcaggcgatcctccctcctcatcctacaaccctgaacccaatcatcctcagggcccttaccaccatctgacccacagtggatttgatttcttttgtttctcatgtgtcaccctctttagagcatccacaccctgagggcagggatctttgtcagtcttggtcactgtgtgtctaggattgtgcctggcatcggggcttggaaatgtttgtttagaaaagggtaggctgggcttaaccttattacgggctcatgtctgtgatcccagcactttgggaggctgaggcaggaggttcacttgagtctaggagttcgagaccagtcggggcaacatggggagatcccatgtctacaaaaaaatccaaaaattagccagacgtggtggcatgtgcctgtagtccaagctactcaggaggctgaggtgggaggatcacttgagcccaggaggttgagcccaggaggttgaggctagagtgagccatgatggtgccactgcactccagcctgagcaacagagcgagaccctgtcttgaaaaaagggtaggtgaagatgcctgctttatgacaagggcacacacagtgtggcctttggaggagaataaggtcggaggggctctcctgggtgaggctgggcctgattgtgcaaatgtttgctgagaacctcctttgtactgtggacctgtgctaggtgctggggacactgggtgaccgagacaaatcctgctctgcctcctgaggtcacagtctggtgggagaggcagacccggggactaggcgcatgtagggctctgtgctgatggggccacccagccaagggggagggcacctggcccacctcccccagcccctcgggggtggctgtgtcccctgccaactgcagtcaccactgtggaataggggcaagagtctgcctccacagagacatggacaagaggcccagagagggcaggactggctgggaagcggctggcaagcccttgtctgccgtcccgagtcctgggcagcccagagccaggcctgtatgctgcaggtcatgcagccccaagcctcctgacagtgtggattcattgagcacctgttcagtgcttggcttatgtggcagatggggaaactgtcggcccgagaggtacgggtgctttcttgacacacggggcatccctggattcaaactcgagtctgtatgagccccgtgccttgccacagatacaagcaaggtgcctactctgctcctgagggcccactgtgtgcccagccaagttggggaggtcacgctggttgctcctacgcctacattgacacagggaacctcctgtgtgcctttggtgatgctggggcaccaggcagcctcctccatgaagcacctactgtgtacctcgtcgaggatggggctgcgtgggacgggggacgtcacggcatcctgtgtttagcacctcctgtgtgctctgtgtcaaaggggcaggcagggagcctgtgtgcagacactcacagaccacctactgtgcatggtgctttgtggactaggccacctattgttggagatggggcggggcgattccatgctccattttgcagaggagggaaactgaggcatggtaagggaagggggcagtgtggtatcccccagtgagggaggcatttattcgatgtttgaaggagatgggagccagccactgaggtagcagtgggagggcatggacgggagccgtgggagcggaattgtttctgctgggctctcacagccgcctgtgtgtctcccatcaaagcccacgtcctttgccccactgagtaatggcttctagagagtggggcgtctgtcttcaggatggccctgtacctagataaacccaaggggcttgaaattattcatgatatatcctcagttccgggggccccaggcctccagcagcgctgtggtgagagctcctcctctggacccaaaccctggttccaattcctgctcttcccggccgtgggcagccgtttctctctctttctcggctccgttctttgcagaatgggggtgatggtggggtctgcctcctagagccgtggccggtggcctgaggaagcacagctgatggcagctgagcgcccaggacatcccgttggcgttggcgttcgggcttcgtcctcagcgcgaatgctgggaagagaggcgttttttccagggatgggagcagacgcgggagcccttgggtctccatcccggcctctgcccctgtcccgtccccagacccccaggtcccgctgggcttctacattccgggcccctccggtggagttttcaaacccgcaccccgggcgcaacgctggctcggattggccgcccggacaggtctgcccctccctctccctcctcctctccctctgctccggtgtcgcgggcctggcacggcggccccatctgtttccaatctggccctgtgctctccgccccctcctcaggcttgtggcgagggtgggggcctctgccacggtgtccccccattcattcccctggacccccagcgggagggaagcctctgcgcccgcacctctcccctaccctctggtctaagagggggaagaggggacgccccccgcccccatcaccgtgcctccggtcccacccagactgggaggggaactctgccccttctccgacctcctgtagttgggtgtgtttggggagccctccgccgccctgtccggcatccagcctcctcatgcgttgccatggctacgatcagagctggggaagcgaggagcagtgtagaggctccccgtgagacgtcttcgggagggaggggtcttgggtcgtgccctccctggggcgccccttcgctcagtgtttcatggactcctgcggaggctctccgcgcctccagatggggctcccctctggtccccccgccccacttccggccggggccccgccctgccccccaatccccctcctcggggcccgtcccctgcagccccgcccactgcaaccccgccccctacagccccgccccttgccccgcccccaggccgagctccccaggccgaggcctctcccgagtcttcgctgcgcgccgcgctccgggcggaccgagggacgcggggagcggctgcggcgggccctgtggaggcctcgcggggcctgggcccgatctccgagccgcggggtgagtgcgcccgggacccccttccaccccgaggcccgggccgccccgggctttgtctctcttgtcgcgccccctccaggctccgaggctggggaccacgggggtccccacagcccagcgcgggcctgaccgtgccggccgccctccagggccagcttgggcctgctgctgcctggcgcccccccattcaggcccgtcgcttgcactttggaaaactccagaccgttatgctccgcagggtcccctcccccgcctggcccccagcccgacctcctccccccaccccctctcctcccccacctcccgggggcggagccaggcgcggggcagccttcgctgccagcccgggggagctgtgactggggacttcgcagaaggcggaggaggcaacaggaccgcagagggggcaggtagcggtggggggtgcatggcaggaatccctgctcttagccacccccgaaaatcgcaggaagtttacctccatccatttgtttccgctcctctcgggcctgtggaccccacgttgcctctgtgctttgttggggggctttaagaaactggggggcttggcctcagggaggggcctgtggtgttgtcttctgagacggtcagggcagctcgtacctttcttttacccattcccgtccctgggctctaagccgttccaggacccaagtactgagctgacagagtttggtgaccctccccaaggggcttcctgcagaacccaggctggcctcagctgtctgttccttccagagcctcacccccaccctttaagtctctgccagaccccctagggtggatgcgaggctgtccccgtctcggtctccattgcctggggtggtctctgtctatggtctcagtttctacctctgaaacccaggtgacgccagggatgctgtggataaagtg

SEQ ID NO: 8100 - DNA, 6000 bp, Homo sapiens
caccgcgttcctaggattcagtgggatgataccagggccacgcccgagaactgcgcacgtcgcggtggtttccagaacatgattccagggatcgggtgctccgggatagtcccactgccagagtttggccacgagcgtgcgcccccagtttgcagagcgagtttagcccaagagcttttcacaaatggtttctttccctaaaaggccttttacctttggtgtcagccgccgccagccatcaggaatcaggaatctagttagcggttgcccttgtatccctggtcgaggccctgatgtttggcccacgcacagacgccgacgctgcgaagccctccgcgcttctgttcgcccgtcccgttcgagctccggctcccggtcactgggaccgcccacgtctcaggtggcacagcttggacgcaggtctgtgtccccttcttccgcttccggcctcggctccgccggaagcgcatctacagtggactgggcctgcactcgagacgtggtggctggcgcgtcggccggcgcggagggatgacgcgaggaggcagcgaccaatgggaaacggcgtagaccggggcgcctgcccccccgcccagccccgcccccgcccggcgtcgggccgtcggacgggctggaaggggcggccgctcgggcaggatggcggcggccgcggtgggcgcgggccacggcgcggggggcccgggcgcagcgagcagcagtggtggggcgcgcgagggcgcgcgggtggcggcgctgtgcctgctgtggtacgcgctgagcgcgggcggcaacgtggtcaacaaggtgatcctgagcgccttcccgttcccggtgaccgtgtcgctgtgccacatcctggctctgtgcgctgggctcccgccgctgctgcgcgcctggcgcgtgccccccgcgccgcccgtctcgggccccggacccagtccgcatccgtcgtccggcccgctgctgccgccgcgcttctacccgcgctacgtgctaccgctcgccttcggcaagtacttcgcgtccgtgtcagcgcacgtcagcatctggaaggtgcccgtgtcctatgcacacaccggtaggttccgcgcccggcctcgggggcggcggccgggcccgccgcttcgggtttgggcgcatggataggagtgcgccgcccggggcgcgtcccgccggactgagaagtcagcagaggggctgccaagggtttggtaggggagggacacgcacggggttctcagggagaagaggagctgagaagagagctgagaggtaagcaggacagaccacaacagccgtggcaggaggaagccctaccgaaagagaaggggcgaagaggtgtgaggggctgccaggccctcccatcccgccgtggaggtggaacaggttgggccctgaaattcaggcagccccctgagtgcccatccctctctttgcagtcaaggccaccatgcccatctgggtggtcctcctgtcccggatcattatgaaggagaagcagagcaccaaggtaaccccgggcagggactctgggcagatgggagctccagggggttcctccctgttgccaactggtgacgtggtcaggatcctggtctgcaggctgcctggcttcccgtcaaatagggaagtcagtgtagaggtctccagtggccttttactactcaagttctagaatcaccctgtgagcagtggtgtgtggagtatgtgtccctctgtgatctctgctgtgtggtcttaggaacactgttgtccctttcagatccaattttcctccccgttttgattccctacctgggtttgctggtaggtgatgggttggtcacatcttggccatacaccccatgtgtggcctttccagtgggactagggatggatggatcagaacgctgtcggttaggtgttcacttttttttttttttttttgagacggagttttactcttgcccagcctgaagtccagtgacacaatctcagctcactgcaacctccgcctcccaggttcaagcagttctcctgcctcagcctctcaagtagttgggactacagacgtgcactaccacacctggctaatttttttgtatttttaatagagacagggtttcaccatgttgccaggctggtctcaaactcctgacctcaagtgatccgtccgcctcagcctcccaaagtgctggtattacaggcgtcagccactgcacttggctaggttttcacttcttgacaagagatttctgtcaggggacctctgggatcagaagccagacgcgatccaaggagttcgatcttggcaaaatccagcaaagtcttagaaattaaaacagccagaagttgtgatggtctgggaacggaagcgaaagtggcacacaggactcagggctgcataaggaggatgctttgggcacagtccaaattctgttcaagatgccaagccagggtatttcctggcttggggcaagaatagccatggctttagccggagacagctttatcccgtattcttaagtggaagttgggcgcttgttgtctcagccggaatccatttcatgctgatgctggacaccgtgcctcttttccaagtggttggtttctggcatgttgtattttatgtaactcagagaggtagtgccctggatcggcttatagaaattgggccacctatggctgatttttttttattcctgcctgtctttgtctcagcaagacctgtgtgtgctctgtagccctgctcccccagggtgatgtcaggctgtgacttggctcctgagaagtcagagttgtccctgaggtgtgtagctgcatcaccggatatcatcgtgtgtatcaggtttccccgttgtacgggacattgtacccagcttgggcaaggagccggaacttcacacagtgaggaaagactgggaattggcccggttaggcagccagactaattataatgacatcataacttctaggaacctgccctgcaaggcagataaggccagtagtcatcattcctgatctcaggttttcctgagatggactgagaggggagaatcatgtgcctgagggccacagcctgatattcgggaagctggaattcaggtccacagccctcggtctgccctccttgtggcatgaccactccctcctaaaatctccacctctcctatctctccttaagagtgtttgtttttctgagacggagtctccctctgttgcccagattggagtgccgtggtgcgatctcagcttactgcaagctccgcctcctgggttcaagcgattcttgcctcagcctcccgagtagccgggattgcaggcgcgttccatcactcctggctaatttttgtattttcaatacagacagggttttaccatgttggccaggctggtctcaaactcctgacttcaagtgatctgccctcctcagcctcccaaagtgaagagtgttctttgtaggacaggattgagccgagagtcagaagagctggacacgcgggaatggatcctggtggatcctggaagttgggagttgtttagccctgcatgccagaccttctagaaggctctctgtcactatgtttgctactcgttcattcagctagcagctattgagtgcctactgagtgctaggcaccaggataaagcagtgaacaaggacctgctctaaggtacactaacgggaccggatgatgtaacagacagagtgggtggagaggctgggcacggtggcccacgcttgtaatcccagcactttgggaggccaaggtgggcagatcacgaggtcaagagatcgagaccatcctggccaacatggcaaaaccccatctttactaaaaatacaaaaattagttgggcgtggtggtaggcacctgtagtcccagctactcagaaagctgaggcagaagaatcggttgaacctgggaggcagaggttgcagtgagccgagatcatgccactgcattccatcctggtgacagagcgagactccgtctcaaaaaaaaaaaaaaagagtgagtggagagctctctgctggggaagtccaggcagtggccctgggagcacagcacaggagcctcccaaggtggaggtgggttggagaaagcactccttgtggaggcaggaggtcactgggaggagaaggcatcagtggagtgtgccagccaggagtaaccatactggaagagcctgaagtaagagggaatgggggctgggcacagtggctcacacctgtaatcccagtactttgggaggccaaggtggatggatgacgtggatcaggcgttcaagactagcctggctaacatggcgaaatcctgtctctactaaaagtacaaaaaaattggccgggcgtggtggcacatccctgtaatcccagctactggggagtctgaggcaggagaatcgcttgaacccgggaagcagaggttgcagtgagccacgattgtgccactacactccagcctgggcgacagagcgagactttgtctcaaaaaaactattttttaaaaagagggaatgggggagccttatagaggatcagggcttcaaaccctggtgcgtcagtggcagctgaacagatctgtggagttaggaccagccccgggctgtggccctgagcagaggctcttaatgggggtgacggtatggggatggggctacccacaaataagccctgcccctggcgctctgataaccacctgcccccagccacccaccagagcgtcactggcacagcaaacaccactttcaaagtgttaggtggtatccctttgctgagggaggagaggggctcttccctgggcatctgtggcatgtggcccagctctagtctggcctgtgagcccttcttgatgacctcttcctgcaggtatacttgtcactcatccccatcatcagcggtgtcctgctggccaccgtcaccgagttgtcttttgacatgtggggactcgtcagcgccctcgccgccacgctgtgcttctcgcttcagaacattttctccaaaaaggtatttggtcaccatcagcggacatgcatggggtttcaggggtgtgcgggcagcaaactggtggcattgggaaaacaggcggagtagaaatttctttgctattagagcagaaaaatcttgattgccattctgctgattttctgtttgtcattttgctttttaaatagtttgtttttctggccgggcgcagtggctcatgcctataatcccagcactttgggaggccaaggcgggcggttcacttgaggccaggagttcaacaccagcctgaccaatatggcaaaaccccatctctactaaaaacataaaaattagccaggcacgcatctgtaatcccagctactccagacactgaggcacaagaattgcttgaacccaggaagcggggcttgcagtgagctgagattttgcatcactgcactccaacctgggcaagagtgagtctccatctcaaaaacaaaaaaaagtttttctattataaagttaatgtgctcaataagaaaaaaataaagaaaagctcttttattgagaccaaggctcactgtcgcccaggctggagtgcagtggcacaatcatagcttactgcagcctcagtcttcgaagctcaagtgatcctcacacctcagcctcataaagcactgggattacaggcattagccaccaggcctagctaaaaacttcaatttaaaacaagattttaaaacttgttgaagcctagtgcagtggctcacatctataatcccagcactttgggaggccaaggcaggaggatcacttgaggctaggagttcgagaccagcctaggcaataggaatagagtgagaccccgtctcaaaaaaaaaaattgctcttaactcctgtgataatcacacacttttcaggtaccacagttaatgcagtctctctattggaaataccacttatttccaacttttcattgtaatgtagaaacaatcacgtgtgtgatgttttcctgtctcagttatttcattatgataggcttacagttc

SEQ ID NO: 8101 - DNA, 6000 bp, Homo sapiens
tgctgggattatgggtgtgagtcaccgtgcccagccttgtgctcccagctttaagtgtggcaccagaggcacagcaagatggtctcgtttgtcctgatgacagacgagggagtgacagaggcagcaccagagcccagtggcatttcagaatatacccatagagctgctgcacccaaaacctcccgggggggtcttggaactgtaggttgagaagagctaagccacaatgctttctttgtctctgtcaggagtacgaccccagcaaagcgacctttgtgaaggtggtgccaacccccaacaatggctccacggagctcgtggccctgcaccgcaatgaggtagggactgcctgctgggctcctggaggaggggcttgagtaggattcccaggcgctgacaccccaaggtcaggggcctctgtggcaaacacaccttctaccgcagggcgaagacgggcttgaggtgctgtccttcgaattccagaagatcaagtattcctacgatgccctggagaagaagcagtttctccccgtggcctttcctgtgggaaacgccttctcatactatcagagcaacagaggcttccaggaagactcagagatccgagcagctgagaagaaatttgggagcaacaagtgagtccttgatttgcctgtagcacctttgcctttctgtcctgctcccctcctgattcagggtgcctaggaagcgggacagaggcatctgcccttttatttatttatttactattattttatttttattttattttttatttttgagactgagtctcgctctgtcacccaggctggagtgcagtgacgcgatctcagctcaccccaacctccgcctccccggttcaagtgattctcctgcctcaacctgccaagcagctgggaatacaggctccccccaccacgcctggctaatttttgtatttttagtagagatgggggtttcaccatgttggccaggctggtcttgaactcctgacctcaggtgatcctcccatgttggcctcccaaagtgctgggattacaggcgtgagccactgcacccggccaaatctgcccttttagccaaatgtcccaggtgactgtgatgccgcttgagcaacatgctctaagtccagtctcccctgaacttgcctgctggcaggaaccccagagggtctgcagctggaagcccgtgccctggggtgtgagaccttgagtgtaaggttcttcacaggagtctagcctgtggcccctcctcagcaacagctttattttaaattcttttaaaatgtttatttgtgtagagatggggtctcgccgtgttgcccaggcttgtctcaaactcctggcctcaagcagtcctcctaaatcaacatcccaaagtgctgggattacaggcatgagtcactgcacccaacctaaacatttcagtcctcactgtttcgagtctacgcatctcagcgcttcagaatggtgatggaagaccgtgaccatgtctgcccttttgtactgagtacaatggccaatgtgcggtgcacaccctctcccttcatcttcaccaaaactgcaaatgctgacacgtggctgggagccggagaactgggctccaaaccccatcatggccttgttacgatggtcctcaacccagaaacccacagaacacctagggagctctttcctgacttaatcactgttcagagattacaaatatgttgactacaactatcaatctaatacaaggatttataagaaacatttagcaacttcccctaccccaaggttggccagtcacattaatggcctgtggcaactacgttccctttcatgctgttcttactcaacgcaaaggtacccagcaagatacaagggaagggcttattgtttgatagcagtggggttgctctttggtttcctcttctcacatcccatacataagacgtccatgcagttaaagggcagagcgagaatgaccctcgttgacatgactggtgccctgatcagattggactatggcacagagtactgcagaacacacccttaggcccaagtccttgcattctcgagccttttttttttttttttttttttttggagacagggtcttactctgttacccaggctggagtgcagtggtgtgatcatggctcactgtagccttgaactcctgggctcaagcattcatcctgcctcagcctcccaaatagctgggaccacaggcacacaccaccacccccagctaatttttaaattttttgtaaatagaaggtcttgctgtgttgcccaggctagtctctgactcctgggctcaagcactcctcctgcctcggcctcccaaagtgcttgggattacaggcgtgaaccaccctactcgacccattctggggctttaattcaggaatcatagaaaatctcagctttggtggggctgggtctcagtgtcttctgctgtctgtagcttcagggcctccatctttcaatcagaggttccttctctacttgctgtgtcactcgaccagatgacgggctctcgtctgacaccagccccaggctgccaggaagagcatattgcagattaaggagcttcatctgttttatgcagagccgagggctgtgggcgggcagcatgtctaccccaggctcagccaggatgagggagagccactgccaaatggatcctcctatctggaagctcgccagggctcccgacgcccacatatggctcttggtttcttgagagcggcctgccatgctcaggttggaggggtcagggtggagactccataccccagaggccttgccctgggaacaggatggggcctggtctcttgcagggccgagatggtggtgcctgacttctcggagcttttcaaggagagagccacagcccccttctttgtatttcaggtaaagcagcagctctggcccatctccccatttcctcccttggggctttcctaaccggatcaagcctgcccaccacttctaaacctggaagcctctccccaccctcacatatcagatccggtgggtggaaggggctcatgggaacagggcgggtagggcaaggacagacaggctggtatcccacaggtgttctgtgtggggctctggtgcctggatgagtactggtactacagcgtctttacgctatccatgctggtggcgttcgaggcctcgctggtgcagcagcagatgcggaacatgtcggagatccggaagatgggcaacaagccccacatgatccaggtgtggctgccagggagacccaggttgggggtgcagcacaggtgcggcttctgtgctgacacccatgccccgcccaggtctaccgaagccgcaagtggaggcccattgccagtgatgagatcgtaccaggggacatcgtctccatcggtgaggccgggttccgctcagtcccagtgggagccccagcctcagggcctctggccaaccctcctgcctctgccctgcaggccgctccccacaggagaacctggtgccatgtgacgtgcttctgctgcgaggccgctgcatcgtagacgaggccatgctcacgggggagtccgtgccacagatgaaggtacttggtggaggatggggatcctcaagctgttcaggaggaaacaggccaggaggtggaggcccagggggtggcggggatccccctcaggcacaggcggaggaggcagtgtgggcacagatgagctctgtggactggggagccgggtggtgggggcgaggaaggaggtgagagagccaagggcatccagggtacattggtgccctgggatgtcagaccaaggtgggctgggagcagtccagaggggtgagtcccagacgaggccaagtgcaggccccagagagcaggcactgtgagtgcaatggggagaagacaggacggggtgagggtgaggatctgggagctgggtgggatgtattggtcgggtggggatccccctggctcattccagcctcaaggtccagctgtccaggaactcagatggagaaggaagcaaggtaggcctggccatccagattcacgatcttcctccccaggagcccatcgaagacctcagcccagaccgggtgctggacctccaggctgattcccggctgcacgtcatcttcgggggcaccaaggtggtgcagcacatccccccacagaaagccaccacgggcctgaagcgtaggtgcctcatgggcgtctgggggtatctgggcttccaccccctttgcccgtctgcttgatcatgagggagtcaggacgaggagacaggcatgacggtgactctgcttctctccccagcggttgacagcgggtgcgtggcctacgtcctgcggaccggattcaacacatcccaggtgcggggccaggtctggggagggcgggccccagggcagttggacagccaaggtatcagccctttccgaccccagaacatctgccccacgggctgactctggcagcacggccctggacctgggccagggtgcagaggccaccccaagaccaggcccacgcttccaggcctgagctgctggagggagtccagacagcagaaaggctgttcctccattcctccagggcaagctgctgcgcaccatcctcttcggggtcaagagggtgactgcgaacaacctggagaccttcatcttcatcctcttcctcctggtgtttgccatcgctgcagctgcctatgtatggattgaaggtaagcgccacggcctctgtggtcccctgcgcccaccctccgaggctccaggttggcaggccctgtctccacaggtaccaaggaccccagccggaaccgctacaagctgtttctggagtgcaccctgatcctcacctcggtcgtgcctcctgagctgcccatcgagctgtccctggccgtcaacacctccctcatcgccctggccaagctctgtgagtgtgtcaaatgggatggggtgccgagtgggctggggccaagcaggacccctgacctcactcccgcccctagacatgtactgcacagagcccttccggatcccctttgctggcaaggtcgaggtgtgctgctttgacaagacggggacgttgaccagtgacagcctggtggtgcgcggtgtggccgggctgaggtaagcatcaggggccctgcagcaaaggtcacccagatggggtttctgggaagtcgagagacaggtggcccatccaccccaagcccttgcagtgagggcccgtcagaggccctgcctcgggttcatttccaggggctccccacaaagtcctgggtgtcagccatggtagcggcacgggggctcagctcaggcctggaacatcccacaccagccatgcaccacatgacccccaggcacaatgcctggcttctgggggcatctgtgaagcaggtgcaggtctcataaagacccagttggcgcccaagccaccccagtgacaagcacggaatgaatggccttgggggtccttctgctggtggggatgcagcttcgccctacccgcctgcactctgtaaccagctgttccccgaccttgcagagacgggaaggaggtgaccccagtgtccagcatccctgtagaaacacaccgggccctggcctcgtgccactcgctcatgcagctggacgacggcaccctcgtgggtgaccctctagagaaggccatgctgacggccgtggactggacgctgaccaaaggtgaggggctggggcctcaggcccagcaagggggagccactggctctcacagccctaggcaggtgggctgcacccctcagagcatcttggggacaggcaggcctacagctctgatgctccccgaggtgggtggccagaggctcactttagacccaggataggccacgtccttgggtgtccctctgggttggaatctgccctgccctggccgaagccacagtgccagggtcctccaagcccaggtcttccagctctggaccaacacctgctctagcccagagccccgatcaggccctgggggaggcag

SEQ ID NO: 8102 - DNA, 6000 bp, Homo sapiens
ttggccatcttggctagactctcccccatttcttgtatcttcatatacctagtaatttgagatttcatcctggatattacaagtgataagttggagagaccatggattccattatgttctgttgaaaaatactgattttggttgtttgtttaatttggaaagcagttaacctggctaatctcaaaccctcagctctgaaatctcaattaagttcctttagccttagcagggtacctggagttctccagcaaataagtagttcaacaattggtcagaaatttggacagagtttatttacagaatttggggctccccctctctggctctttcctttttgcaattctaccaccactatcagtagatgctataatcaccttgaattctgtcctctggttcttgaagtcaaaaaaattaaaacatctctatctgggattaagccaccccacaaggcactttccagggtctgcctttaggccgaaagcattaaaaaaaacacccaaaataggaaacctgcttcatccaacccccttcagtatctgctgctttcgttcactctccagtaatttcagagaactgggttcttaaaaatgttttcttcagagttaatagctgttattcacaggatgcttgatccaatagaagctactcaaacattaccagaagaaactctccagacacttggatactgacaccttcgccctgtgatttaaaaagttgttcatccctgtcatctacccaacttctttcctacctctctactctaagccctgacattctactggtagggaagccctttatggccaggaatgtgagctatccaaacactcaggaagaaagaatcttgactttcctctcttctttgaccttcttcactctatttcagccaatacttccacaggcccacctttatccttgtcatcactctgaaatatgaaacacagacatttcactctccgcccacaacatctagtttcccaactcctgcactgtctcactgccaatggcctgaggggtataccagctgaccgtatctttggttaatcttccaaagaatgcaaaaactagaagttgaagtctccctcctattaaaagactttttttccccctgacattttggaatcttttgttatgtgcttacagggaagtttttcaagaaccacaggagattaggggcaattttctgatgtttcataaagaaaacaggtggggcttggcagtccagggtggtggttgacagcatggacttgacagtcacacaaggccgtactccagctctaccctcattcattgtagaacccaaagcaagggacttccaattttgggagccttatccaactcatttgcaaaatgaagatgataaaaccaacctcacaggcttacagtgcagcgtgtaattaagatcatgctcataaaaagcttcacatggtttttttttttagaagagaaatggatctgggctagggatatttttgaatccagacacagagaggtacaggcaaataccacatgttcatgtgtacacaacagggcccacatgcctgcatacagacaccaaaatgtatgcataaaacatccaaacacttatatgtagtcacccagttgtgcatgaatccacacaaatgtgaacatgcagccatacatcaggttggacaaagaaatgcacgtcataggtaccccccaagtggcataacacaaagcatgcactcaggctacatgcacagacagacagagactggcaaacattcaggaaaggtggcaggaacacacatgcacctcatcaggtactcacaaagatgtgcatgtgtagacataagttggaatggatgcccacttatcaagcacaaacacacactccacaaagcctggtgcatgcataaattcatctgtcaacagggacatgctgaaacatacatgcacacaggaacctcaaacatgcactcagactgacacacacacagacagacgtataaataaggataaacatggcagaggcatctaggagaaaccactggacaaaatcatgcaaagttgcaaagttgcaggagcacacagggcagttaagggtaaggttgacttgcagggaacgagaaagaggaagacagaaagacaagatcagagaaaacgggagagagacaggtgagcaaagtcctgtgcagggctccaggcccatccagagtaatctgagggcctaacactggcctttcttcctgcggatactgcttaactcagcgccatgctctaggaggcagcctaagttcaatttcctattcacagcttcatgggtaaggcttggctatgctaaggaagggatgtggagagaggttcccaaaaaactctgtctcccttcccccttctcaaaggaaaagttttgataacgttagagcagagaattgtaaaagccaggagggggcttagagaacatctcgtccattctcttcaacatacagatgaataaaaacagctaatattcattgagcacttacatgtacctcccctgctttgacccatatacttctcacctaaatagctgaagagctaggagctgtttttggctccataaggttcagagagacgaagtcagctgttcaaggtcacacaacaaagacgggataaggtttggattccaatccatgccttaaccttgctcttaaccactgtaccatccatccagaaaggcaaacagaggcccagcaatggaaagggattttcctgggttcaccactaactcactctgaaagcctgtacccgcaccgccactgggacaagtccctcccacttaatttcagacaccgttctcttactccacacttcagagtaatcaacaaggccaaaattgcttgaactctatgtccccaaatactagagttctcccaacctgactctccccacccccaccctggccaggtcatggcagcctgtctgaacactcagtgcccttcctagtgccaaactcactgagaaacaaactctccaaatttctacctctctcctttttaagaaacaagggagaagaggaaggacccaggcttgtggccagcccaagtgcaggctggtgaccaggattagatggattgatgtctgcccagctggtgctaatcctccttcccacctcttcccccacaaaatcaataaacagctttcctctctctgctttgttctctgctctttgattcctccacacaggtctcagagctcaacagccaatttgagccagttagagccagtcctgggagtgtcaacctcacccacatccacttgtccaaatttggtgacctagaggagaggtgcaaccctggaaggaccaaccatcagagcctgtcctgtggccatctggggcccctctcaggatctggctgaggctcatctcagacccacataggaccaatatcagcacctgcctcatgctcatgtcacagcccactgggaccaacctcagaccctatatggtgccattcttacgccctcctgaagcaggacacacttatgccctcaatgaaacctgaaacaacacacagagccctcttggcaccaaacatgacttcaatattctcctggtatcaagttcagtaccaacttgtttcccatcctcgcatacacctgggggcagtcccaaagccaacacgatgcctttccctccctgaacacacctgatgctgatatcagaacccgccaatgtcatcagtgtgtccactgctgatgccagtctcagcactcacctcctgctaagcctggcctgcacttgactcccagggtgatctaggccagtcaatgacgggggatgagaagaaagttcacatcccagctccctcacttattccctgtgtgacctcactcaagaggatttatggagtctagatctgctcatcttcaaaatgaggatgatcatgatgaacaaacctcactgttacaaagattcgaccagatcatacacacctagacttaatcttcccatatacgaccatgctcaccaaagggtaactgccccgtttactaaggaagaatttccctgagggaaggacaggagggctactcatcccttctccactcacacccaccccaggatctacctctgtgcctaacactggagtttaccccaatctcttctgcgattgttccctctgcctgctaatagtagtagcccctgacaaagcaggaatcgcccttaaaggagacttaactcaccctcaaatatgatcttttcctaaatactccctttctactggtgggaaaaccaaatccagaaaggggaactaagtactcagagcaggagagatgggagttcagggccactcatgcatgtcccctgcctactgtctgttttctgtcctctgtagacccttatataaaatgagaaagataaacaacaatcataatattaatagggatgatacaatcaatctagtgggtttccctaaggatctgggttggaaaccagtggaggtctttgtaaattacaacccttgggacacttgagctttttccaccatttgggggttgttgttactatttctccagacctggccaatccctctgccaactgataacacaaggtactcttctccaggtgtgtggaaatttcccttgaaatatggctctggtcttccacccctttgccaaccagagatggtcagtggagtttccatggcacccatcctggcctcactctgaggttccagtgaggattccgggcatcaagagacagctctgggcaaaagcaaaatcaagtcagcccctgggcccagtgctgggctgctgggctttctgggacgacctactgggcttgctacacactcctcctcccagaaactccacacccacagccctgggtcttcctagccccaagactctcaagtccatatgcctggaatcccccctcctgagacccttaaccctgcatcctccacaacagaagacccccagatgcacagccacacttccatctcaccctaataaaacccagacctttgcattcttctcctcggaacccccaaatccacaattttggggtgcattctcactcccagatcccaaatccaaagcccaagtgctcccctatgcaaatattcccaactcctttgttctacagcttatctgttgcccgctcctaaatccacagccctggggcacccctcctgaggtaccacagatttagtcgggaggtaccctctctgttcagcttccctggggtccccctcctcctcctttgctggttgtgtccaaagctaggtggggttcacggagaggatgtagttgggaggtgaaatgaggtgattttataaccagccaaagtccacccctttttttcaggcagtataaaggcaaaccaccccagccgtcaccatctatcattccactgccaccatgctggcctcagggctgcttctggtggccttgctggccagcctgactgtgatggtcttgatgtcagtctggcagcagaggaagagcagggggaagctgcctttgggacccaccccattgctctttattggaaactacctgcagctgaacacagagcacatatgtgactccatcatgaaggtgtcccaaggcagggagatgggtggcacggggtgggggctgcccagttggctgaggctttgtggcaggggattgaccagtgtggaccagagtcttaggaaagggagttttggagtttcagcatcagggtcctaggctggaaagacaggatcttgggatgtccagctccctgactgtgagaacctgggggcaaaacatcccagtacatgatatctcggtgctgcgcccattcagagtgggggctgctccctctaaccactcccacctgcctccatcagatcagtgagcgctatggccccgtgttcaccattcacctggggccccggcgggtcgtggtgctgtgcggacatgatgccgtcaaggaggctctggtggaccaggctgaggagttcagcgggcgaggcgagcaggccaccttcgactggctcttcaaaggctatggtgagggggtgcccaaga

SEQ ID NO: 8103 - DNA, 6000 bp, Homo sapiens
aaagcggcagtgagccgagatcacaccactgcactccatcctggtgacagagcaagactctgtctcagccgggcgcggtggctcacacctgtaatcccagcactttgggaggctgaggcaggtggatcacctgaggtcaggagttcgagagcaacctggccaacattgcgaaaccccgtctcaaccaaaaatacaaaaattagctgggcgtggtggtgcgcgcctgtagtcccagctactcgggaggctgaggcaggagaatcactggaacccaggaggcagaggttgcaggaaaaaaaagtgaaattaagatttgatgcttacgtttttccgcaagggtggggaaatagtctccaacatcatgaactgaagcatgcaagggccaccatccgagggcttctgcaaaggtcagatttcatgttagggtcttgggaaaactttgagaatgtcaattccctgggaatggcttattttaaggacttggataccattgggaagttctgtttgggatggtttgttcctgtaaagtctttggggatatctgtcatcatggtttctgtgctagggtttcccggaggttgttattgtagggtttctggtaatgactcctattgtagcgccttggaaatgttgaatttgtcatcatattccatttgggtaagtctattttagagggtctccaggaagggcggcttcctaattctcatcatcttcataccctacaggatccctcttcgtcaagtccaccctggacgcaggaccctgaacctactgaggggatggggaaaaccagcagagctccccaagttgggggccccatcccctggggacaagcctgcctcggtacctctctccaaattcctggatgtgagtcacagccctacacagcccccactcctgtgcccttgagccaaactcttcattgactctgtctcttcttttgcctcctcaggcccagtattttggggaaattgggctgggaacgcctccacaaaacttcactgttgcctttgacactggctcctccaatctctgggtcccgtccaggagatgccacttcttcagtgtgccctgctgtgagcttctatgtgggagaataaggctgaatgggggtgaagggagaaggcggggctgggcctcagcttcccaaaggtttttgaggaactgttcttttctgacaccctcaaaggtcagaaggttaaaggggcagaaggcattcggaaagctcccctcccacagtgacacctctctgacttctgacctagggttccaccaccgcttcaatcccaatgcctccagctccttcaagcccagtgggaccaagtttgccattcagtatggaactgggcgggtagatggaatcctgagtgaggacaagctgactgtgagtggcctttgactccaggaagcctcgagcctgggagaaccctgttgtctaagatcatctggcttagggaggggcttgaggtgcaggggcttcctgagccgatggatggggcttctcaaggagggggaggggttcctgggtgaagggataggaattctctcaagtccagaggcaaagtttgctaagcagttgggggcttgggtccagatgtccccagacctgggattaatgctttggtttgggagacctcaggacatgtggttattgtcctcccaaaagtaactggtcacatctcaatctacccctagattggtggaatcaagggtgcatccgtgattttcggggaagctctgtgggaatccagcctggtcttcactgtttcccgccccgatgggatattgggcctcggttttcccattctgtctgtggaaggagttcggcccccgctggatgtactggtggagcaggggctattggataagcctgtcttctccttttacttcaacaggtgctggggagggtgcacctatctatgagtcctattcctcagaaggaagtgaggccctccttcaggaagtctcttactccataaagaaagtcccagttcaggcacggtggctcatgcccgtaatcccagcaatttgggaggctgaggcagattgatcacctgaagtcaagagttccagaccagcctggctaacatggtgaaaccccatctgtactaaaactataaaaattagctgggtgcggtggcacatgcctgtaatcccagctacttgagaggctgaggcaggagaattgcttgaatccgggaggtggaggttgcagtgagccgagatcgcaccactgctctccagtctgggtgacagagagagaccgtctccaaaaaaaaaaaaaaaaaaaaaaaatcaatcccacccttcattcaggaagtagccacctacctaacagaagaaacacctcaaccctattcataagccccagagcttaagtgacaacttaagacatattaaagaaactcaccaacagttcaatatgctgagtttcaaaatcaaactaggaaattctatgccccacccaaccaaatactcaggaaccttctcttcaccataaagctcaaatcccatttgagaacactgaccagaagtcaggaaatgcctgattgaattcacgaagccccacccacctggtaggaaggtcaatcttatgctcagaagtcccacccaccacccgagaagtcttcactttccctcccagggcccatcacacacagtccaatgcccactcagttaccctgacatccaacccactcaagaagttccacctagctctcggtaggtcccactcatttacatcttccaggaagtttccatccccgttcccatcactctcagccagctcaggaagtctaacacctttctagataccacaacaggcaattcagaaagtctatgcaccttcccaggaagccaccccactcctgtacaagtcacaccttcgagccaattctgagactccactggtctgcttggttactatgatattcagctcaggaatttcccccaaaagctctaccttccacagccaaatgaagaagtctcctctccacttcaggaagtatccatcatcctaaagtcctaacttccatcaagaaaagcaccatttcccttcatttcttgtttccagtcccaacatctcggccctgcctgcattccactgccccaactagaaccccaaaaatgacccaattggcaggaagtcccatccctggccattcctagggctggcgggggagggctggcgacaatgacctctacactctgcccctgcagggaccctgaagtggctgatggaggagagctggtcctggggggctcagacccggcacactacatcccacccctcaccttcgtgccagtcacagtccccgcctactggcagatccacatggagcggtgagggacttggtctcctgggtctggagctggaggcctggactcctaggaccctgcctctaatgactgcttccttccccctcagtgtgaaggtgggctcacggctgactctctgtgcccagggctgtgctgccatcctggatacaggcacacctgtcatcgtaggacccactgaggagatccgggccctgcatgcagccattgggggaatccccttgctggctggggaggtgaggtcccagtctctggtgggtgtgtcctggggaagatgatggcaattccatggcgaacactgcggcctgaggatgggaagcaggtagctagagcgtatccaggacagaggggactgggcttcttaagtgacatgccagagagtggtgggaggaagcaaagatacttcccaagtgtctatgctaagtggctcagtggatggtgaagtaggggtgggagtggggggggggttgttgggggagatgataatgcagttttgtttgggactagatgagaggagcctaggcaacagggctgtccacacacggtgctgaatacccaggtgctcaatatgaacattactccatggcactggggagccacggacgggatttgagcagagcaggaatctcccatcttcacttgttcctctcctccaccagtacatcatccggtgctcagaaatcccaaagctccccgcagtctcactcctcattgggggggtctggtttaatctcacggcccaggattacgtcatccaggtaggtgtccgtcataatgacgccacagtgatgtaatatgactggagttgagagggtggagctggtagttggacatcactagggccggaaggggccacagaaacatttcttgtccccggggttgggggcggagagagcacggactcccagggaaatggtggttcctgcggcctggacacccagttgccgccttgtcgccttgcagtttgctcagggtgacgtccgcctctgcttgtccggcttccgggccttggacatcgcttcgcctccagtacctgtgtggatcctcggcgacgttttcttgggggcgtatgtgaccgtcttcgaccgcggggacatgaagagcggcgcacgagtgggactggcgcgcgctcgccctcgcggagcggacctgggaaggcgcgagaccgcgcaggcgcagtaccgcgggtgccgcccaggtgatgcgcatgcgcaccgggtagcagagctagcgctactcagtaaaaatccaatatttccattgaacgaacctgcctaggttgcttcttttcagagcgtactttttgaagagaaagctttgtgcatggacccacggagttgaggaagagagggaggcgaagggtatcaccccttttctccacggcgcacccttgtgatgggccttgtactacgagtcccatgaaggccctcgcctacgctgcctttcgtcaaaggctcctggctccgtggagcatcacggtcgttgtagtccacgccgtggtcacgccctgacgggggcgggcgcagccacaacatgcgtgggaggcgacaggtcgcgacggcagccacaggtggcagtcgggggtggctgtaattggtaagggtttaccagttcctgttctaaggggcggggataccgttccctcggacctcgtctcctgtttctcctctctgccttggcattccaggaccccggggtccgccataaaggcggagcttgaagcccctgggttgggggagcggtgctgcccctcctccggcggtgatgtcactcccccctctgcagcctcttgctgcccagagctgccggggctgggtcacccctccccccatctcgagccccggattcccccatccccacctcgcctcgacttggggtgagtacgggggagggggcgaaggctcagggtccgggggcggtaagacagcccgaatcctagttttggagacgggggacttgggatccagggacccaaagattatagcggggagattcccctcgactctgagctttcggggccaaggtacttggagggttttaggggacgaaggatcgtaggcagagagtcctcacattttcacctttggtgtccagagaccaaggctccgaatggaaccgggtgggaatgggggcagaggaacaaggaaggggtcgtagaagtcagggagggaagacccttccccaattccagggcctggggtaatgggggagggagggttatcaggggacgccgaagatgacgtagatgggagttggagctttcaggaattttgtgtcttgagggcctgggaacggatggattgggaggagcaggggtggggaaaggaactgaaaacgagacagacgttggcctctcccctcctggtgtccctagtcaagagtcgagtctacttcctcctggtctgtgaacatagctgagtgtccagtatttggagccctcatgaagcttccagaagccccctcctctctaatgggtgggtggagactccaggctcacaaatcctcccatagaccctggtggggtctgtggagggccatgagggagtgctggcatccaagtttcccagggcctgatggaatgtggacggaccagcctgctactcccggcccgctgcctcttcccctcccatggcctctaatcctgagtcgcatcgcacattcctc

SEQ ID NO: 8104 - DNA, 6000 bp, Homo sapiens
aggaaaggggtgtgcgagtgggggctggggcactggggagacaaccagagggagggcagcagcctgaagcggagagacagggatctggggacgcgagacaggtatggagaagacaaagagccgagggcggggagtggggcgcaggcggaggggagagggagagaccctggagacagaggccaggcgatagggaagagagacaggcgggttggggaggcagacacagggaagacgcctatgtggggtcaagaggcagcgtggagaccgaggcggtcacgagagcagcacggatgcgtggagagaccaacaggccaagaaggatgagggggctcagcacaggcaccgggcagcccccgacccgccctccagcaaaattggggagagggaagagggaacctgcgtctcagctcccaggaccaggtgcggagggagcagtcggctgtgggcgctcggaccacaggctgcccgctccccacctcgcgggacctcaggatcccagtcgggctattggggggttcccaggcaccggtgggccccggagcgagcctgccccgccgggactccgcgtctgtgcgtcagccccgcccgttgtcctggcaacaacccgttgcccgggcaaccagctttgctctcaccccgcttgagaggagcccggctgttgctctgggcaacgcggtctgctggttcccacgtctgccttcgcccgcttccggttcagaccctgcggaggggcgaggacgaggcagaagtcagcgggatgcctgtggggccgtggaggaagagggtatccctttaggatggaactaggtcctggacaccccctctcaagtgcggggaggctgatactacaactcccagcatgactcgcggtggctgtccggtttctgcgcggctgttcgcgcaaaggcctcatgggagttggagttctttgttgtgcgtggggctcaaaggacgtctggggtgggaatgggggactagggtgcttgagtgtctctgcagaaaagactccaggaccccgccaccatgttcccggagcccccaaccccggggcctccatcgcccgacacgcctcccgactccagtcgcatcagccacggcccaggtgagcaagacccgggggtggggggccgagcagagagaaagcctggccaggattccgaggggcgggattcggacgggtgtactcgggcaggcgggctggaaaatccggctgggatcccgggtcgtcatcctggactggaatgcgaacgaaatggggtaaaaggaaggaacagatttgcaaaaaaaaaaaaaaaaaaaaaaaaaaaaaaatcgaaaccggatcaaggggtgttgcatggaatgggatcttagaattggaaggtccacctagctcttcttttacagataaggaaacaggcccgatgaggagcagggcttcttgtaaaagcatcaggagttgagcagaaatggggggcggggtcgggtaaggaaaggcagaactaacaagcaagcaaatccagatggtgtcagcctgggttggggcatcgaatctctctataggccacattaggtggaagaaaaacacaggaagaaatgcaatgaaaatggctggagggaaaaggaggccagcattccagcttccacgtgtaatcaggactgaatcagcctgcgtgctgcccaggcctcaatgtgtgttgtctccacccctctgcagtgcccccctgggccctggccaccatcgtgctggtctcaggcctcctcatcttcagctgctgtttctgtctctaccggaagagctgtcggaggcggacaggcaagaagagccaggcccaagcccaggtccaccttcaggaagtgaaggggctgggccagagttacatagacaaggtgtggcccagcccagcccctccacctggccccttcccgcaccctgctcctctcaatggcccagctggtcccagtccctgctcccttctgtcctataggaacccaccttactggctcatcctccctgtgtgtctagccctcaactggactctggggacccagagatggaacagaactagttgctattcccaagaacttcccagtctggtgggagagtcaggcactgacacagacactcaccacacagggtaatatgtgccatactacagggtctcataggagcacagaaaaggcatcccactgtatagaaacctacagaaacatataaatatttggctctgggccgggtgcggtggctcacgcctgtaatcctagcacttgggaggctgaggtggacagattgcctgaggtcatgaattcaagactagcctgggcaacatgatgaaaccctgtctctactaaaaatacaaaagccagccatggtggtgtggtataatcccagctactcgagaggctgaggcactgaaaccgggaggtggaggctgcagtgagctgtgatcgcgccactgcactccagcctgggtgacagagcgagactctgtctccaataaatagataaataaataaatggctctgaaagctgaaaaccagctttgtgccagaatactttaaaatatgctgatttttttcagaaaatgggacatatttacagtaggaaaaagtttaaaacagagggtcagacagaggaggcttcgtggtggaggtgacttctgcactgagacctgagggacagagttaactgagaccagagagaaggacattctagtccaagttggagcatgtgttgaggccccatatccagattcaggccccatatccagattctgaggcttatttggggaacaaagagtcatttctcacaatagctgcactctggagtgaagtgtctggagaactcagcagtatccatgtcatgaaggtgatgaaggctacaaatatgttttgagcatgagagggacagggtcagatggtgttaggatgactcctctggaaccctgtgtaggacagatctgcggcgagggatccagggacgaggccagtgcagcagcagcctggagaggataaaagacatttgcattggatgaggccgttggaatggaaagtggtcactgcagggtctgaaaattaagtctctcagtgcagagtgcagtggttgcctgggagccagacagccctaggtttccaaccaagaaggaccatttcctggttgtgtgaccttggagaactcactgtccctctctgagcctcaagtctgtggtcactaacttggtatttcccctccttccttctcaataaggagctgttcaattagcatccgtaaaggatgctatttagggtcctggtgtccagccccatccctgtcccttaaaccagtgatgttcaaagaccgtctgcagcagaatcacactgggtacttgttgaaatgcaaattctggcactagcacctgacctatcaagtcagaatccctgaagaggtgacctcagacattttgccacaggattcaggggaattcaggttcacattgaattttaagaattgctggcctaggttaaggagacaccttctgctttttcattcaactttagaatggcaagtacacagtaaatatgccatttctcctccatgttttgctgtgctaagatcacaagtaaacatggcagtttggactagcaccccagtacatccattagcatgtgaaataaaacctgcattattcctgtgggcaatgggacactatcagcacttgttttaatctaagcatgacaagcacatgtctagttcctgcccatagcagacaccactaatcaaaccttcacaaacatactgcatctgtgttaccacgtctatttcctgcctgtggcagacagcactagtcaaatactgaatctgcttagcctgtgagagctcaggtatagcccaagggacctgtgagcctcccttggcttctgagcctgatggatactgctatcaggggaagacttcacccacccttacccctggctccttaaggtgcagccagaagtagaggagctggagccagcaccatccgggccagggcagcaggtggcagacaagcatgagctaggacgactgcagtactccctggattatgacttccagagtggccaggtgggtgtggaggaaggggaagctttggagggaggatcccgggggttccaaccccttctgaaaggagccatggaagggaggctaagactagtgttccccacctcccccactgtgcctgggccctgcagctgctggtgggcattctgcaagcaatgggattggcagccttggatcttggtggctcctcggacccctatgtgcgggtctacctgctgccggacaaacggaggcggtacgagaccaaggtgcatcggcagacgctgaaccctcactttggggagaccttcgccttcaaggtgagctcctgccttcaggccccgtgttccatagcctgtgcccagtccctggaacactagggaccgaccccttccgcttttcctggaggcggccacagctcaggtggcagctaccagctctggggctattccactggaccctgggcactactgactcctgggctgtagcctggtccttgggcggtacgatttgggttccactgacccgtgatttttttccgcatggatccctggactttcccatttgagttcccccaactgttcgcttcgaccctcgctgcctcactccatgccttccttctggttgtgctgtgcctcaccctatctctgacttcctgctctctactgcggattctctgtgcactccaggtcccctacgtggagctggggggcagggtgctggtcatggcggtgtacgacttcgaccgcttctctcgcaatgacgccatcggggaggtgcgggtccctatgagctccgtggacctggggcggccagtgcaggcctggcgggagctgcaggcggctccgcgggaggaggtgagcatgcgcggtcgcgccccgagccacgcccccaggcccagtcccgcccacaacatcctgagccaatcagatcataggctttccagaccctcagggcggcgtggattgtacccctgaggaggcatggatgtggagccggggctctggtgatgggcccctctcctttcagcaggagaagcttggggacatctgcttctccctccgctatgtccccacggccgggaagctcaccgtcatcgtcctggaggctaaaaacctgaagaagatggacgtaggaggactgtcaggtgtgtgggaagcaagggagtggggtgtgtggggatggcgtggggtgggttctcgttctgacagtttctgagcctcgagggtttcttcggggacagggaggacctggctgctgtggaaggcatggattttggcatagagctagggagacccgaagggtgtaggcagtgtttctatgttggtccaacaacccagcagtggggagctataagactcctccttcctctccccagatccatacgtcaaggtccacctgctgcagggcggcaaaaaggtgcggaagaagaaaaccaccatcaagaagaacactctgaacccctattacaacgaagctttcagcttcgaggtgccctgtgaccaagtccaggtgagctcaaacctgcccttctccaagagcccagacctttagtaatcgccattgctaggcggagggagactttttagcatctccctagaaaccaggtgagggggtctgaggttatgctctcagtctgtttcctcctatgaggaccaggaagcctcttccactccaggaagagactccttaaaattgggtgtgggtgtcctatctgctctaagcgggaccgggatgtcccacccctaagcagtaccagatgctccaccctaagcaggatcagtatgccccgccccaccaagcggaaccaggatgctccgcccccaagcaggaccaggatgccccgcccccaagcaggaccaggatgccccgcccccaagcgggaccaggatgccccactcctaagcgggaccagattccccaccctaagcaggaccaggatgccccgccctcctcaggaacgt

SEQ ID NO: 8105 - DNA, 6000 bp, Homo sapiens
gtcaagagcaagggcttcgagcctctgtcctgggcattgagccgtagggggccttgggcagaggctggggagggggctccttcttccagaggctttgccagctaactcctgacctacgtctgagatttcgtcttcctggtaaccaaagtggccctttatcgaatgtctcctgggcaagggcctggccccagcactgcggccagctctctggggagacacagataggagcccatgggtgaggtgagcgcggaagataagccgcccccgccagccctgtggaaacccagccaggcctgactgggtttcaagcacagcacgaggttcccacattgagctaatttggacagccaagtgggtgaaagacctttggtctctccctgctgggtagggtggttcacagttttgttccttttgtgcatttgtgcaggagactgagaagggtttcttctgagcagaaagcttagcctggggcttactggccagagctgcctgcagcctgggaagcaggtggagtctgcagtgctggcagcgccgccgtgcagcggtgtagccgtgtgtgcgcgtgtgtgtgtgtggtgagaaaccccacttttgctggggactgactcgtgaagaccacaaggtctgggcaacacagccttggcccgtgtggggtggacactgctgtttgctctgtgaattcgtgactgtgtttgcctctcctgaaacttgcttcaggggcgtctgcgggttggtggggcacagccgggtggggtgagtgcccaaggttggccgtccgcgtctcctgtgggcttgtcggggaccggagggccggggtgtgctagctgggtcccgagggtggagggcttcacccccgagcctcagatgagaggagtgggagtgcctggctgcggccggtgggggtgggtgggggaggtgcccgaggctgcttcccagagctgttctcgctggctgctgtctgagcactggggtgggtggggaggagggcgggtgggggcgggcagccttatcctgcggggctgcttgtgtacaagtaccacgcggcctgcctggccctgagccctgggcaaggaggcggaggctgtttttagatgaaggtgactttacttgagaacatgggttacgtctcatgtggccagaatcgaattctaacctttctggggctgtggccgagggtcaggcgccgtccctcctcctgctgctcatgggtggaggctcctggtgcggcgggcgagatggggtggtccgtggggtgggggcgctctgcattgtccccgaggagcctctatggaggctttctcttccggacgcccccccacccccagtgacacgtcaatacacagacaccagcatcatcagcatccggagggacacagggttgttccatccaaagccttttggtccctttgggagcgatgctgcccgctgagaagctggcggacccagcgggagcaccgggaccggtgcagatggcgcctgggagcccgggactcctggaaaggtggctgggggcagctcggctgcgggccccacctggtcctcctcactttcctgtgtgccctgccctgcctggaggtggggtgaggtgagtcaggggccagccctctcctagcacccctgggtgaggaggatgtggagcccagccctgcaggtctggaggatgaggagaggggctgctgcagggcaggaaggagcttgccagctgggcagcctctggctgtgcttcctgccctgactcacctcgcccagctctgcacatagctgccagtgttgcagtctgggaaatcttaactcccaagaaatgtaggttaccaggaggagatccctttgtgaaaatggcactgccagccaggcgcggtggctcacgcctgtaatcccagcactttgggaggcccaagagggtggatcacgaggtcaggggttcaataccagcctggccaaaatggtgaaaccccgtctctactaaaaatacaaaatattagctgagtgtggtggcaggcacctgtaatcccagctacttgggaggctgaggcaggagaattgcttgaacccgggaggcagaggttgcggtgagctgagattacaccactgctgaacagagtgagactctgtctcaaaaaaaaaaaaaagaagaagaggagaaagaaaatggcgctgccaaaacttgtcaactgcgcctgcccagagctcacctgaggtgctcagacgtgaacattcctgtccccgtggccttgggggccgtgacctgtgcactgccacgcagcctcggagccgtgtgcacgcatatgcacgtgtgtatgtgttgtgtgtgtttgcagacgtgtgtccttgtgtgtgtgtgtgtgttgtagcggtgcctggggagtctgacctcagaaggtgctgtggggagggctgcaaggtcctggcgggaggaggcactccccacgcttccccttgggctgggctgttcctggcaggcgagtgctaggcacagtgtgaggttctgtgtggattctgctgtgctccttggcagctctgggggccttcccttgcatttcgaaggaaggggaggcgtgtggctggaggtgagaggccctgaggccctgcctggctcccagcttcccaaatccgcctctctctgggtcgccgccctcagagattgctgaggacacgagctttccacccacgggctgtcctaacggagccgggctaggggcttctggacagaggccgcctgcccctttgggctttggggtttgtttttctcagcagctcacccgggtctctggggtcagggtatcgggcagaagtcagaggacggtgcgcttgggacctgagctctgggcagccctcggggctcaggactcctggctcttctgcccagtttcatgtgttttgtgttttgaaaccacgtgtggtcccacagttgtgccctcagaagccgccgtggctgccgtgaggtagcagtggacgggacgcccacggtctttcccatgccatgctgtttccagccgggccccatcactctcccacaagctgaaaggaagtggcttctccaccagccctggctgggagtcctgtgggcgaggccttccccaggagctgccctcccaagtgccccaggcactaacaagaccccacgcgtgctctccccacagccggcttcgtccaggcgccgctgtcccagcagaggtgggtggggggcagtgtggagctgcactgcgaggccgtgggcagcccggtgcccgagatccagtggtggtttgaagggcagggtcccaacgacacctgctcccagctctgggacggcgcccggctggaccgcgtccacatccacgccacctaccaccagcacgcggccagcaccatctccatcgacacgctcgtggaggaggacacgggcacttacgagtgccgggccagcaacgacccggatcgcaaccacctgacccgggcgcccagggtcaagtgggtccgcgcccaggcagtcgtgctagtcctggaacgtgagtggcgggcacctccctccccgcctccctcagtttccctcctgtgccgctcgcctcccggctcctgctcagtagaacccagacgcctcctcccctctccgtcccgctgtgccccgttgggcccaccgcctggacggaggggcccggacctgaagggggtgggctcgccgcctgaccaccagcgctgggcggcctggctcggggcaggcagggctctgccctccagcaggtgggtcctcgtcctcccctcgaccctcgtgccatccgttccgtcgtttctgcttccccgggcgcctgcccggctccctccctgagcgtccatactgcaagcctgaggggccctccaagctcagcccaggcttgcaggtctcagaaccttctgtgtccttcgcagcatctcgttctaagggattttcaaatttcaattcctagcgggaatattgtaaactaaccaagaaccaagagatttgcttggttggggattggcagaagaaccggggtgctcccagcactgctggagtgccgtcagcctggggctggggggatgtggggccacctgagtgcctcctagagaagggcacgggagccttggccgggggtgctgtggctattttttttttttttcctggagatggagtcttgctgttcccaggtggagtgtggtggcacaatctcggctcactgcaacttccgcctcccgggttcaagcgattcttctgcctcagcctcctgagtagctgggattacaggcatgagccaacatgcccagctaattttttgtatttttagaagagacggggtttcaccgtgttagccaggatggtctcgatctcccgacctcgagatccacccgccttggcctcccaaagtgctgggattacaggcgtgagcctccgcgcccggccaccaccgcgcccagctggctacgtttttagaaaagaatttccagtttgtgctggggctgctacaagagctcgatgccctggtccctgctcagggacgtgggtgggtgccttgtctgtccccacaccctggtcccagcctcgtgtgtctctgggcaggaacatcgccaggcggggcctctgggttcccagcgccttagcccagggcccgccagctgccagcgaagggtgccttcccgaagggggtgccttcccgaaggggcctcctcagcaggcgctgggctcttcccttcccggaggcgtggccagaagttccccttgggcctccggtcctcggggcgtaagggccacggtgtatttttgggatgaaaaccagtccttcccggggaggagccgcaggttcctgggggtcaggcaggcagcgcgggccgtgctcctccactctgctgaccgcgtctcgccgggccttgcagccggcacagtcttcactaccgtagaagaccttggctccaagatactcctcacctgctccttgaatgacagcgccacagaggtcacagggcaccgctggctgaaggggggcgtggtgctgaaggaggacgcgctgcccggccagaaaacggagttcaagtgagtgcctgaccacgccatgccgccacctgccccttctcacggctctcttgccgccagcggcctgtggtccgtgagaacaaaagaccggtcggcaggcttgatccaggcggaagttagggaccagctccgcgcagacccccagagggaaaccccagggaggggtctgaggggcgtccttgtgaggcagggggctccagcagccctggcaggagtccccattgcttgctcctcactaggtcccgggcacgaaagggcgccacactgccaggtcccgggcacgtgtgcgggcctcccaggctctgtgctcctggcacaagagggcaccacactgaggcatgccctgctcggaccccagacgctgtcatggccggagctttgtcataactggggctgggacggccctgggagcacagagccttttgttttcaggctgactgggaagacggtcacagggtgtggggtgcagagcagggaccagaggtgtggggttcatcagtcggggagaagggggtctgttggttctctcacctgtggggtcttgccagcctggctctgtccttggggccgcacggggaccccaggagttcttttgaggttcagacttgactgggacagttttgctttttcactgtgccgtggttgggcccctggagaaccctgggtccttggaggcgtcctgcagagctggtacgcggctcacctgcctgctgtggttgcagggtggactccgacgaccagtggggagagtactcctgcgtcttcctccccgagcccatgggcacggccaacatccagctccacggtgagtcctgcagccaggggtaccgggcaccaccgactgtcgggagaagttgttggcctgaggcacccggcacatcccagagccctggccccctgctccctggaggggaacagccctcctgcgggaggccggggatgggggcgggcctgcggttccaggctcctctctctca

SEQ ID NO: 8106 - DNA, 6000 bp, Homo sapiens
cctgccccacaagactgcggtactctcacgccagtgcacagatcagaatccagataaggtcccaggtttcctgggatggtgactcctctcccttcagggcccctcgatctgcaggcctctcccctcctgcacctgcgcctggcgccaggccctccagggtggctgggatctgtggtttgtgcacccctcggatgtgccgctgaagctggtctgtcacctgccaccccaagagcctgagtgacgttgccccagggatctgagttagagtcatagtgagcgtgtgcctgggactcccagctctgccagcctttggggtgcttccccctcctgcagaggctgtggctgcaggtcaaggcactgctcgtcatcctccgagtcctcctgagctcccagctgccagctcggctcccactggcccttccctgggctccagtgcctcctgtgagccgcctccccggtgcgtccccagctctcccaggctgagctgggtggacaggcctgtgcccgtgttgggtggtcctgagatcccggcatgaggtgagtgcccacatgtgaccctcagagacctccctgccccctcggccctcgtgcacgtgcggcagcagcgacttggctcttctcattggagcctgggtcatctcccgcaggtcacgggagaagctgagcatgcggtccctgcccgaggtggacagaaggtgaacgctcttgagaaagaaacccagcgggtcttaggagagcccggccccccttgtaatgagagaaatcaaaccacagcgcacagcgacttcatgtccaccgttggcttagtgaggccccacgctcagtgcgctgctgtggggcgagaggggacagccccgctctccctgtcctgggcggcttcaccagcgccacctccccacacactctgtgcactgctgtggggcaagaggcgacagccccgctctccctgccccgggcagcttcaccagcgtcacctccccaggggtgacgcatgcccgaggccatgagccacggcagcatctgtggtggcagaggactggaaactccagagaaatgacccccagcggggcctagctgtgtagatggtgagggtggccacatggcggcagccaggtactgaggacacggtgcagcaggggcccccggtgggccccgccaggaatcggacatcagcgggcgccgcagcctctaagcggagcatgcagcccactgacagtgtgctgggtgcctccctagacctgacacttgcatgcgggggcgtgcgatgctggccagtgggaagctgcgggggcggcggcaggagtcctcaaatgcctttgccgcttttcataaatctaaaattacatccaaacagaggtttacttttttaaaaaataaaagaggccaggcatggtggctgacgcctgtaatcccagcgctttgggaggccaaagcaggagaatcactgcttgaggccaggagttcagactggcctgggcaacatagggagaaaccatctctccagaaaaaaaaaaagaggaaggaatgacccaaagaccatgcagcctgtgatgctgtggaggctccaagcaggcgaacacaggacaggccagcatcttgcagggacgcggcggggggtaccgcgtgtgcgtgcatatcacgccccgtgcatgtgtgtgcataagctccccggacacatccgggggtgtgggtcctgcgggctgcctgtgcaccagggaggggagtcagcaggagagagactgtacgtcgtgcctgcctttaagttccctgaattttaaaccctgtggtttcatcacctgttaagacaaaaatctcaaaatgactgttttctgcctcctgggtctcaaaggcaggtgcaatgcccagaggctggtcctgcacagagggacccagggcgtgctggccttcccagtgtcccactggtggctgatctaagcagtgctttccctcgtttttttattttgagacagaatcttgctctgtcccccaggctggagagcaacggcacgatctcggctcactgcagcctcccgcttcagcctcccagatagctgggattacaggcatgcgccctcatgcctggctaatttttgtatttttagtagagacggggtttcaccttgttggtcaggctggtctccagttcctggcctcaagtgatccgcccgcctcggcctcccaaagtgctgggacgacaggcgtaagcctctgcgcccggcctcctcattgtttctaatggtccctcagtgcccaccgggtgatggtggcagattttccatccgcattgctcccggacatgcggatgtaggtttcagcagttcccatcattagacacagttgccgtaggctgggttcttagtagcaggctcagtggggcctttgagtctttccatggctggtgcccgccggactcactgagggaaactaatggggaagcactggtctccattccctgcacgcacagcccactgctgcgatggtgaagggataaggttgtgttcacgcgtcgaagtttgtgtccactgcacacgcggctcactgctgcgatggtggagggataaggtcgtattcacgcgttgaagttggtgcctctcagtatcgctttatgtttgttggccacttggtcgtccttgtatgagctgtccactccttgttgattggccagagctctttacatggggaggaccatgggccggaccatgggccctcatccagcaggtgtgcaggcacccacgcactctcttgtcccttgcagcggctggctgtcggcaattggattcttccagtacagcccgggcgctgccgtggtcatgctgcttccagccatcatgttctccgtgtcggctgccatgatggccatcgcgatcatgaaggtgagtcctcggctttgtgacgtccagcccttaccccttctccatgaacctcgtcacccaactgtcccaggtgggtgaacgtcgaggagccgggccctctccccacggtgtcacgcaggccgcacttcatccccagcagtgagctgggatgacagcaggaggcactgtcaccagggacactcccagggacccagcgcctgggttcctatggggccagtcctgtggccccctgggccgggagtccagactccagagggaagcaggggttgtgtgtaaaccgcagtgtttgcaggaacagctgaggccctggagctgtcctgtcagtgagggtggggccccttgcaggttcccggtcacagtttccatctgaagatagcggaagtgttgagctgggctcataacagaaactttcagttacagcaaaatgcttttttttttttttttttttttagacagagtctcgctctgtcacccaggctggagtgtagtggtgcgatctctgctcactgcaagctccgcctctggggttcatgccattctcctgcctcagcctcccgagtagctgggactacaggcgcccgctaccgcacctggctaattattttgtttttgtatttttggtagagacaggttttcaccgtgttagccaggatggtctcaatctcctgacctcgtgatcctcccgcctcggcctcccgaagtgctgggatgacaggcgtgagccaccgtgcccggcctattttttatattgtagtagagacagggtttcaccatgttgtttggactggtctcgaactccagagctcagacagtctgtctgcctcggcctcccgaagtgctgggatgacaggcgtgagtccccgtgcccggccgccatgctcattttctgtcttctgcctccctgtcctctgtccttgcaggtgcacaggatctaccgaggggctggcggaagcttccagaaggcacagacggagtggaacacgggcacttggcggaacccaccgtcgagggaggcccagtacaacaacttctcaggcaacagcctgcccgagtaccccactgtgcccagctacccgggcagtggccagtggccttagagggagcctgccctgcccccaccgcccaccacctcctccccttcattcctgctgctacccctggtcccgagggctgggagtacctggggccccatccccccagctgggatggtggaagccggtggtggccacggaccgcccccctcctgccagggccacagaacccgtgttcatctcatccgagagcggagttcctcacaagcactccccagcagcccttggcctctgccgtccacaggacgccctcttgctcccggaaacgtgtggtcacccgccgtccactgcacggctggtacggccttgtcttcaggtctcgaggcctgactccgggggacaggtggcagcaggtcggccgccctcccgtcctcccagagctgctggcgctgaggtcagagcgggtctgatggggagctccgtctcaccggccacccgccgtcaccatggcagatgcccttggccggaactaataagaggcgtcggggccagcttccggtcccctgcagtgatagagggcttggtgcctagctgagtcctcgctgtccccgccatcccctgatctgtgcggctccagcctcgccccctccccacgtgcaccatacctggggagttcctggtccagggtatcctggggccaccctccctgcctccaaaacagggatccctggcaggctgtctttccacgcccctgagttcagagtcggggacccaggccaggtcgggagcacagccgctccccaaacccagcaaaccggcagagagccggtttcccagcagccggagccctgcaggagaggcctttgtgttttgttttgttttgttttttctcttttgagacaagagtttcactctgtcgcccaggctggagtgcagtggtgtgatctcggctcactgcaacctctgcctcccgtgttcaagcagttctcctgcctcagcctcccaaatagctgggattacagttgcctgccaccacgcccagctaatttttatatttttagtacagatggggtttcaccatgttggccaggctggtctcgaactcctgacctcaagtgatccacccgccttggcctcccaaagtgctgggataataggtgtcagccaccgcgcccagcctggagtggccttttatgagaggggacccgtcaaatctgtgccttatggaggggtccggcagcggccacaattgtcttgtcccctcaccccccaactccccctggaacacctctcccaggcaagacattttcacagcaccattcacaacggttgggccaaaaagaaacttttccttcatcatttcctgcactcgctgaccacaactttggacaccccaggctgccacccctccccacccgttcacccccaggatgctgttgctgtaggacgcctgctgccctggagccctccccaggatgtgagccagtcccctcgctggtacggaatgccgctgggtgcccggaggcggccatggtgtctcgatggacggcagccaggatggagcacccatgggtctcacggccatgcttcagggtcttcaggtcctgcccccggccagtctgccaagaggcacccccttccccagcctctcgcctgcactgatgcagacaaaatctcacctggcaggcccaacccccccccacccctcccccgccgtgtgtggcccctcgccgcatcgttggggttttgttatgtgaaaatatcctggaaataaatacatgtttctgcacttagagccagggacctgccgcgtttgtgctgtgagcatgtgtggttcccccaggccgtcttctcccttgggagacccctcagcatatggcctctggcaggatgcccccctgcagcgcctcctcccacccaggccccgggtgccctgtagccaggtgtgcccagggctgaccctgccatcctggccaacgtggtgaaacccggcctctactaaaaatacaaaaattagccgggcgcggtggcgggtgcctgtagttctagctactcaggaggctgaggcaggagaattgcttgaacccgggaggcgg

SEQ ID NO: 8107 - DNA, 6000 bp, Homo sapiens
ctgggccttaagtagccagagagacagacatgtctcctttcacagcctaagaggaaagaccagaaacatactaaccgatggttaaagagaataaagatgatttttagatgccttgaataaaaaataataaaacaggctgggcgtggtggctcactcctgtaatcccagcactttgggaggctgagggaggtggatcacctgaggtcagcagtttgagcccagcctggccaacatggtgaacccccacctctactaaaaatacaaaaattagccgggcgtggtggttggacgcctgtaattctagctacttgggaggctgaggcacgagaattgctggaacccaggaggcggaggttgcagtgagctgagattgtgtcactacactccagcctgggtgacagagtgacactctgtctcaaaagaaaaaaaaaaaatatatatatatatatatataaaataataaaataggcaggagtgataggggatcagagaagactggttagctaggtggtcagggaggacttcctgaggaggtggcatttgagcctagacctcagtggcaggggccagccaggcaggaatcccgtgaaacatgtcccagattcaggggacagatggggtaaaggtttggaggtgaactaagatgaggtgggctgtgaggttaggcttaatccctcaggcactgtggagctctggagggtttagacaaagcttctggtttccatggagacgaacccgcacaagctgggacaagcctggaccacctggactccctcgcccctctcccactctgggttcgggggccctggttccctggggctgtctcttttttttttttgagacggagtttccctctgtcgcccaggctggagtgcagtggcacaatcttggctcactgcaagctccgcctcccaggttcacgccattctcctgcctcagcctcctgagtagctgggactacaggcgccggccaccacgccctgctaattttttgtatttttagtagagacggggtttcaccatgttagccaggatagtctcgatctcctgaccttgtggtctgcctgcctcagcctcccaaagtgctgggattacaggcatgagccactgtgcccgggcagggctgtctcttaaagtcaggaaatacaaattccttggggccatttaaaaattttttttgagacagggtcttgctctgtcgcccaggctggagtgcagaggcacgatcacaattcactgcagcctcgacctcctgggctcaggtgatccttctgcctcagcctctcgaggagctgggaccacaggtgcatgccaccatgcccggctaatttttgtatttttttgtagagatgagggtctcactatgttgctcaggttggtcttgaactcctgggctcaagcaatcctcttgcctcggtctcccaaagtgctgagattataggcagaatccaccgtgcccggccctggggccatttaatgacacaaagtataacatcaaagcaggttaaaaaaaaaaaagatgcagttttgaaaaataagctcagaagaaaaagagtaaataatcagaaagccactgtagcctggtggttaagagcaagagtgaggctgggtgcggtggctcacgcctgtaattccaacactttaggaggctgaggtgggaggatcgcttgggcccaggaatttgagaccagcttggtcaacatagcaaaaccccatctctacaaaaaaacaaaaaaatatgctgtgtgtggtggtgcatgcctgtggtcccagctacctgggaggctgaagcaggaggatcccttgggcctgggagttcaaggctgcagtgagctgtgattgagccactgcactccagcctgggcaacagagtgaaaccccgtctcaaaaaccaaacaaccaatcaaccaaccaaccaaccaaaaaagagccagagaacagggcaggctgccaagttcaccactgtgctgcgtgacctcaggcaagttactgaacctctctaggccccttttaatctcacctctaaagtaggaataataactgtgccacttcctaaggtcactctgaggatgaaatgaatgggtccacatcaagcgcctgcttgcagccaggttcaagacagcctgaccaacatggtgaaaccccgtctctactaaaaatacaaaaagtagctggctgtggttgtgggtgcctataatcccagctactcgggaggctgagtcaggagaataacttgaacccaggaggtggaggttgcagtgagccgagactacgccattgcactccagcctgggcaacaagagcaaaaaaccccatctcaaaaaaaaaaaaaaaaactacacaaggagaaagtcattatttggccaccacctccccaaggctccttctgctttttgcttttcaggcattgaatctgtacccttttcccaaaccacatccctgcaagacagggcagcagtgccatttcacagatggggagactgaggctgggagaggccccgccatagctagcacgggtgggcagacttgggatttgagtccagtcctgagcgctgccctggctccttcagaactgcagagccctgccctctgctctgtttctctcccctccacccgccttcccactcctggagatcaggaatgctggcctcgctagagacgctggagcttataagaaaaggcactggagcgcaccaatggggggtgcctgggcagagggaatcacacacccgctgtgccaagcctagaaaacccgccccggggaggaggaggagtcacttctacaaactccctccccactccctccacctgtcccctgcctggggagcagggcatggtgcgtgctggcaggagggaagggagggtggaggcgtggccaggtgaccttgcacctgagtctggtgttctcattcatgccatggacatgaaaataacagaatctgcctggtgtggaggctcacgcctgtaatcccagcactttgggaggccaaggcgggcggatcacttgaagtcaggagttcaagatcagcctggccaacatggtgagacccccgtctctattaaaaatacaaaaattagctgggcatggtggtagacacctgtgatcccagctacttgggaggctgaggcaggagaatcgcttgaaactaggaggcagaggttgcagtgagccaagttggcaccattgcactccagcctcagcaacagagttttttttgttttttttttttctaagtgggaaagcccaggtgggaggatcatttgagcccaggagttcaagaagagtctgggcaacacagcaagaccctcctgtctctataaaaatagaagttaaaaaattagctgggcatgatggtatgcacctatagtcccagttactcaggaggctggggcaggaggattgcttgaagccaggagttcgaggctgcagtgagccataatggctcacacttgtaatcccagcactttgggaggccaaggctggagaatcacttgagcctaggagtttgagaccagccttggcaacacagagagactccatctctacaaacaataaaaaaaattagccgggcatcgtgatgtgtgcctgtggtcccagttacttgggaggcagaggtgggaggatcacttgagcctgggagttcgaggctgcattgaaccgtgatcacaccactgcactccagcctgagtgacagagaccctgtctaaaaaaaaaaaagtgtgggaggggggacttcatggctctgtgcctcagtttcctcatctgtaacatggggataattgaatgcacctttgatgaatgtattaaatgagatagtacatgtaaggctgggcgcggtggctcatgcctgtaatcccagcactttggaaggccaagggggtggatcacaagatcaggagttcgagaccagcctggccaacatagtgaaaccccgtctctactaaaaattcaaaaaaattagctgggcatggtggcacatgcctgtagtcccagatacttgggatgctgaggcaggagaatcacttgaacctggaaggcggaggttgcagtgagccaagatcacgccattgcactccagcctgggcaacaagagcgaaactctgtctcaaaaaaaaaaaaaaaaaaagagatagtacatgtaaagcacctggcacaaaggaagtgtttcattcattcactcattaattcattcagcaaatccttcttgaatccctgctgcaactcaggcgctgttctaggcagggaactgagggctcagttttggacaaagacaaaaatctctgccctctgtgggtggatcagttgaggtcaggagtttgagaccagcctggccaacatggtgaaatcccgtctctactaaaaatagaaaaattagcctggcgtggtggtgggcacctgtaggtgcccagctactcaggagcccagctactcaggaggccagtaggcagccagctactcaggaggctgaggcaggagaatcacttgaacttgggaggcagagactgcagtgagcagagattgtgccactgcactccagcctgggcaacagaatgagactccgcctcaaaaaaaacaaaacaaggctgggcacagtgactcacccctgtaatcccagcactttgggaggccgaggtgggtggatcacttgaggccagaagttaaaggccagtctggccaatgtggtgaaaccctatctctattaaaaatataaagattagccaggtgtggtggtgcacccctgtaatcccagctacctgggaggctgaggcaggagaatcgcttgaacccgggaggtggaggttgcagtgagctgagatcgtgccactgcactccagcctgggcgacagagccagactctgtctcaaaaaatgaaacaaaacaaaaaaacaaacaaaaaaacctgaggccctgagagaggtagtaacttgtcacaggctccaaacacaggcctgtcagagctggactccccaccctgagctggggacccccaagtgctcagatgaacctgtgtggcctcatgcccatcttccccgctcccctcgaccaggtggctgacatggaggagctgaccatctgggaacagcacacggccacactgtccaaggtgaggcctccctctccctgtctgggtgccagagagtatggcggcttaggcccagctcaatagaggggagaccctttaccctgggggaaacagcagctcttccttcccctcatcctctctcaggacccccgccggggctttggcattgcgatctctggaggccgagaccggcccggtggatccatggttgtatctgacgtggtacctggagggccggcggagggcaggctacagtgagtatccaggcagctgggttctggcgggggagggcacgtggagaggagaaaccaggccaggcacagtgactcacacccgtcatcccagcactttgcgaggctgaagtgggcggatcacctgagttcaggagtttgagaccagcctggccaacatggtgaaaccccgtctctactaaaattacaaaaattagcgggatgtggtagcgtgttcctgtaatcccagctactcgggaggctgaggcaggagacttgcttgaacccgggaggcagaggttgcggtgagccaagattgcgccactgcactccagcctgggtgacagagtgagactctgtctcaaaaagaaagtaagtgaggtgaggagaaacctttgtgagcctggcactttccagctctgtcaacacagggctcggacttggcagtaggacagtgtcagagacttgggcctcacttccctaaggtacttcctggtccttcacaggaattcttggggtcatagtggccccagagcccttttggaacataaagtcctggaaaccatcgagtgtttgagggtttgatgcttcttggaattatgttgttaaaatggttctgggccccaagtggctgacaggtgatatggctcagcccagcccagaattagggaccaccaggttcagag

SEQ ID NO: 8108 - DNA, 6000 bp, Homo sapiens
gcgcacacccgtagtctcagctgctcaggaggatgaggtggaggatcacttgatcctaggaggtagaggctgcagtgagccaagattgtgccactgctcgctctgtctgggcaacagagaaagactcttgtctcaaaaaagaaaaaaaaacaaaagaggccgggcgcagtggctcacgcatataatcccaacactttgggaggctgaggcgggtggatcacctgaggtcaggagttcgagaccagtgtggccaacatggcaaaaccccgtctccactaaaaatacaaaaattagctgggcatcgtggcgggcacctacctgtagtcccagctactcgggaggctgaggcaggagaattgcttgaacccaggaggcggaggttgtagtgagcccacatcacaccattgcactccagcctaggcaacagagcaggactccatctaaaaaaaaaaaaaagagaaaaataaaaaaagttttctatagggtggttaagaagtcttaacaggtcgggtgtggtggcttacacctgtaataccaacactttgggaggccaaggcaggcggatcacctgaggtcaggagtttgagaccagcctggccaacatggtggaaaccccatctctactaaaaatacaaaaattagccgggcttggtagcgggcacctgtaatcccagctactcgggaggctgaggcaggagaattgcttgaacccgggaggcggaggttgcagtgagccgagatcacaccattgcactccatcctgggcaacaagagcgagactctgtctcaaaaaaaaaaaaaaatcttaacagtttccattctcccttctctaactccaggaacaaaccctatctgttttatttcaacattgtgaaatgtgccagccccctggttctgctggaattccaatgtcccactccccaggtaacctggtccccaccgttccctttttcctctccccgcttcccatccttttccccctgtgaatgtgggctgcgacctcagtcctgagcagtctgccccaactccacccaatcccttccttctcccctcccagatctgcgtggaaaaatgccccgaccgctacctcacgtacctgaatgctcgcagctcccgggactttgagtactataagcagttctgtgttcctggcttcaagaacaataaagtgagttgtagactgtcctgagagcacaggtatgggcagtggcagtgtactagacttggggactcacctccctccatctctcttggcagggagtggctgaggtgcttcaagatggtgactgccctgctgtcctcatccccagcaaaccctgtgagtcaggggatcccaggaggctcaggtggtgacggggaggctctgcagaggctcagcctgactggtgccatcctctgctccatgcagtggcccggagatgcttccccgctatccacgcctacaagggtgtcctgatggtgggcaatgagacgacctatgaggatgggcatggctcccggaaaaacatcacagacctggtggagggcgccaagtgaggatattggcgcaccgcgccagggtctcactttgctgggtgggacaggcaatcccctgtggttggcctgatcatggaagagggtctgacccgagccttgtcctccttcccccaggaaagccaatggagtcctagaggcgcggcaactcgccatgcgcatatttgaagattacaccgtctcttggtactggattatcatgtaagtcaggagggaaggggcctctcccctggctgccccctctaagcctggctgagggtggagtctgttcatgaccgttttcttttccccagaggcctggtcattgccatggcgatgagcctcctgttcatcatcctgcttcgcttcctggctggtattatggtctgggtgatgatcatcatggtgattctggtgctgggctacggtgcgtcaccccctccctgtggcttctctttcctgaatccgcacactgccctgccctttcccgtggaaatggcccatcaggaaaacaaaaaaaagtcaggccgggcgtggtggctcacgcctgtaatcccagcactttgggaggccgaggcaggcagatcacccgaggtcaggagttcaagaccagcctgaccaacatggagaaaccccgtctctactaaaaatacaaaatcagccgggcatggaggtgcatgcctgtaatcccagctactcaggaggctgaggcaggagaatcgcttgaacctgggaggcggaggttgtggtgagccgaaatcacgccattgcactccagcctgggcaacaagagcgaaactccatctcaaaaaaaaaaaaaaaagaaaaaatgtctcagcaccgtagttaaggatgcatactctggtatcagaatagcagaggttcaaatcctggctttgccaattctttgggcaagtgcctcaacctaactgtgcttcaatttctttcttttttttttttgagacggagttctgttcttgtcacccaggctggagtgccatggcgcgatcttggctcactgcaacctccgcctcctgggtccaagctattctcctgcctcagcctcccaagtagctgggattacaggcatgcacctccatgcccggctgatttcgtatttttagtagagatggggtttctccatgttggtcaggctggtctcgacctcctggcctcaggagatctgcccgcttcagcctcccaaagtgctaggattacaggcaggagccaccgcgcccggactgcttcaatttatttctctataaaatgagggtaattcatatttctagttggcaaactaaatgacaaggaggtaatgagcagataaaatatgggtaggggcctgtttagttcaggcctgtggaatccagaggcacaatatcgtgctcaacaaaacagtgcttcatattttggatttttgttgtttttgagttgttgttttgttgttgttgttgagacggagtcttgctttgtcacccaggctggcgtgcagtggtgcagtctcggctcactgcaatctctgcctcccgggttcaagcaattttcctacctcgcctcccgagtatctgggattacaggcgcacaccaccatgcccggctaattttttttgtatttttagtagagatggggttttaccatattggccaggctggtctcgacttcctcgtgatctgcctgcctcgacctcccaaagtgctgggattacagacgtgagccaccgcgcccagccttgatttgttttttgagacagagtctcactctgtcacccaggctggagttcagtggcacaatcacagctcactgcagccttgacctcctgggctcaagtgatcctcccgtcttggcctcccaagtagctgaaaccacaggcaagcaccatcatgcctggctaaatttttaatatttttgtagagacaggttctccctatgtggcccaggctagtcttgaactcctgagcttgagcagtcctcccgccttggcctccctaagtgttgggattacaggcgcaagccactgtgcctggcccatattttgattattccttgaactttcctggaagaaaaatgcttggcaatccaatttgaggacactcatagtaaaatattcatattaatagtggtttctagctgggtgcggtggcgcacgcctgtaatcccagcaatttgggagacagaggtgggcggatcacctgaggttgggagttcgagaccagcctgaccaacatgtagaaaccccatctctatttttttttttttttgagacagagtctctcactgtcgcccaggctggagtgcagtggcgcgatctcagctcactgcaacctccgcctcccgggttcaagcaattctcctacctcagtctcctgagtagctgagattactggcgcccaccaccacgcccagctaattttttttttttttttttttttttgtatttttagtagacacggggtttcaccatgttggtcaggctggtctcgaactcctgacctcgtgatccacccgtcttggcctcccaaagtgctgggattacaggcgtgagccaccgcgcccggccaaccccatctctattaaaaatacaaaattagccgggcatggtggcgcatgcctgtaatcccagctgctcgggaagctgaggcaggagaatcgcttgaacccgtgaagtggaggttgcggtgagccgagattgtgccattgaactccagcctgggcaacaagagtgaaactccgtctcaaaaaaaaaaaaaaagagagagaacttagaccatggcagcatatgattatgattccaagtagggggaaagggttctggaagttctcttctgaaggtgacacttgagcagagacctaaggatgtgtgggatccagccatggggagagaatgcaccgggcggtgggaactgcaagtgtaaagtccctgaggcagaagcctcgatgtttgcttctgttaaatgggggcagttgtagctgctttgcaaagttgcaggaggcactgctggactgagcttgtggttcccccatgcaggaatatttcactgctacatggagtactcccgactgcgtggtgaggccggctctgatgtctctttggtggacctcggctttcagacggatttccgggtgtacctgcacttacggcagacctggttggcctttagtgagtcacagtctcccattcctgcccccacatgaggccttggagggagtggggagcccagccggctcagcctttgccctttgcagtgatcattctgagtatccttgaagtcattatcatcttgctgctcatctttctccggaagagaattctcatcgcgattgcactcatcaaagaagccagcaggtggggggccagggtgccaggggccaggatggagctgtccctagagttgtgtcttttgccctgacgcctgtgtctctgctcttccctagggctgtgggatacgtcatgtgctccttgctctacccactggtcaccttcttcttgctgtgcctctgcatcgcctactgggccagcactgctgtgtatctgcccccagacactgatctctgaccccagggatggctaaagaccaactttgcctagaagtgacctgcagcttagggatagggctggaaactggtgggagaatggattctttcccacaaaagtccctggggtcctcagtcctagacctctgcttccttaacgaacctccagcttcctgtccacttccaacgaagcggtctataagatctttgatgacagcccctgcccatttactgcgaaaacctgcaacccagaggtgggcgtccccggggtggggagggcaggtattgccccagcaggccccagatgatttgaaacctctcatgtccacttggaggttcagcaaacaattggcccctgttgcatgtcctgtgctaggtgtgggggaggacgcacagtggggaagagactctctaactggatcgaacaacttcccagggcaagctggcttcctctcttcaacttgaccaggccttcaccctgggtgctaaatcacccatttttccctacttcctttttttttttttttttttttaataagacagagtcttgctctgtcaccaggctggagtgcagtggcatgatctcagctcactgcaacttccaactccctggttcaagcgattctcctgcctcagcctcccgagtagctgggattataggcacacaccagcacaccaggctaatttttgtatttttagtaaagacagggtttcaccatgttagccaggatggtctcgatctcctgacctcgtgatccacctgcctctgcctcccaaagtgctgggattacaggtgtgagccacctcgcccggcccatttttccccatttcatttcctgtctccatgccctcttcttgaccccagtgatggccacgtcttgtttctagaatcccttcctttgcacaagccatattctgaactcttaattccttcccttaacttcaatccctatgtc

SEQ ID NO: 8109 - DNA, 6000 bp, Homo sapiens
ccaaggatgccaggcagagggaagagcaaggctcttgctcttctctgggaagctgggaggtgacacagcactggtgtgcacgtagccaattgtggtatttctggaggtgaagctggaagttgagctgggtgggagaagaggtgtgcaagctggaccaggcaggggtgggactgttttggggaagagctggccaattccttgcagtaccaggtctctccacaaggtggcgccagtggttagtccctgcttctcttgtctaacttgtattttacaagttctactgtttgggttgctttttggaagctctctctggtacctgatagtgacccacatggttgtctgagaattgggggaaacatactcccaaatctctgaaagccatgcttataccctagtggggctggaaatgccaggctgagggacttaagctgtctggggggtactagggagtcacagagggttctataggtaaagaggggacaggttggatttggtgtctcagtaggttccccaagcctccgtgtggagggtgcgctagaagggagactgagcccagcggttggatggggccggagcaaggtgcagatggagagaaagaaggaaacgggggaaggagagtcactcaggaggattggcaggctgtcgggggaggggaatgttatgcagatggggatggtcctaggagtgagggcctctgagacaggaccgggaggaagaatatacttggggagacattggggagacattctgggacctggtaggggcaaagggactaggaggtcccagggaaaggtatttaaaaggtatttaaaggactgcaggagccctgacctgggacctggaagagggtctagggctggggacagaggggaaactgagtccacagaggtgggtgagacagacttaggggcaaggaggagcagggggaggctgcggccagccctacaaactctggattttacggagtaggtagagggtgggtgaagacagcagcctcagaggcgggaaggaaaatcaggtgcgcctggtgtcccagaagtccaaagaggagagcatttatacaggaagctgcagtcatgtaagatgaggcccgagacacggagccaccagttgagtggattttcagagccagagagccaaaggtgttacgcgtgggggtctttgcagccaaatggtggaggcggaagaactgacctatgagaagacccaaggcatccagaggggcctggagaagcaggggcagagagtctcagggagatgtaggggtgggggaggtctggcttaccaagggaaatagccctgctgctgggatcaaagaattgatgttgacgtgccgcctgtcccagtagagacacgcagggaggatgaggatgcgtcccacaccctgggccagatgaggatgctgcctgtcccagtagagacacgcagggaggatgaggatgcgtcccacaccgtgggccagatgaggatgctgcctgtcccagtagagacatgcagggaggatgcctctcatactgggggaaccccaggatgcagatgcttcctgtcccactggaggcgctgaagtcctctgaaccacacagcatggaaggaggttcttcctctcaccctaggagacacatacatagtggcattgcttcctgtcccaccagatgtgccaaggcctctaggctgcattctgcatggcctagagccctggcaggcacagctgaaaacaaagcaagcaagaccagcccagtggctgtcgggagccaagacctcctgctggaacctggagagtggtcctgggcagagttggggggcaggcctgagaacccctcgcaggacaggcaggggtcagccggcagtagttgggctggtctggcccactggggcctcttttggggaagagagtgtttcctcatgccttgatgggagccactgagctttcaatttttttttttttttaatacagagtctcgctctgttgcccaggctagagtacagtggcgcaatcttgattcactgcaacctccacctcccgggttcaagcgattctcctgcctcagcttcccgagtagctgggactataggcgcccgccaccacacccagctaatttttgtatttttagtagaggcggggtttcaccatgttggccaggctggtcttgagctcctgacctcaagtgatccacctgcctcagcctcccaaaggaccgggattacaggcatgagccaccatgcccagcctgagctctcaaattcttaagacacccagataatggccacaccaggaaggtcctagaccactccctgctctgttccaggtgctggcctggtgccgggttcaccagccacatcaccatgggtgcagatgggcgagctgggagctcctgccaccttggggtgctttgcggctgccaagggcagttgaacccaagccaggcccagctgaaggctttcagcagcctttactctttggccttcttataatccctagtgaaggggttggcttttatttatttatgtatttatttatttatttattttttgagacagagtctcgctctgtcgcccaagctgaagtgcagtggcgcgatctcggctcactgcaagctctgcctcccgggttcaagccattctcctgcctcagcctcccgagtagctgggattacaggtgcctgccactgcgcccggctaattttttgtattcttagtagagacggggtttcaccgtgttagccaggatggtctcgatctcctgacctcgtgatctgcccacctcggcctcccaaagtgctgggattacaggcgtgagccaccgagcccggctaggagttggcttttaatctccaggacctctttgccctgggaataaaatcccttttcctgtgccaccaggcctccccagctggccccagccttggttcccactaccttccccaagctctggccatctggccatctcgatggcctctccagcctctgacataagagagcctgcttattcttgcctcaaggcctttgcctgtgctgttccctctgcccacagtgcccttccttgtggtctgtgtgtggctggcacctcacctttcagagcttagctcagaagtctcctctaggggaggccctgtgatccctgatcccctgcagaagcccacctgctgccccagcctgcacggttttcttcacagcctctgccacaatctggaaattattgggttcatttacttgtttccttgttaatgtctcccactccccacctacacgcatgagaacgtgaacccctgagagtcgtaaccttatctgtcttctttgggttatgttcccggaacctagaaaggtgccaggcacacagcggatgttcagtaggatggtaaacaaataaagcttctttaggctgatgaaaaaactgagggtcaggcgcggtggctcacgcctgcaattccaacactttgtttgggaggctgagacaagcagataacttgagtctgggagttcacgaccagcctggtcaacatggcaaaccccgtcaatacaaaaaatacaaaaattagccatgtgtggtggtgtgcgcctataatcccagctactcgggaggctcagaattacctgagcctgagcgcttgagactgcagtgtgccatgatcgcgccgctgcactccagcctgggcagcacagtgaaaccctgtctcaaaaaaaaaaaaaagaaaaagaaagagagagagagagaaaaagaaagaaagaaagaaagaaagaaagaaagaaagaaagaaagaaagaaagaaaaggaaggaaggaaggaaaagaaaaaaactgaggctgaggctcagagaggggaggggagttgctcaggcccacacatctctgatgatttataaagcatttatagagaacttgctatgtgccaggcacttccgcacagtgagagccaggatggcttcgtggctgtacacaggggacctggcatcaaacctgcccagggttctggacgctgctctgcctcttccaggctgtcactgtgggcacgtgaccccacttctctgagctatctcaaaaacaggaatcatagttgtgggattgaaataaggactaaatgagctgatgtatttagaacggtgcttagcacctggaggcatcaatacaatttgagctattcttcttcttcttgaaaataactttaaattattatttttagaagtaggtgctcagtggatgcccatttaatagataagaaagttgaggctcaaagatatgatggcacctgccttaggttccagctaggaaggggtagggtcaatatttttaaatgaggctggccagacgcagtggctcactcctgtaatctcagcattttgggaggctgaggaaggaagatcgcttcagcccaggagtttgagaccagcctgggcaacatagcaagaccacgtcgctaaaaaaattaatacataaaataaaatgaggctggcagattttcaagtggaggggcaaatttgatcttgcaactgggtaccatgagagaggtctgatttagggggtatctaggggcaaagcatctagaacagcagaaacgactgaggcagcgaggaaatgccagcggcagggaagagagctaccaagagggcaaaggttgggggtcacagtcccaagaagagatggcccaaagcaaagacagaaatacaaaagcacagtgtcactggggaggagacattccctaagtgccaggaaagtgcagggcggaggtggagaccgtggcaggtggcccggccatgcccccctcccagctggaaccctgggggagctgggcacctggttgttcacacggcaggggaggaacagccctgtcaactgctggccccgggaaactgggcctggggaggacatgcttgggcataataagttagccctgggggcagggcagagctggcctcgggcccagaccctgccgcaatgaggacaggcctggctgtggccccagcatggtgtctgttgcaggtggccggactgtgccatgctgctccagacccaaggtggcagctctcactgcggggaccctgctacttctgacagccatcggggcggcatcctgggccattggtgagagcggttcctgtgcctctgacctcccctggcccctgcagcctccagcctgcctgccctcacccctcccttctctgcagtggctgttctcctcaggagtgaccaggagccgctgtacccaggtgagtggagcaggctgggaccctctgggggagccctggaggacacgtgtatctggcgggagctcaacaagcgtatttgttgaataaatgcacaaatgcatgcagaaatgctaatcataatagtgcatttgtattgagtgcctgctatgtaccaggcactattctaagcaccccacatgtctaacccagactttttcagacaccagtgtattactcatgagtgcctcataaaattaaattagtgagttggaaaaccatgttttttttttaagtatgaaatagattcgattacagactatcacagtacatctctcagtaagtaaaggttatgctaatttttgtttgtttttttttttttttgcatccatatacatgtaatcccactgcatccccacactctgagggtgggactgttattctccctgttttacagatggggaaactgaggctttgagcaatgcagcagtttgccccagactacagagctatgggctacatcaggatgtaaaaatgtgtttcttactgcgtggcatggtgaaaacatgttggggaggcatgatataaattcagtggacccttctaactctcctaggaggtagtttttttgtttgtttgttttaaaaaagaaaaaagtcttgctctgtcacccaggctagagtgcaatggtgcagtctcagctcaccgcaacctctgcctcccaggttcaagcgattctcctgcttcagcctcccaagtacctgggaatacaggcgtgtgccaccatgcccagttaattttttgtatttttagtagagatgag

SEQ ID NO: 8110 - DNA, 6000 bp, Homo sapiens
gtctcactctgtcgcccaggctacagtgcagtggcatgatctcagctcactgcaacctccgcctcccaggttcaagcgattctcatgcctcagccccctcaagtagctgggactatagatgcacaccaccacgccctgctaatttttgtatttttagtacagatggggtttcaccatgttggccaggctggtctcgaactccttacctcaagtgatacacccacctcggcctcccaaagtgctgggattacaagcatgagccaccatgcccgaccctgttgttatttttgaactgggacataagcctttggcagttgtgatgccactgtctccctcccctgctttatttttttccaaggcacattccatgtatttcactcatttattttcactccctcactcccttagtagaataacatctttaagaagattttttttccttttttttttgttttttgttttttttgagacagagtttcgctcttgttgcccaggctgaagtgcagtggcgtgatctcagctcaccgcaacctctgcctcccaggttcaagtgattctcctgcctcaccctcccaagtagctgggactacaggcacgcgccaccagggcctggctgattttgtatttttagtagagacgggtttctccatgttggccaggctggtctcgaactgccaacctcagatgatccgcctgcctcagcctcccacagtgcttggattacaggtgtgagccaccgtgccggctcctttttttttttttttttttttttttcctgcaatctcagtttctggagcagggcttgtcagcaagtcattattgattaaatattagttgaattaatagattaattaactggccactgagcacctgctatgcactttcctatgctccatggtactggggacatggcagtgagttagatagcctggacctgccgtcataggtctcccagtcaaataggagagacgaacccatcattaggcactgccagcagcaagcactgccagctaatcacagcactgattttgagcaggagtgggacagcttagatttctctagttccaatttagaagtgttcaccattcatgatgctttcttggacctatttaattgtttttcagactgaccgtcttctctccctaggaggcataggcagagggatcagggctgggaaagggaggcccaggggactgtgtgagcccagagggcttcatggaggaggtggtatgtgagcggacagaaatgagcaaggtgtgctcggcagggaaagcagctgtgggagggtctggtgatgaaagtgtggttttggttcaaggaactgaaagatcataaatatggctggggtgggaagaacggtgagagagtaggccaaagaggtcattcagggaagatcattcaaggccctgtcagccacagtgaggagctgagactgtgtactgaggacaccggggagccacagagtttttgagcaggagagggatgtgtcaaattcacgtggaggtcggattgcaaggattgagtggagtctggaagccaagggaggtggctggagtggggacccaggtgggagagactaagtcagagcttgtgggggagggcgaattggagagaccctcacaggaccaagtcgacaaatggttggggtccaggacaaggcccagggctgggggtagtcaaggagagctttctggaggaggaggcaccaaggctgagacctgaaggatgggttcaacagctcttcttgaaatggggacctggggcaggaagatggtaaggacagttggggacatagtaggtgtgggagtctggggacaccttgaaggaggtatctggggggccctggaacctctagagctggagtcaggggaaaggaggaaacaagacagagctttgggttgagaaagagggaattgaagctgtaatgatgggggaaggtccacaggggcctgtccatgtagggctctgtaggacatggtaagaagtttgtcctttgtcctgggggcaatggggagccacagaaggattttgagcaggagtgagacagcttagggtttttaagttccagttcagaagtgtttatcattcatgatgctttttggacctatttaattgtttttcagactgactgacttctctccctaggaggggcacttattttaaagggtccgttgaaataaaagatctaactgctgaaaatgaaaaatcagtttgcaaaaccagtgttctgttccgttttctgtagacaattgatggttcagtccaaagaggtcagaaacaattgatggtttagtccaaagaggtctgtaccatctagtgaaaatcagcaccattaaacatgagaacatttctgttttaaaccatttggaagccccgtgaattttattttattttgttatttttaaaattagagacaggggtctcgctctgttgcccaggctagtctcgaactgctgggctcaagcgatcctcccacttcagcctaccaaagtgctggaattacagatgtgagctactgctcctggccagcctgtggatttgtaaatgtctcctgtggtgtgatctgcctcatgtttcctgtatgtaggcttcagaagcacactctgcattctcagatggcttgaatcagccttgactttttccccaccctctcagcctgaatctcaggttgagatgccattatctgcacccaccctatatgctctgggcttagaactgataccagctggttatcattgtgtataaaagtgtcactaggtatagagagacatctaaaataatctcctctcaaaattttctattctgctgctccatttcttctgctttcagtattttttgagcaattacaatggtctgggccctagagctagaggaataaatcagacacggacatagcaagggacacatatgttgattatgtgtgattaaaatgtatacaagatacgagggcgtacacagatctcaccaactagcatgtttcaagggcttactgtgcttcctgccttccatggatgatctcattgacttcccaacaaatgtgaggttggtattattaatctccacattgttcaaagaatgaaagtgtggcttagagaagggaacctcttttcccagttccacagagctgagatctgaagtctgagctgtgggactctgagacccacccccttaaccattcagagatcccccagccaccaccctccagtgcatataagatgatacccatttcatttgttgttttgagaccgtgtcttgctctgtcgcccaggctggagtgcagtggcacaatcacggctcactgcagccttgacctcctggactcaagcagtggtcccacctcagcctcccaagtggctgggaccacaggcgtaggcatgggctaccacacctagccaattatctttttgtttgtttgtttttgagatggagtttcgctcttgttgcccagactggcatgcaatgatgcaatctcggctcactgcaacctctgcctcccaggttcaagcgattcttggacctcagcctcccgagtagcctgccaccatgccaggctaatttttgtatttttggtagagacgaggtttcaccatgttggccaggctggtctcgaactcctgacctcaggtgatccacccatcttggcctcccaaagtgctgggattacaggcatgagccaccgtgcccagccgcctagccaattttttaagtttttgtagagatggggtcacaccttgttgccccaactggtctcaaactcctgagctcaagccatcctcccgccttggcctcccaaagtgctgggattataggcataagccactgcgccctgccaatatggctaatactggtttatagatgaggccagcagggctcagaagtaaagccccatgctcagcatcactcagcaagaaagtggcagaggtgtgatctgaaccatgagctctccaatttaaagggctgctgtagaggaggaatcaaatctcccactgccaccctcccctgggggtggggtgttcagggatctgtgacccagtgggttttacttcctcctttttgcgggctatggtgtcatactccaaggggggcaggaccacaaggcaaggggactagggggtattctgtgggctgggagagagcacgcttcctggcagtgccctctcccagatgagacctgatctcttttttgttttttgttttttgttttgagacagagttttgctcttcttgcccaggctggagtacaatggcgcaatcttggctcactgcaacctccgcctcccaggttcaagcgattctcctgcctcagcctcctgagtagctgggattacaggcatgcgccaccacgcccggctaattttgtatttttagtagagacggggtttcaccatgttggtcaggctggtcttgaactcccgacctcaggtgatttgcccacctcagcctcccaaagtgctggattacaggtgtgagccactgcgcccgaccgagacctgatttcatctcatgtcataccagcaaggaggcagagcataagtaccaacctggatggggcgcgctgggagccccatggaggttctagggtcctgagaatacaggcattgagacgggctgaggaggaactccagcatccggctgcccgtgcccaccttcagtttcaccctaccctgctcccacaaggatctgagcagggagggggcctgatttccttctcccgctgagaccacagtcctctggaggctaggatctggtgatggggcaccctagctaggagcctgagcctctttataatttagtttccatagaagttatatgtgcatttaaaaaaattcaatgtaagtaaagacctacaatgaaaagcaaccgtcttgtctctgggggtgggatgggggatgcctttgcgtggggagctgttaggagacttgacagtcacctttgctgagagcctcctgcatgtcaggggctcttctatgcacattatatgtgtgctaattccttttttaaaactttactttttgtggagatgagtcctgctgtgttgtgtaggctggtcttgaactcctggcctcacgcaatccacccccaaccttagcctcccggagtgcagggattacaggtgtgagccacctttcccagcctgttgactcctttaattcagaggagtcagtcagattttagacatctcaaatgttgtatgttcaaaaccaaactcctggtcttttccccaaacttgtgtctccctgtcttgcccaatcagctgttgacacctccaatccttgcagttgctgcggccaaaactcagtcatccctcactcctttactgctctcaaacccacatccagcctagaaatgccatcccctccaccttcaaaatgcatccagaccccgccctttcttcgacacttggctgaccacaccctggtcctgtccacccttggctcctgtctggatgctcccagcagcctcctccctgggctcccttgccctgccccagtctgttccccacgcacagccgccaggggatcctgtaacacctgtgtttgtttcttcgggctgctgtaacaaattgccaccaagttggtggcttaacacaacagaatgtatggccaggcgcagtggctcctgcctgtaatcccagcactttgggaggccgagacagtcgatcatttgaagttgcaccactgcactccagcctggataacagagcgagactccgtcttaaaaaaaaaaaaaaaaaaaaaagacaacaaattcattctctcagttttggagccgaagtccaaactcaaggtgtagcagggccatgcgcctccagaagctggaggggagattccattcctcacctctcccagcttctagtggctccaggcattgctgggtttatggccacatcaccctaatgtcagcctccctgttcacatgaccttctgcctgttctatctctgaggacagttgtgattggatttagggcccatccagttagtccaggatgatctcatctca

SEQ ID NO: 8111 - DNA, 6000 bp, Homo sapiens
atcttctccagcacctgttgtttcctgactttttaatgattgccattctaactggtgtgagatggtatctcattgtggttttgatttgcatttctctgatggccattgatgttgagcattttttcatgtgttttttggctgcataaatgtcttcttttgaaaagtgtctgttcatgtctttcgcccactttttgatggggttgtttttttcttgtaaatttgtttgagttcattgtagattctggatattagccctttgtcagatgagtaggttgcgaaaattttctcccattttgtaggttgcctgttcactctgatggtagtttcttttgctgtgcagaagctctttagtttaattagatcccatttgtcaattttgtcttttgttgccattggttttggttttttagacatgaagtccttgcccatgcctatgtcctgaatggtaatgcctaggttttcttctagggtttttatggttttaggtctaacgtttaagtctttaatccatcttgaattgattttgtatactaaaatgagttttcaaaaggatctttgtggctaccttattagttcatagaaagtggaggcttgtctggaatgatattaaagaatttttttcattttaattgttttagagacagggtctcagtctgttacccaggctggagtacaatggcacagtcatagctcactgcagccttgaactcctgtgctcaggagattctcccaccttagcctccagagtagctgggactaaaagtgtgagccaccatgccccactatttatttttgtagagatgtgtttgggggacggtctcactatgttgcctaggctggtctcgaactcctggactcaagcaatcctcctgcctcaacctcccaaagcattgggataagttttgcatagacatgtttgaccctctcccttcctttattgcagcaaagatttccattttctcacagggaggacttggggcaaattgtttttgtcgttgttattgttatttgaggatgtgggtgggtcatcttggttaatgtcagtgcaagaacggtgtctgctcctcattattggggttccttagctattcaggcaggcagcagctcccttgagaagacttcctgacccccaggtccccatcatatgctctcatacaccagctgcccctccttactgagcctatgtccttgatagtgctgcatttacctgtgatcctgtggctgagctctccctcacacttccagacaaggaaggcctgtgaggtatcagcacagtgctgaacatagtacctggtacacaataggcatttagtaaatatgtgaacaggaacaaatgaaggagtcagtgagtgaaagctccaagcctgactcagcggaactggcagtcggccagggcctacaaagtgctgcctggccctcagtagggggtggcagatctggggatccctcttcaccaaatagagttgcatcatacaggtaaaggtcccaagtgcctattgttttcttttcatcattttccatgtgtgacaagagtatcacgcaatcatgtgaatcaatggacttagttttctcactagactaatgtgtctaggaattatctgtgttgtcatggggattttccaggtgtcatttacaactacctgtggacaagatgaggtgctaccctcatcttagaattagggatggtggctgggcatggcagcccatgcctataatctcagcactttgggaggctgaagcaggtggatcaactgaggtcgggagttcgagaccaacctgaccaacatggagaaaccctgtctgtactaaaaaacacaaaactagctgggcatggtggcacatgtctgtaatcccagctactcgggaggctgaggcaggagaattgcttgaacccaggaggcggagtttgccctgagctgagattgcatcattgcactccatcatgggcaacaaaagtgaaactccatctcaaaaaaaacccaaacagaaacaaacaaacaaacaaaattagtgatagtgatgctcagcctggggaaagcatttgtccagtggcacacaactgggaaaaggggaagctgagatccagcaggaggtctgtctccaaagccctcctagactaaagctgcttaacaatttgtggattatgaaattctcatagagtttgattaaagctgtggccccctcttttccaaataggcacatacatgtttgcataaagttgtgaggcttcacacactccctaaaactctttcataaaccttccaaggatcctctaggtattcacgaccatctattatgattgcatctcttgggggtggggtaaagagggagggcatgagcaagtgtgcatcagggctgaggaaggtggcgctgttgcttctccatttcccaataagcttccagattctttttgatgtcagagggatgtgggctcgtgtctcagattcaacccgtatgcattgagtcacagttttctcttccgtcagttaagatcatgacaatgagaatgtgtgcccctaaggtggttgtgaggattaaatgggatattgcatacagctagtatataataagtgctcattaaatggcaactaccttgatccactcattcatttattcacgaatccaataacaattcactgggcactttctatgtaccaggaaatagtctaggaattgatgatgtggcatcttggacaagacatacgaggtcactgcgcttatggacattccattggcagagacagataagcaaaaaataaacagataaggaaatgttaggtggagaagagctacaattaaactaaagcagggggatatttcagacagtgatgagaactacgttagattgagtggttaggggaagactgtcttgtttttttttctgagcagagacaatgaaagattcaggtggaaggcactagaaggaggcaggggtggctacaagaatcctgaaacaggaaaaatgtcagagaacaacatggaggaatgagtgggaggagaagtcagagcggtaatagggccacgtcatgtaggaccatgtgaaccctcagtggagacttcagatcttattctcagcaaagtgggaatattgtaggccttggtgagcacgtggatattaattattttacattttagtggggttaccctggcttgtggggcagtgaaacaattgttaagtggagtaagcatgtcatccagaagtccagtgaaggggctttgcagagatcaatgcagggcatttgtaagtaaacttaacaaattttatgacttttatgtcaagtttttattgaacttgaacatcactgtaaaaagcgcacagctcaatgaattttcacaaactgaacatactcatgtaattgacatgcaggccaagtagcaagaatgccccgaaaccctgcaccctgttcttttctattcactatccacctaccatcttgatcatgggttgattttatctgtgtatgaacttcttttttgtttttgtttgtttgttcctgagattgaattttgctctgtcgcccaggctggagtgcagtggcactatctcgcctcactgcaacctccgcctccccgggctcaagcaattctctcgtctcagcctcccgagtagctgggactacaggtgagagccaccatgcctggctaatttttgtatttttagtagagatgggttttcaccatgttggtcaggctggactcaaactcctgacctcgtgatcagcctgcctcagcctcccaaattgctgggattacagatgtgagtcaccacgcctggccctgtgtttgaacttcatacacataaaattatgatgcattgactcttttgtgcctagttgcttccactcaacattatgcctgtgagtttcagccacgttgtcgcctgtagctgtggtttgttcttttttgttgctgtatactagtctattgtgagaaccctcactgattgtctatatctatattgatgagcattttattaagaaagcttctgtgaatattttgttcattttttggtgaacacacatacacatttttgctgggcatgtacctgggagtgaagtggctggtttcctgggtatccatttgttcagcttcaggaaatactgcccagcagttccccaagtggctgcacagtaatcccaccttatccactggagatatcttctgagacccccagtggatgcctgaaaccccacataatactgagcactatgcatactctttttttttcctatacaatcacattatatagggagggtggtatacacagtgcagacatggtggacaaaggatgattcgtgtccggggtgggacagagtggatggtgagagatatcatcatcctactcagaatgatgcacaacttaaaacttacgaattctttatttctggaattttccatttaatattttcagactgcgattagctgcaggtaactgaaactgcaaaaagcaaaaccacagatcataagaagtatgcggtgggggtgatattcatcgtattttatcaaccatctttactgtttagggcacaagccaatcagagcagaccctggctgggccacccattaacctaagcttgtccaacctgccttattttgttgttgttctgttttgttttgttttagctttttagcagcctgaagccatggttttcagtttctgtctccagtgatacacagaaaggaaggatgaggaaggggctttactggcccaaccagaaacggaaactaagaacccatgactgtattctctcccttggacagcgttaaccattaacccttaattgctgggtcccagcaggggaaagggcagcctggggaggcggatgttggggaggggctaattaccaatctggtatgtaagtattttgatagttttacaaatgaggtgtatgctgactaacagccacccctggtgtggatgtgattggcagttccgagagaaatatggggacgtcttcacggtacacctgggaccgaggcccgtggtcatgctgtgtggagtagaggccatacgggaggcccttgtggacaaggctgaggccttctctggccggggaaaaatcgccatggtcgacccattcttccggggatatggtgagagcctcagaggcactgggagggggcgggtggggggtgcatcagggaagggagtatatgggaggaagaaggactcagagccttcttccaacttcttctacaaccaacccacacctcccctgcaccccaggtgtgatctttgccaatggaaaccgctggaaggtgcttcggcgattctctgtgaccactatgagggacttcgggatgggaaagcggagtgtggaggagcggattcaggaggaggctcagtgtctgatagaggagcttcggaaatccaagggtgagtcctgggggatgaataggaaagaaagacaatgaaacactgagagatgcaggtgcacgggaatagaaagacagagaggtatataagggcacagacagagacagacgaaactggagacaccatcagacagagggatagagacagagagggagagagacaggggaatagagagggatggggatgggcaggagagaaacacagagagccagggaaagagagagatgccaggtgtataatgtccaagagttactcaaagaggctggatgtgatgactctcacctgtaatcccagtactttgggaagctcaggcaggaggattgcttgaggccaagagttggagaacagcctgggcaacataatgagatcctgtctctacacaatatagaaaagaagtgagccacgcatggtggtgtgtgcctgtagtcccagctactcaggaggctaaggtgggactacaggatcacttgagcccaggaggttgaggttgcagtgagctgtgattgtaccactgcactccagcctggacaacagagcaagatcctgtctcaaacaaacaaacaaaccctcaaagacatataatttcatggatcaattgtgtctgtcaaagtcaaaaacggaag

SEQ ID NO: 8112 - DNA, 6000 bp, Homo sapiens
gcatccagaccctgcagacactcactgcagaggaaggacagtctgatgtgggggacttagcagggggaggtcagtctcagccaagcaccccgtgccctccccgtaaacctgaccctgagaaagaccctggagaactgcatcagagcctggcctgagggacccctgggatattcacagagaagctcagccccagggctcctggttccaggtgactcaggggagcctgtgccagggctgtgttgtggcctcctgggcaaggctaactggaagcaaggacttagcagctgtccaagggctgtggctcctggagctggattctggatgcagaatcggactttctggccacacttgttccctgtccccagagtctcatttggacaaggacagagccttgtcctttacttgagactcaatgtggggaggatagatagacaaggttattagggtgtcagtccattgccctggggacataggtgactccatgggaagctcagtgtccccaggaagaggaacagaggagagaagatgctcccggcagctccttgtccaccagggatcaggcccagggccttctctcttggaggcaaataaacataaatgatgttcatttgagcagctcctctgtgcagagctgagatcaagtaattgtaaatattttgaggttaattcacaaacaacctcacagccaaatagcacttatcctacttattgaaaggaaattgaggcacagggagacagtcactaacaagggtcacacaggccataggtgtcagattgaagtcacatgaggtctgtctgtagccacagccccctcctctcctcaactgggggtgggtggggctgtttgttgttaggcatctgcatctgagaccagtcatgggcttgcgttcttttgtcttgggcatccacagctcagaagcggagattctggtctggagagtgataagtaaatggagaaataatcagttttactctagaactagatcacctcaacagtcagggtcagtgccgggattgtccaggcctctccctgagatccacagccccctcacatgacctcaaatcctgtgtttcccgatgtgtcagtgtcactcccacggaaggataaaggaaaggacttcgctttctctccccactcacaccctgtgccaacagaggcccaaagtgagacacacgcttgctcagtagctctctcatgaaggggggaatgagtgaaggaatgatccataacctctatagagactggatcctggatgcagaatcctgggaggttctgaccacacctgttccgtgtccatcaggggctgagatccatgtaccattcctctgaccccctgtcccgaaagccaccctatctcatgtgactctggggttccttggccatgggagggttttcaaggctccctggtcctggtcgggacagccaagggactcctagtcctggggtctccgaggtcactataccccgcatggctcattgccatgggcatttctgactttcttctattcctccatgttcttcgtcttcctccctcttcattccagctgagatgcccatccctgaacatcttcctccactcttaggccttccccagacactcccttgaacaaggctggctgtcctgttttcttgccgctcacactgtgtcctggcccacttcccaggcaatagggaaggcacagaaatcacaggcaatagggaaggcacagatggagcccctgccaggctccatcacaagccaatgtcaacaggtcaccaggagaatgagcttccgctgtgttcctgcccagggctctttacttccatgaggccaacacacggaacaggcagcaggacgggaatgagcgactcctccatccactccctacactgactcaccagggggtcagaggcagaaggacaggtctgcagtccccaaagcccgcatgcttatttcactcacttcactacccactccatcttcatcctggtgtggggctcacatcctccagtggatcctgggacctcccccaggtggagctggccaggcaggtgctgtctgataggtttgctgcccattccacatacacctgtgtcctcatgatgatgccattgtcataaggtggagtcccttggactgagaagtgaaccagccactggcgtctcacttagactctacccagttacaaaaacttaaactctagttgtgttttctgaggttgataggagaggaagaaaacctttcacatgcctgttttgaggcttctcctctttttgcctaactctgcacaggaactaggggcagggagcgctttctaaatttactaacatcacacacattgcttctcctaacttggcatcatttctccctttatgtaattgacacacctaagagttcctctctgaccggttctgtcctcttaacaggtctcacatccctctctctgttcagggagtcactgatttcaaaccactttcagcatcttcctttgagcataatgtgatcactttggaattcagagcagacctaaaccttagcataatattaaaagaagtactacttccagcaattgatcttagatctttaggccattgataagaatttccacttatggaaaaaatttaatgtttcccccaaatgtctttcacttttttaactatagtcagaaaataacatgagatctaaactcctgacaaatttttaagggcaaattatagtactacagattgagtatcccaaatcctaaaatccaaaatctgaaatgctccaaaatccaacattttttgaccactgacatgattctcaaaagaaatgctcactgaaggccgggcacggtggctcatgcctgtaatcccagcacttcgggaggccaaggcgggaagatcacaaagtcaagagatcaagaccatcctggccaacatggtgaaaccccgtctctactaaaaatacaaaaattagctgggcgtggtggcatgcacctacagtctcagctactttggaggctgaggcaggagaatcgcttgaacccgggaggtggaggttgcagtgagctgagatcgtgccactgcactccagcctggcaacagagcgagactccatctcaaaaaaaagaaaaagaaagaaaagaaaagaaaaaagaaaggctcactggagcactttggattccgtattttcagatttggggtgctaaactggtaagtatattgcaaatattcaaaactcaaaaacagtcagaaatccaaaacacttttagtcctaagccttacacataagacatactcaatctgtatgaactataggcaccaagctgaacagcagatccctagaacctcctcatcctgcataactgaaactgcagacccatgaacaactctccattcccccagttcccaggctttgacaaccaccattctactctctgattccacaagtgtgactactctagggacctcatataagtggaatcctacagtatctgccctgtgagtggcttatttcatttagcataatgtccaatgggagaaaataattgcaaaacttcttctcaaagttctgtctcataactgtcaaacacacatggtccttgagggccagatttccagcagttcatgctcccccttttccaccagtcagttctgcatttgcaaatgtccacatgtatttatggagagatccacagcatcctcgcctgccctctgcaaggggagaagggacattaaagaccaaagacaggccgggtgcagtggctcatgcttgtaatcccagcactttgggaggccaaggtgggcagaacacctgaggtcagaagttcaagaccagcctgaccaatatggtgaaaccccatctctactaaaaatacaaaatttagctgggtgtggtggtgggcgcctgtagtcccagctactcgggaggctgagacaggagaatcgcttgaacccgggaggcagaggttgccatgagccgagatcgtgcctggccaacacagcaagactccatctcaaaaaacaaacaaacaaacaaagaccaaagacaaagaacatacatatggttctgctgttaaatccgggcagctcctgcctgtcacctgaagttctagatcattccctggactccactctatctttaggggtctctggctcaagtcagtcatcatcaaacacctgggaaaaactgccccaccttgtgcctccactgcctaacgactgagctgacctccaggcttgcctctggtgtcccctgtgttatttctactgaaacatccagtcccaggccaggctgcacaatatgtacagggtttaaggacaatgggaagacccatcactatccatttctaggatgtccttgcaaagggaaaccacagaaaaaatatacctagggaaacaaagtaggactgaaggtggaagggacccagcacttgaatgttccaggtgaggaccctacagtgggccaagtagtcaactggtcagggagggaccaggagaggcaccaggagctgtgacctcccccccagtcctgtgtctgttcacagcccaatgctgctgcttaattcacacttgagaaagtctgtgcttcccccacaccgagcaggcagcctcgcagtctctgagatctcagatcatcgtgcatctgtcttgtgacacatgcacccaccgtgggtttttaagggctcaggtgggctgagaggtggaaggtgccaactctgattgaaagatgcctgtgaggaatcaaaggtgccacacagggcaatcttctctctgttatctgcacagcggagctgcccaagccctccatctccagcaacaactccaaacccgtggaggacaaggatgctgtggccttcacctgtgaacctgagactcaggacgcaacctacctgtggtgggtaaacaatcagagcctcccggtcagtcccaggctgcagctgtccaatggcaacaggaccctcactctattcaatgtcacaagaaatgacacagcaagctacaaatgtgaaacccagaacccagtgagtgccaggcgcagtgattcagtcatcctgaatgtcctctgtgagtatatctgctcctctctggcccaggctgccagcccaaatccacagggccagaggcaggatttctcagtccctctcaggttcaagtacacagaccctcaaccctggacatccagactgtctgtgactttctgccccagaaaaacctgggcagaccaagtcttgaccaagaataggaggggaggggctgcttctgtcctgggaggctcagggtccacaccctatgatgggagaaacaggtgaatatctcagactcaggctcagtagatacaagaggggtttggctgagactttaggattgtgattcagcttagagggacactgtggtccttccatagaccaggaacttccacttccctctgacaatatcacctgtggctttattttgtttgctccagatggcccggatgcccccaccatttcccctctaaacacatcttacagatcaggggaaaatctgaacctctcctgccacgcagcctctaacccacctgcacagtactcttggtttgtcaatgggactttccagcaatccacccaagagctctttatccccaacatcactgtgaataatagtggatcctatacgtgccaagcccataactcagacactggcctcaataggaccacagtcacgacgatcacagtctatggtaagtggatccacgaagcactgacatcatgttttgaggtggagtctgtctggttttcaaacaagagccaggaagacattttctatcccagcctgtgtccagtgggcacaagcaaatcccagattctcccactgaacctccccaatatgtctctacagactcttttcttcttgttctgatttctcatggcgggccccaggtccagcttggaatgtggggaggaggctccctcagccccacagccctgtgtagtggaggaagcttcacagagcgggaaggagcaagggttctcaaggtcaagttgcttctctctgtc

SEQ ID NO: 8113 - DNA, 6000 bp, Homo sapiens
tggaaatccctccagggaaaatacacttctcttgagcagggtcacgaggggtgggggcaatgtgggaggtggggcaaatccaaagacaaggtcaacagcaataataataataacaatgacaggcatttgttgcttgttggctgggcctcttgcatacagttctcccaacatccctgtgaggtggtgatgcttatccccattctccaggggaggaggctgaggcccagagaggtgaagtcgtgtgccacaaaataccccagccatatggtggtagaaccaagttttcagccagactcaccagctcacagcagagctgccctggactctacagccattcagtgtatagctgggccactccatcattcaaggcagttcaacgtcaagattcctgatttgcctcaacctggggcctctagaagataccatcacccccaacaagctgaagacgtgtgtccggaacactcagacacacacaaagtgctatggatacaccacaccccgacctagctgtctcttcctgatggacctcactgggtagaaatgcctggcaccgctgcctcagatccctaggtcagctctcactccccaatagaagtttctgagatgatgatgaaaacgttctccatctgtgctgtccaatggagtagccactgatcacttgaggctagtgagcacttgaaggtggctagtttgaggaactgcattttttaatgcatttaattttagttactttgaatatatatacacatatatacatttatatatacatattcatacacatacattttacatatattttatatgtatatgtaatatatatataaattatatatgtatatatttttatatataaatatatattatatatttataaatatataaatatataatatatattatatagatatataaatataaatatatattatatatataaatatataatatatattatataaatatatataaattatatatttatatatataatatataaattatataaattatatatatttatatataatatataaatatatataaattatataatttatatattatatataaattatatattttatatataatatatacaatatatataaattatatataatatataaatatatataaattatatataatatataaaatatatataaattatatataatatataaaatatatataaattatataaatctatataaatatatactatattataaatatagtatatatttatatatatttatataatatatttatatagtatatattatatatttatatgtttatgtatatataaatatataatatataaatatatttatatattatatatttatataatattttatataatatgttatatatttttatataatatattatatatatttatatgctatattatatagtatattatatataatatattttatatattatatatatatttatataatatttatatattatatttatataatatgtttatatattattatatttatataatatgtttatatattattatatttatataatatgtttatatattattatatttatataatatgtttataatatatataatatatttatataatatgtttatatattatatatataatatatttatataatatgtttatatattatatatataatatatttatatattattatatatattttataatatataatatatataatataatatatatattatatatattatatatattatatattagttataatataaatatataatatatgtatataattatataattatatacatattatatatgtatataattatataattatatacacatattatatatgtatataattatataattatatacacatattatatatgtatataattatataattatatacatatattatatattataatatattatatattatattatatattataatatgtatatataaatataatatataatataatataatataatatatataatataatatataattatatataatatatattatatataaaataatatatatatattcagtttttttttttggagatggagtcttgctctgttgcccaggccggagtgcagtggcacaatcttggctcactataacctccacctcccaggttcaagtgattctcctgcctcagcctcccgagtagctgggattacaggcatgcgccaccacggccagctaatgtttgcatttttagtagagacagggtttcatcatgttgcccgggctggtcttgaactcctgacctcaagtgatctgcctgcctctgcctcccaaagtgctaggactacaggcatgagccaccacgcctggcctattcagtatatttttttgagacatggtctcactctgtcacccaggctggagtgcagtgtcatgatcaaagttcactgcagccttgacctcccaggttcaacaatcctcctgcctcagccttctgagtaactggaactatagttgaaagccaccaagcctacctaattttttaaatttgttttgtgtaaagttggggtcctactatgttgcccagcctggtctccaattcctaggctcaagcaatcttcccacctcagcctctcagaggggtaggattacaagtgtgggtcacctgtgcctccctaaatttatatttaaatagccacatatgactaatagctatgatattaaacagcataacactagaccctccattatccaagctctgttgatccaaccaacagagcacatttgatctctcctacctcccagcctcacacacacaggccccacaccctccttcctggctccactcacccaagatattgcaacctcctcaatacaccttgatgactatctcagcctccacatccttgcattgctatttatgctgcctggtgcacctcatgctgcctcaccccatcatctgcctcatttctactcttactccaggtctcagctcagatgccccctcccccaggaagccctccctagccgtcaggttgaatgaggtgtgtctccttgggctctcccagactcctgggctcctccatcccagccctgatcactctggatcataattgtgtgagaggggtctgcccccccaaaccctacaggattgtgtgccctactgtggacagagggcagagcagaggtggtctcaatcatcactgtgtcaccaacatcacccagcacacacaactgggcactgggaatgtgtgctggaatgaatggaggatgctttttaaaaactaggctaagccaggtatggtgagtcacatctgtaatcccagtactttgggaggctaaggtgggaggatcacttgagcccaggagttcaacaccagcctggggcaacatagtgagatcccatctctacaaaacatataaaaattgaccagggatggtagcacacaactgtggtcccagctactcaggaggctgagacgggaggattgcttgagcccaggagttggaggctgcagtgagcaatgatcatgcaactatactccagcctgggcaacagagcgagaccctgtcttaaaaaaaaaaaaaaagaataacacacttggaataaacatgatccaaaaaagtacaaaacatacactctggggctgggtgcagtggctcatgcctatactcctagtactttgggaggccgaggcaggaggatcatctgaggtcaggagtttgagaccagcctggccaacatggcaaaaccccatctctactaaaaatacaaaaattagccaggcatggtgacgcatgcctgtaatcccagctactcagaaggctgaggcagaagaatcacttgaacctgggaggcggaggttgcagtaaactgagattgtgccactgtactccagcctgggtgacacagcatctaaaaaagaaaccaatccaaaaactacaaaatattcttgcaattataggtgacatatttaaatggtaagacaaccaatgttcatgaatggaaagacagagcaagaccctgtctcaagaaaaaaaaaaaaaaaaaaaaaaaaaaaaaacaggctgagcgcggtggctcacacctgtaatcccagcactttgggaggccaaggtgggcagatcacctgaggtcaggagttcaagaccagcctgaccaacatggagaaaccctgtctctactaaaactacaaaagtagccgggcgtggtggcgcatgcctgcatttccagctactccctgaggtgggaggatcgcttgaacccaggtggcagaggttgcggtgaactgagattgcgccattgcactccagcctgggcaacaagagcgaaactccatctcaaaagaaaaaaaaagaaaaacacgaggctaagagcttttttttttttttgagacgaagtctcgctctgtcacccaggctggaatgcagtggcgcgatctcggctccctgcaacccctgcctcccaagttcaagtgattctcctgcctcagcctctccagttgctgggattacaggtgcccaccaccacgcctgactaacttttgtatttttagtagagacagggtttcaccatgttggccaggctggtctcaaattcctcacctcgtgatctacccaccttggcctcccaaaatgctgggattacaggcgtgagccaccgcacccagcctgcctcagagccttcaagtgagtcagccacaggtgaaatcccacctctgtctattggcagacttgcctcttttcctgggcctctgtttccacatctgtgcaatgggaacagttatttatggtggctgctgaatgaggcagtgtgtgtttgaacaaacccaggggaattgttcaaacagaggctgttatgactattgctacagtgactgctgttgtagtcacgctgagtgagaaaaagaggttgaagagggtcaggggaggagtcctgggaagttccccagtcaccctgaaaaactggttcaacctctgtctgtgctcccatcccagggagtataggtggagcctccagagcccatggacagggcatgctggggctgggccagccccagcggtgtctctaaggcacccctgggatccccactgagctggcctacttcagacagccagggcccacccctctggcccccttagtgtccagctcgtggccccttggcatttccacaagacgccaagatggagattcccatggggacccagggctgcttctcaaagagcctcctgctctcaggtaaggaggaaatagaccctaaaggccaaggggagaaatggggactcagcccagagattgaagtttcctcttagaagtagggaaagattacctgagaggatgaaattagaataagatgggggaggggcaacagaatcacagcctcattgccattttatctatggaattttctataatgttaggaccatgaaggcaggaatttatgtatgtttggttccctgctatatctccagtgtctagaaattgaaggaagtttagatgtattacatatagttggtattatagcttatatattacatatgcctataagtattggttgaataaatgaatgaatgaatgaattcagagagtccatgtgtttagaagcaggccacacagcatctcaaggtagaaaaacctctggatcaacaggatggcaaatctgtggtaaccatgcctgtgttcccactcctgcacccagggcagacatcactaatcaatcccagcattgtttccaatgagcagcactcagagtccttgctccccgctgaagatctgtatctagagaggagcatgccatggtccctggcaacacccctgatctcagcccttccctgtaacttcccacagcctcaatcctggtcctctggatgctccaaggctcccaggcagctctctacatccagaagattccagagcagcctcaaaagaaccaggaccttctcctgtcagtccagggtgtcccagacaccttccaggacttcaactggtacctgggggag

SEQ ID NO: 8114 - DNA, 6000 bp, Homo sapiens
ccgtcttcgtaactgagtgagaaccagtctctaccaaaaaaaaaaaaaaaaaaaaaattagcctggcatggtggcgagcacctgtagtcccagctactctggaggctgaggcaggaggattgcttgagctctggacgtcgaggctgcagtgagccgagatcacgccactgcactactccagcctgggcggcagagcgagaccctgtttcaaaaaaaaaaaaaaaaaggaagcagaaatgcattcacaggctttgctgctaggtggttattattttttgtttgtttgtttgttttttgagagagagtctcagtcactctgtcgcccaggctggaatgcagtggtgtgatctcaggtcactgcaaactctgactcccaggttcaagtaattcttctgcctcatcctcctgagtagctgggattacaggcatgcaccaccatacctggctaatttttgtatttttagtagagacagggtttcaccatgttggccaggctggtcttgaactcctggcctcaagtgatccgcctgcctcaacctcgcaaagtactgggataacaggcgtgaaccactgcacctggccaatcactactttgtgtgtccagaaaattttcttcctcctaaaaagaaatcttctacacttgtatcatccccatcccttgagtgtgggaggaacgtgttactttcttctaaccaatacggcatggcaaaggtggtgcttatatgttgtagaagatttcttgctagctgacacaccctagagtctctcatcactgactttgaaggagcatgcactgatgagttgatgagggttttttgtttgtttttttgtttttttttgagatggagtctcgctctgtctcccagcctggagtgcagtggtgcgatcttggctcactgcaagctccgtctcccaggttcacgccattcttctgcctcagcctcccaagtagctgggactacaggtgcccaccaccacgcccggctaattttttgtatttttagtagagacggggtttcaccgtgttagtcaggatggtctcgatctcctgacctcgtgatgtgcctgtctcagcctcccaaagtactgggattacaggcgtgagccactgtgcccggctgagttcttttttttttttttttttgagacagggttttactctgtcatccaggggctggagtgcagtggcgtgatctcggctcactccaacctctgcttcccaggctcaagtgattctccagcctcagtctccccagtagctgggactgcaggtaccaccaatacctggctaatttttgtatttttatagagatgtggttttgctatgttgcccaggctggtctcctgagctcaaaacaatctgccctccttagccttccaaagtgctggggttacaggtgtgagccaccgtgcccagcccctgatgagttctaaagtcacaaggaaacaaattctgcagcaagctgagtgaatttagaagcacgtcctttcccagcggagccttcagatcaaaactcagtgccgggccgggcgtggtggctcacgcctgtaatcccagcactttgggaagccaaggtgggcagatcacttgaggtcaggagttcaagaccagcctggccaatgtggtgaaaccctgtctctactaaacatatgaaaattagccggggtgatggcatgtacctgtaatcccagctactcaggagactgaggcaggagaatcgcttgaacctgtgaggcagaggttgcagcgagccgaaatcgtgctactgcactccaacctgggcgacaaggtgagactccatctcaaaaacaaacaaaccaacaaacaaaaaacacaaaaacaaacaaacaaacaaacaaacccaaaactcagtcctggccaataccttgattacagcctcacagagaacctggctaaactgtgctaagctccatagaaactgtgagataataaatgcacacatatatatgcatatatatgatatgtgtgtgtgtgtattttaaatccaacgaaatattctttgagtaggaacattgactatcaaaaagagaagaattgtaacagcaatagtaaggttatgagaagaatgtctttagagatgaaaaagaggaaaagaattgacggctgggcacggtggctcacgcctgtaatcccagcactttgggaggccgaggcaggtggatcacctgaggtcaggagtttgagaccagcctggctaacagagtgaaaccccatctctactaaaaatacaaaattagccggacgtggtggcccatgcctgtagtcccagctattcgggaggctgaggcaggagaattgcttgaacccaggaggcagaggttgcagtgagcagagatcgcaccactgcaccccagcctgggtgacagagtgagactccatcttaaaacataaataaataaataaaaagaaaagaattgacctgagatgaaaaaaacaacttatttgtttttagaggacagtcctagaaatgtagccaggtggctggacgcggtggctcatgcctgtaatcccagcactttgggaggccgaggcaggtgggtcacctgaggtggggagtttgagaccagcctgaccaacatggtgaaaaccccgcctctactaaaaatacaaaaaaatttagctgcgtgtggtggtgggtgcctgtaatcccagctactggggagactgaggcaggagaatcgcttgaacctgggaggcagaagttgcaatgagccaagaccacctctttgcactccagcctggatgacaagagcgagactccgtctcaaaaaaaagaaaagaaaaaacacacacattggtgtcagacgtgttgcgagtggaaaccacttcgtaatctttatcccaagtgaactctccccctaaaacctctattacagggaatgctatgatgccatgtggtagatcagatgaccactctgaggatctggatcagcctccttccctggcatcctcagggcttgctccataggttcaggagcaaagtggccgaggtggactacaccacctacgtcactgatgaatgcccacctagctggcagtagcaagtgctgatcccccagtgtggtacagtttcctaggaagaccaaaaagccaaatacctgggcccgtgaggattacactggagccctttcatcctgggctgggcagggagtttttcctccctcgagtaaacaactctgggcttgttatttgcttttcttgccctttgcacttctgccaacagcagcatctgtgtatgcactgaatggccctattcaccctcatgttaacccgcacagtattgcttctgatcaaggagctccatatattaggaagtcagtggggggcagtccatgtaccccattaccccaaagcagccagcctcatggaacagcacggcctgtttgagactgggttacagggccagtttggagtcatcatctttggggtcggggtgctgttacaggatgggtaaccactctgaaccaggggtacatgccagatgatcccagattacaaagacctgtgaactcaagagtgccatttctttcttttatttttctctctcttttttttttgagacggagttttgctcttgttacccaggctgaagtgcaatggcatgatctcagctcactgcaacctctgcctcctgggttcaagcgattctcctgcctcagcctcccaagtagctgggattacaggcacatgccaccccgcccggctaattttttgtatttttagtagagacggggtttcaccatgttggccaggctgatctcgaactcctgacctcaggtgatccacccacctcggcctccctcccaaagtgctggaattacagacatgagttgctgcatcggccaagagtgccatttcttaggaccacacccgatgactcactcttcaaatttttatttgttttgttgttattttttgttttgagacagagtttcgctcagtcacccaggctggagtgcagtggcaatcttggctcactgcaacctccacctcccgggttcaagccattctcctgcctcagcctctggagtagctgggattacaggcggcgccacaacgcctgattaatttttttgtatttttaatagagacggggtttcatcatgttggccacgctggtcttgaattcccgacctcaggtgatctgcctgccttggcctcccaaagtgctaggattacagaggtgagccaccgtgaccggccttcactcttcaaatgtttgcttcctgttcctgctaccctgaaccctgctgttgaggggttctagtgtctacaagggaaccgctgccaccacgaggaataacacagtaagttgtgtaagtggagaccacctctgggccgtttggggtaccttgagtgtgtcactatggggttaggcagtgactaatttaggcaggaaggggaaagatttgctgctacacttggggccaaggaggcctgtgaatagaacctagaggcgtcccaggggagtctccaactaacaccatgtcccgactccctatctgtccacagccctccctccttggacaaggacaaggcctgatctgggtgcactgagacctccctcccctatgcagggcccagagtgacaaagagggtctgtgtccccttccctttgcagaagcacatcaagcccgcacacaggctctaccttcctctacccaaccccctctccactcctgcagacccccgccttcctgcaggtccccctccggcccctccctgctccgtagggcacgtagacccggatccccagctcccggaccccttccgactgctcccttcgccactcgcgcggcttccactcctggactcggcctccacccctgggcttggcctcaaagcctcctcagttgtcggccctggaaggtgcccagcggcggcagcgccagacgcgccccgttagctcagcgtcgctgagcatccgcagccgccaccaggccccgcccagcggccgcagccagccaggccgcgcccgggacgactgcagagcgcggtgagtgaacgcggccagagggagggactcaggcgtcccaggtccccgccctgcccctccccgggggcccgacatcccgaccctcagctccctctttttcttttggctccggcagtccgttttagggccgcagagccgccttttaaaaacacaccctgcatcccttccctgccctggggcttcgggcccaccagccccttggatcccttcccctcttgcaggatccgtgaatccagagccccaagccccagccccagccccatcctcattaaaattctgagtccctccctccatccaggagtcaggaatgtaggccaaaaatatcgctgccttccagacccaggcggctaggcttgcaacacctgctcggaaaacccgagtctgagctttaatggttctattatgatgatcatgatgatttatttttaatagagcagagtctccttatgttgcccaggctggtctcgaactcctgggctcaagggatcctccctcctcagcctcccgaaatgctgggattacaggcgtgagccaccgcgcccaggcctgattgttcttttgagccaagaatctgggcctcagcctaggcatcctgtggagcccaggaatccgggcccccaactgctaccgcgctagctcccaggaattttgcccccaacacaccccacccctatccactgtgatatctgagacctgcgtccagcccgagtcccttaccctgcggcgcccggtgccagtgggtactaggggagcattttgccgccccttcaagtccttaaatacaggaatctagcctctgtttcttggggagacccatcagtcagggatcgtagcccagaaccacctaaagcccaggaatactgctctcaattctgctctccctcagggctccaagagacagagatcctagcccccccattgaactgaggggcctggtcccccaatccgctgcgacccaggtgtctaaggtttcatccggcaa

SEQ ID NO: 8115 - DNA, 6000 bp, Homo sapiens
atttccaggaagccatgttctgctcttgagcgagcacccactgggcctcatgcaaggtagaaaaagcctgcgtacgtcaccctcccatgatgtggtcaacatgtaaactgcatgggcagggcgccaaataacatcctgtgcgctgctgagctgagctggggcgcggccgcctgtctgcaccggcagcaccatgtcgctcatggtcatcatcatggcgtgtgttggtgagtcctggaagggaatagagggagggagcgtggggatggagatctgggcccagaggtggagatatgggcctggaggtggagttatgggcctggagtggagatctgggcctagagatggagtgatgagcctagaagtggagatctgcgcctggagtggagatctgggcctggagtgaagatctgggcctggagtggagatatgggcctggagtggggataggaacctggagtggagagaggaacctggaggagagataggaacctggaggggaggtaggagcctagggtggagatatgggactggagtggagatatgggactggagtggagatatgggcctggagtggagttatgggcctggagtgaagttatgggcctggaggtggagatacgggcctggagtggagatatgagcctggagtggagatatggtcctggagtggagatatgggcctggagtggagatatgggtctgcagtggagttatgggcctggagtgaagttatgggcctggaggtggagatatgggcctggagtggagatatgggactagagtggagataggggcctggaggtggagatctgggcctggagtggagatctgggcctggagtggagatctgggcctggagtggagatatgggcctggagtggagatatgggtctgcagtggagatatgggcctggaggtggagatatgggcctggagtggagttatgggcctggagtgaagttatgggcctggaggtggagatatgggcctggagtggagatatgggactagagtggagataggggcctggaggtggagatctgggcctggagtggagatatggccctggagtggagatatgggcctggagtggagatatgagcctggagtggagatatggccctggagtggagatatgggcctggaggtggagatatgggcctggagtggagttatgggcctggagtgaagttatgggcctggaggtggagatatgggcctggagtggagatatgggactagagtggagatacgggcctggaggtggagatctgggcctggagtggagatatggccctggagtggagatatgggcctggagtggagatatgagcctggagtggagatatggccctggagtggagatatgggcctggagtggagatatgagcctggagtggagatatggccctggagtggagatatgggcctggagtggagatatgggcctggagtggacatatgggtctggagtggagatacgggcctggaggtggagatatgggcctggagtggagatatgggcctggaggtggtgatatgggcctggagtgtagacatgggccgagtggagatatgggtctggagtggagatatgggcctggagtggagatatgggactggagtggagatataggcatggggtggagacatgggccgggagtggagatatgggactggagtggagatacgggcgtggggtggagatatgtgcctggaggtggagatatgggcgtgggttggagatatgggcctggagtggagatatgggcgtggggtggagatatggatctggagtggagacatgggcatggggtggagatatgggcctggtgtgtagatatgggcctggagtggagatatggccctggagtggagatatgggcctggagtggagatctgggcctacggtggagatatgggcctaggatggggatatgggcctggaatggagatatgggcctgggtgtggagatatgggactggagtggagatatgggcctgatgtggagatatgggcttggagtggagatatgatcctggagtgtagttatgggcctggaggtggagatctgggcctggggtggagatatgggcctggagtggagatatgggactggagaggagatatgggactggagtggagatatgggcctggagtggagatatgggcctggattggagatatgggccgagggtggagatctgagcctggattggagatgtgggcccggattggctatatgggtctagggtggaaatatcggcctggagtggagatatgggcctggagtggagatatgggcttggggtggggatatgggcctggaggctgggtctctgcacagccgagagcactgttcttgggtgcaggtaggctctgatggtgagtttcccttcggcccaggaaggggctggctatcaagactcacagcccagtgggggcagcaaggaaggccttgtttgcctgcaaatggatcttccatcatgatctttctttccagggttcttcttgctgcagggggcctggccacaggagggtaagtccttctccaaaccttagggtgtcatctccccacataagaggattttcctgaaacgggagggaagtcctgtcagggagtctctcataaactaggaagaggggaccctggggtgctcggcccacagttccgaccttgcctccctggcctctcaaccccttggcagagtcaagttgtgtggggaccagggttggactagggtgttcaaagctgggttgtgtggtggggaagtggtaggaacagcagatcctctgaggacaaaggtgttactcacacacttcagcgtttccatgacggtaggggctgcagtgtggctgctgtcattctaccagaagaggtgggaaaccacagccatggccctgacattccaaatcctctgatgggggctaagttttttattttcattcaggcaactgctgatattccattctcaaaggacatgccctccacttcatgtctaccctgtgttgttttatgtcagtaatcttacagtattaaaatctagtaggagtctcttactcagcacttgctcaaagttctcagctgacacttttgttgtacggagacaccttgtctttgtgggatgggtccttcctttagccctaggcaccaaggtgtgatagcagccatagaaatgtggaaagtggggagaatcttctgagcacagggagggaggcacagctccacatcctcctctctaaggcggcgcctccttcaccccaaggtggtcaggacaagcccttgctttctacctggcccagccttgtggtgcctccagaacatgtgactcttcagtgtcactctaatcttgggtttaacaacttcagtctgtacaaggatgatggggtgcctgtccctgagctgtacaacagaatattctggaaaagccttttcatgggccctgtgaccacgtcacatgcagggacctatagatgccggggttcacacacacactcccccagtgggtggtcggcacccagcaaccccctggtgatcgtggtcacaggtcagagggctcctgtctgggattctccttgtcccacctcctgaatcccagagcttctggtaggcatgtccttgagggtcccatcacgcaggccctaactgtatttggggtaaagggggattgaatacagggaaatgggtgctgtggtgggaagaataagtgtccccagtgatgactgcattctaatccctggagtctgtgactatttatgttataggggaagggactgaaggggaagatggagctcaggttgttgatgagttgaccttgagatggggagacagcctggactgtcccggtgggctcagtataatcacaagtgtccacatgaaaggaggaggaagaggagagtggggattagagcagcgtagtgggagactccatcagctttgaaggtggatgaaggccataagccatgaatgcaggtggcctatagaggctgggaaagtcaagtaactgattctcctgagtctccagagggaacacagccctgcagatgccttgattttagccctcgaaaaacagggtccgctttctgtctccagaatcggagggggtcagtgtgctctctcctgctgccatgcttctgataattttctacagcagcaacaggaaaccaacactggaacccaggtcaaggacaagttaagaaaagacacaaggatagccaggcatggtggcaggtgcatgtaatcctagcgactcgggaggctgagagcaggagaatcgcttgaacccaggagacagaggttgcagtgagcgtagaccacaccacttcactccagcctgggtgaaggagtgagactctgtctccaaaattaattaattaattaaagaaaccaaacaaagagaaggttggctacaccgagatcagcaagggtgggatgatgatgccaccaccaggctccatccacatagggaggggttgatactcctcaaatcagcacgaggagccagcctatggaaactggcaccatggagaaggcacagacatggcaagagtggctcccagtccccaccaggaacagggtgtgtggacactggtgcctgccttactgatcagttcatacctcctgccaaggattccaattcgtccaaaagagattgaaccaagctgctaagagccgggacgtgcagcctatcctgcttcctcttccactcccacatagacagtaagaaagacattagtgtgaaatagatacaacagcccaagagatgaggctgagcccagtgggaagggaatcacagctactagagacagagggacagagaagagggagggagacagatggaaggacctgcaccaggagttatgggcacagaaaagaacatgaagacacagagaggaagcagagagacagacaccagcgaagggaaggctcactcattccaggtgccatggatgggatgataaagagagacaccttctaaactcacaacctctcttcctaggagtccacagaaaaccttccttcctggccctcccaggtcacctggtgaaatcagaagagacagtcatcctgcaatgttggtcggatgtcatgtttgagcacttccttctgcacagagaggggaagtttaacaacactttgcacctcattggagagcaccatgatggggtttccaaggccaacttctccattggtcccatgatgcctgtccttgcaggaacctacagatgctacggttctgttcctcactccccctatcagttgtcagctcccagtgaccctctggacatggtgatcataggtgagagtgtccagacattcttctcattgtcattgggatgcagagtgaatgatccaggacttggagacccaggtggttgtaaggaagatgagcttggtattcttatggagagagactgacttggtgaggtctgtgccaacagagacagagaaacaagagacacaagtacagaccaggtgtcataacagaggacaaacacaggggccatacagggagttagaaaagacagaaagagttaaaggagacagacagacatgtcccagacagaggtgtccttccatgctgactttgctcagagacctggcacaggttagaagtttcatttctgttttacctccacaaagtgttctctaccaggagaacccaaggacacccatatttctgacctgagttgggccctgtggcctcaggccttgtggcacctacagatgccatgcttattctgacacctctgacttccatgcaatggagaataatcgtcccaaaatatcatggccccagaacaccaacccctgtatgctgtgtgaacttgtggtctccagactggattctgaggctcacattccaaataaccccacatatcacatatgagaggatcactgagaagcacagagagaaatcagggacaccaaaaagcaaagacataaacacacagagaaagagccagaggaaggagattgagagactcacagacacata

SEQ ID NO: 8116 - DNA, 6000 bp, Homo sapiens
tgcctccccggctaaatctgaaccagctgttcccagcgggtccggacccccaagccgggatgcaaggccgcagacactgtggatccgagctgcctccgtgccgtccagccgggagtcaactgagccacggggaagcggggcggggggcgggtctctggctgtttcaagcagccggtaaagcgggtgtgagcgggaagccagggggaagctggtttctaattgggaggcgacccttccgtgaccctggcaagctggccgacgcctcgcccaccctccaaacggacagactgagggttgcgcggggagcctgctaagcggctcttccagcctctgtcctcacccccgccagggcaggtatcaacctgcccccaccccaccccaccccgtctccggaagccgccccaccctcctgtgcccgctcccacttccgcaggcccagcaggtactgggttccggtcttggccctgtcacttgtgggctgtgtggccctgggcagctggaacgacgtctctgggtccctgtggacaccggtgcccttagccggctgtatgcagggtgcggcagggtgcccaccccactgcacggggggctctatgaatgcagggtgcagatggccccttgaaggaggagtcgtgagccccgggctggggaccctggctcaggccttgaccaccccaagcctcagcctccctttttggccaagagctggtctgaaggcttgcaggggctcacagcggggaagcaggaattctccctccagtctgccggccctggagtgccgccgggcaggtggctgttggggctggcagggccggtgccctcagagcgtgcagaggcagtttcccctgcagaagtcagctgtaaggacaccttcccaggtgcccagtgggcgtcgggggagggggtgggcggggacgacacccccctccagctggaaggtcctggagggtcaggtcccggtcctgtccgtgggtctcgcatcacaacccccgccccccactttccctgggaatcctgtccaggaccctgctgtgtgaccctgcagaagtgtctggtcctctctgagctagaaccacaagtgctctcttaaaaagtgtctcccctagccctggcttgtttttaattatagagatggggtttcgccatgttgcccagactggtctcgaactcgctgggctcaagccatccacccagctccgccccccaaagtgctgggattacgggcgtgagcccccgcgccctgccgggccccagctcttctttcgaggctgcaaaaccccacatatctcagggccaccttcagagaacctctttgttatccgtttaaattagtcagatgggagacaaagaccgtgcaaagcggctaccgcccctccccccaagacacccccaaggtgtcccagaggccaggaaattcctgtttgtgggggggtaacacttctcaaaaaccactcggccatgccccttcccctcccaaagctaagaggccccaaaagcagaagtgtggccaggagatgacggggttgctggggtcccccccagacccccagagcgttgtcggaccttgaacggaccttctcgaaggttgagtgggcgccaggggcttcacacgtgggggtcctggggccatggcgaggggacgaagtcagacccaactacccctagatgttgggggggggaatgggtcactcgtcccccagatctcagacctgggtgctccccaagattcgcgggagcctcagggggtgcccgcagacatccccccaccaggcgtcagggagaacaagggcccgtccgccccgggtctccaagctccctgcccgggaggtgccgggggcgcctgggggctcctgcaccggtcggagcgtgcgacggccgcgctgtcggggggacaaggggcgcccctcactcacccggttcttgacctcggccgacagcccgtacgaggggcccttgttgaactgcgtggagctcatggctggcgggcgggcggcgggacggggccgcacaggacgggacgggacgggaccgccgggctggcgcggggttgggacgcgccgggctccgcgcgccacgcccccgccgctgattggcccggagcgcaaatgtccttataaggcctggaggcgccgaattcctgcggccgcggacttcctgagccccctcggtcgcccccggacccccgcctgggcacagcacccccgtcaccagaggcctggaggggcccctcgccccctttgatgccacgggaaactgaggcagggaggggccgaggccgccgggacgtggcactcctgcgggctctctgctcagagctcgtgggcggctctcactctttctccatctcagacttctcttctgccagaaaggggaggggagaaggctacctttggggcaggaatgagggcccctctctgccacttagaggcgtctaaccccttcccagggaactctactagctgggaggtggaccagggaaccagggcaggttcctcagagaaggggccattggagctggggctttgttggatgagtaggagtttgtcagtccaaaagagaataggattcttactgggtgcggtagcttgcacctggagttctagctacttgggaggctgaggccgaagggggaggatccgttgagcccaagaggtcgaagctgcagtgagttatcatcacaacatgacgctccagcctgggcagcagagcaagagcctctctctaaaaataaataaataaataaaaataaaaatccgagtggctcacgcctgcaatcccagcactttggaaggccgaggcgggcggatcacttgaggtcaggagttccagaccagcttggctaacatggcgaaactccgtctctactaaaaatacaaaaattagccgggcatgggggcacatgcctgtaattccagctactgaggaggctgaggtgggaggatcacttgaagccaggaggcggaggttgtagtaagtcgagatcgcgccactgcactccagcctgggcgacagagcaagactccgtcttaaaaaaaaaaacaaaaaaaaaaaacacaaaaaaaccctaataataataaattattaaaaagtctccgggacagtctcctgccaggcagtgctggctctcaggagaccttagctctggcccagcccatgcccaggaagacagagctggcacagaccaacccccaacccggattccctgtatgagccagcacaggcggaacccccccaccccgcccaccctgtttccctatatgagcaagtacaggacagaatgagaggcttggggctggaggaactggagggagagttggggctctgtcggaggaatcaaggaaagctgcatgtaagaggaggcaagggagatggggttttgaagcatcaataggagtttgacacattttattttattttattttattttattttattttattttattttattttatttttagtagagatggggtttcaccatgttggccaggctggtctcgaacccctgacctcaggtgatccacccgcctcagcctcccaaagtactgtgattacaggcttgaaccactgcacctggccgacccatgtcattttagaccagtgctgaccatttctgttattctgagatgaaggaaattttcaatgtggcactatctactactgtagccactggccatggggctactgagcactggaagtgtggctggtgccatcagggaagcaaatacttcatgttctttttattttattttattattattttttgagacggagtctcgctctgtcacccaggctggagtgcagtggcgcaatcttggctcactgcaagctccacctcctgggttcacgccattctcctgcctcagcctccccagcagctgggactacaggcacacctccacacccagctaatttttgtatttttagtagagacggggtttcactgtgttatccaggatggtctcgatctcctgacctcgtgatctgcccgcctcagcctcccaaagtgctgggattacaggtgtgagccaccgcacccagcaaatacttcctattcttaaatttcaattaaaaattaaaaactggcactagattccattttttgaagacacatatatataaatacacatatatatgtagctgggactccgagtagctgggaccgtagacacgcaccaccacgcctggctaatttttgcatttttagtagagatgcgggtttcaccatgttggccaggctggtcttgaactcctgacctcaagtgatccgccggcctcagccttccgaagtgctgggattataggtgtcagctgccgtggccgggctatttcaattaatttcagttaaaaattaaaaactgacatgatttccgtttttgactatatatatatgtacacacacattaaagttttcaaatacataaatacacacatatgtacacattatacatataaatgtaaatatatagatatttgaaacagggtcttgctctgtcacccaggctggagtgcagtggtgcaaatatagttcactgcagcctcgacctcctggactcaagtaatctcctgcctcagcctcctgagtatctgggactacaggcatgtgccatatgcctagctaatttttaaattttttgtagagatggggtctccctatgttgcccagtctggattcaagtgatcctcccgcctcagcctcccaaagtgctgggattgcaggcgtgagccaccgtgctcagcctcgtgtatattttaaataccttagcgtttctgaattttccttttcagtataaacgctgtaaatctaaatactgtggagataagtatttctgaggaagcactggtatccatattggaacaccccatggatgggaaacacaccagattctgaagacttggtacatctcagttactttttttttttttttttttttgagaagtagtctcgctctgtcacccaggctggggtgcagtggcgtgatctcggctcactgcaagctccgcctcccgggttcaggccattcttctgcctcagcctcccgagcagctgggactacaggcgcccgccaccacacccagctaatatttttgtatttttagtagagacagggtttcaccgtgtttgccagggtggtctcgatctcctgacctcgtgatccgcccgcctcggcctcccaagtgctgggattacaggtgtcagccaccgcgcccggccacttttttttcgtttatgaggtggggtcttgctctgttgcccaggctggagtgcaatggtgccatcacagctcactgcagcctccaactccttggcttaagcaatcctcttgcctcagcctcccaagtagctgggaccacaggcacacaccaccgtgcccagctaatttttggtatttttcgtagagacaggatctcattatattgcccaggctggtcttgaacacctgggctgaaatgatcctcccgcctcagcctccaaaagtgctgagattacaggcatgagccaccgcgcctgaccttgtttggataacttgagatgtgtaaaatatattattaaaattaatttcacttgctcttttttagttgttttactgtggctaccagaacacttaaagttatgtttgttatttgcttatctttctcttggaaagctgtgttcttgacctgtgggccaaatccagctgcagcctatttttgtatggcttgtgagctaagaatggctcttacatttttaagtggttgaaaaaaaaacccaaaatatgaaaaccattctatcaaacgtggaaattacataacattcaaattccagtgtctgcagacaaagctttattggcacacagctgtgcccatccatttatgtatcatttacggctgcgttttctgtacaacagcagagtggagtagttactctacccaaaaaagctaaaaatactgactgttggcttttttacactttattttttagagacagggtctcacttagtcatccaacctggagcgcagg

SEQ ID NO: 8117 - DNA, 6000 bp, Homo sapiens
gaggaggggttctctgagtcctcacttccttgctgtgctttatgcgcccctagcccagtgccggctctacacctttgcatgggccgttccctcttcctggagcacgattcccccagatcttctcgtggttccctctctttcttctttcaagtctttgcttcttaagtgaggctttcttgagacctacttttatttttaagacggagtcttgctctgttgcccgggctggagtgcagtggcacgatcttggctccctgcaacctctgcctcctgggttcaagtgattttcctgccacagcctcctgagtagctgggattacaggcgtgcaccaccacccccggctcatttttgtatttttagtagagacagggtttcaccatgttggccaggctggtctcgaactcctgacctgaaatgatctgcccatctcagcctcccaaagtgctgggattacttacagatgtgagccaccacacccagccttgagatccacttttaaaaatcacaaccccaggctgggcacggtggctcacacctgtaatcccagcactttgggaggctgaggcgggtggatcacctgaggtcaggagttcaagaccagcctggccaatatggcgaaaccccatctctactaaaaatacaaaattacccaggcgtggtggtgtgtacctgtaatcccagctgctcgggaggctgaggcaggagaatcccttgaacccgggaggcagagcttgtagtgagccgagatggggctactgcacttcagcctgggcaacagagcaagattctgtctcaaaaaaaaaaaaaaaaaaaatcacaaccgcagctgggtgcagtggccttataatcctagcactttgggaggccgaggcaggaagctcacttgagcccaggagttcgaggctgcagtgagccgtgatctcaccattgcactccaggctgggcaacagagtaagaccccccccaactcaaaaaaatgttatattgaaggaaaagaattaaaaatacaaccccaccttgtgcctctgggctggcggatggcgctgggaccctgacacctgccccgtatccccgcagtgctgggccgcccaaccctgtcggtgcagcagacccccgagggcagcctgctggcacgctgggagcccccggctggcaccgcggaggaccaggtgctgggctaccgcctgcagtttggccgtgaggactcgacgcccctggccaccctggagttcccgccctccgaggaccgctacacggcatcaggcgtgcacaagggggccacgtatgtgttccggcttgcggcccggagccgcggcggcctgggcgaggaggcagccgaggtcctgagcatcccggaggacacgccccgtggccacccgcagattctggaggcggccggcaacgcctcggccgggaccgtccttctccgctggctgccacccgtgcccgccgagcgcaacggggccatcgtcaaatacacggtggccgtgcgggaggccggtgccctgggccctgcccgagagactgagctgccggcagcggctgagccgggcgcggagaacgcgctcacgctgcagggcctgaagcccgacacggcctatgacctccaagtgcgagcccacacgcgccggggccctggccccttcagcccccccgtccgctaccggacgttcctgcgggaccaaggtaggcgcgcggcgacccctgcaccagagccggaccgggccttgcgcccacccccaccccagccccctccctctcccctgcccaggtaagtgctcacttttctgcttcctcgtggtcactcaaggcaagtccggaccccgaggctccggcgttggcaaaggtgggacgtgcctcggtggcaccaccgccccccaccactgccccctccccttgctcccctcccccctcttcctcctcctccaccttctttctgcagcctctgcacccgtgccgtctcccgaagcagggacttgggacaggacagggcagggccgggccagggccaggcaggaaggccgtgggcatgggcacagcggacgacagggagcgcctgggccgccccaccccaccccgcttcacgccacccagtgccaggcactcatggggcctctcttctgctctctccctgctcggccgcctccccggcagtctcgcccaagaacttcaaggtgaaaatgatcatgaagacatcagttctgctcagctgggagttccctgacaactacaactcacccacaccctacaaggtgcgactgcccagccagcaggcaggcaggcaggcagggtcaggggttgtagttcagcagggcttaaggctcagtttggagttggtgtgaagtgagggatcagggctcagtcagagatgggtctcagctaggattgaggcttagtcaatactgggaatcagacttggggcccagcctaggattggagatcagctggaactgaggttcagtcaatattggggatcaatgttgggctcagccttggattgtggcttagctgggattgaggttcagtctgggattaagatttagtccatattggaaatcagagttggggctcagccttagatcatggcttagctgggactgaggcataatcaggattgggactcagagttggtacttagcctgaggtcagagtttagtctggagttggtgccaagtctgggatcgggggtcagcctgggattgaggttcagtctgagatcaggaatcagtctaggatcaggtctcagaggtgggtttccacctagggtcagcgctcagctggaattcaggatcagtctgggttcagggttcagtgggattggggctcagtcgggactgggaattcagcatgggatcagggctcagtcaaagtgggcttctacctaggatcaggactcagctggaatttaggcacagtctggggtcagggttcagtgaggttggggctcagtcagagttggggactcagcctgggatcagggatcagtcagtgttagatttctgcctagggcaggattcagtgggatcagggctcagtcagggtgggggactcatcctggagctggggctcagtccatgggcatgagcccaccaggccctgctgagctagccctggtccgcagatccagtacaatgggctcacactggatgtggatggccgtaccaccaagaagctcatcacgcacctcaagccccacaccttctacaactttgtgctgaccaatcgcggcagcagcctgggcggcctccagcagacggtcaccgcctggactgccttcaacctgctcaacggcaagcccagcgtcgcccccaagcctgatgctgacggcttcatcatggtgtatcttcctgacggccagagccccgtgcctgtccagtatgctcacccccatgctccgggttccttgtcacccccatcagcctactatatggctggggcaagccacgtgccctctctgtgcctcaatttccttgcctatgaaacacagaccctatcagccctagttcatggggtcatccaagattcaatgcttctcatgggtcattgtcactaaatgtgtcctgtgtctgctcttctagcatttcctgataccccatatgcctgaccctccactgggtattactagggcccctgaaaggatttggttctgggcttcccaactagtggggaggcaaagctgagagtccccagtggggagaggagcactctgcctcagaggcagagaagatttaagggctacaaggttatgtgggcattgaagctggagctttgaaggatgtataggagtttaacaatgagcattacatgaagtaagccttctacgcagaaagtacagcatcatccaaggcctggaggcctgagtcagcaactgtggcgtttgtggatggggcataggggaataggctcattgtatgaacagaagggaagactcagagaaacggcttcccccgtttgcccccatgaagcatcccttggtcatccctatcgacagcccctctgactctttcccatctccctacaggagctatttcattgtgatggtgccactgcgcaagtctcgtggaggccaattcctgaccccgctgggtagcccagaggacatggatctggaagaggtgagggcctggggcccaacccgcagggcccagatgcattccagttttcacgtgctctgttgctcccagctgagctctgagccacccatgactctgttcccgcagctcatccaggacatctcacggctacagaggcgcagcctgcggcactcgcgtcagctggaggtgccccggccctatattgcagctcgcttctctgtgctgccacccacgttccatcccggcgaccagaagcagtatggcggcttcgataaccggggcctggagcccggccaccgctatgtcctcttcgtgcttgccgtgcttcagaagagcgagcctgtaagtcctgaatggtgtccgcccacatccagacacacctctgaatgaggcagaccccattccccagggccctgacctctgtggtcagtcacaggcagctccctgtggtcagagctgggcagaggggaagacttgggagcggagggatcctgaaacgaaggtttcttagaggaagagaccttggagctggggcgttgaggggtgagtaggagttcaacaaagaaaaagcatcccaggatttgcatgtgcaaaggtctggaggtacagaaaggagagtggctggagcagagaagggaatggggagagcaaagattggcagggaccaggtcacataggccaccagggtcaaggttctaggaatataggaggatctagagcgggggagaaacgtaggttcatgtttgagaaagacccatctggccactacaaggagggtggacactgatggagacccccctcctttccctgcagacctttgcagccagtcccttctcagaccccttccagctggataacccggacccccagcccatcgtggatggcgaggaggggcttatctgggtgatcgggcctgtgctggccgtggtcttcataatctgcattgtcattgctatcctgctctacaagaagtaagccccatgtcctccccgacttgacttgacagcagggagggcttcctggaaaaggagggaggagttgtctcagagaatcatcactaaaggtctctgttgtacacatggggaaaccgaagttcagagaggttaagccacttgatcaaggtcacacagcatgggaatggcagagctagggctcaaagcaggccagtggcttggcttctcctcttaacccctatcttcaactcagcaagatttggggtagaggctgcctgtgtccagttcaatgaggatagcaattgtagtggccccatggggcacatcccagggctgagataagcctccttgtggtgtcgataggcagggggacaaacaggaaatatgagcaccattttccagaggagaccaaagctcacagaggttaaggaaggcactgagagtcacagaacaagcccttgatggccggcacaccctcacctttcttctttttttcccccttctcacctgtgtctgctttcgggaacagcaaacccgacaggtaagaaccagccctcccccgtggaggcttcaggcaagaggaagaggacagggaatgggctgatagtgtgcccacaggagaggggatgcccggctgcccccacagcttgtacacgtagctgtacttggtcctggaaaccctagtcatacgggtccatggtccttttcttaccatgcattcctggggcctgaattgtgttcacacatgaacatgtgccactactaactggactgttccgcttgcttctcctaaagtaaacgcaaggactcagaaccccgcaccaaatgcctcctgaacaatgccgacctcgcccctcaccaccccaaggaccctgtggaaatgagacgcattaacttccagactccaggtatgtacttatccctggtaccagggatgccaccaacaggggag

SEQ ID NO: 8118 - DNA, 6000 bp, Homo sapiens
tgccggttccgaccagctcctcctcaggtctccggacgcccggctccgcacgctcaccatttccggcttccgggtgtcctgggtccttcctggggctggagcagccagaacaggtcccacacgacaaaatcagccgtatccggggcaccaggggctccccgaggaactaaaacccggacccgaatggggggccggcgggaaatgagaccgcttcgggctttggaagttgcccctcctcccggcgcacctgattggacagtttgccgcacagcgcctctgactggctggtgccccaggtcccgcccctggggcttgagcgacaggagaggtgatcggaatcctcaaataatccgctcgctgtgtggggtgtgactgacaggtgctacccacagcccctcgctgggaccttggacctggacttgcatggaagcagaacttgctcccgttagggtcaacccaaccagactgttcccctccttcccccatcagtcttacaatacagtcctttgtgaccgccacacaactccccccgggctagaagtagacctcctccccactgacccttccagtaactgtttgttcaaaagacttcagctgaaccggcagacagttccaggatgcggtcacaacacctgcccaccttgcataacaaagctggcaaaaacatctccaggatgcggtcaggacacctgcacccccgactcagttctcacaccccagcccagttcctcgccctataaagccctgctgtagtctgtaagcggggctgcctcctctaactgtgggggagcagcccagcaggttaataaaacttacttgactgacttcaggtctcttcgtcctttcggctgaccttacagctcctggttttccggagcaggccctgtcggcttcctgtactcagtgggtccttcctgctgctttttttttttttttttgagacggagtttcgctcttgttgcccaggctggaatgcaatggcacgatctcagctaactgcaacctccgctttccggtttcaagcgattctcctgcctcagcctcccgggtagctgcgattacaggcgcccaccaccactcccggctaatttttgtatttttagtagaaatggggtttcaccatgttggccaggctggtctcgaactcctgatctcgtgatccgccggcctcggcctctcaaagtgctgggattacaggcgtgagccaccgcgcccagccgcctcctgcttctttttccggaacaccggtcacatgagtgtgcacggaattccagactccgtgttcagtgaagccatccctccaccttggagctggagagactcccaggtcacaatggaacaggtaggaggccctgatgtcctccagagatcaggaatttatgaggctattggtcccatggccaaggcttcctacacgttacttcttctcaggctactccttttcagccaagaaaataaaaacatgccttaaagggaacaaaattattaaatgcagggaaaaactggagtaaaccactttttttttctttttttttgagacggagtctggctctgtcgcccaggctggagtgcagtggcacgatctcagctcattgcaacctctgcctcccaggttcaagagattctcttgcctcagcctcccgagtccgagtagctggaactacaggcatgtgccaccatgcccggccaattttttttttttttttttttttttgtatttttagtagagacggggtttcaccgtgttagccaggatggtctcgatctcctgaactcgtgatctgcccgccttggcctcccaaagtgctgggattacaggcatgagccaccgtgcccggcctggagtaaacattctataaaggtattgctaccagaaaggggtccagtcccagactccaagagcagaagcttggaccttgtatgggaaagaattaatattggagaaaaaactgaaaaagtaagtatatcgaactgtatcatgggacagaaacatgtcattcctatttttactgaagattatcttatttgatactatgtgattattaagtcctattacatttcctttctccttttacgaagtcatgtatcttaataatatgcagccgggcacggtggctcagcctgtaatcccagcactctgggaggcccaggcaggcggatcatgaggtcaggagtaggagaccagcctgcccaacatggtgaaacaccgtctctactaaaattacaaaaattagccaggtgtggtggcgcatgcctgtaatcctagctactaagaaggctgaggcaggagaactgcttgaacccaggaggaggaggttgcagtgagccgagatcacagcattgcgcctgggcgacagagcatgactccatctcaaaaaaaaaaaaaaaaaaaaaaaaaaaaaaaaaaaaaaaaaaaccagagccgggcccggtggctcacgcctgtaatcccagcactttgggagtccgaggcgggtggattacgaggtcaggagttcaagactcagcctggccaagaaggtgaaaccccgtctctactaaaaatacaaaaaattagctgggtgcagtggcaggcgcctgtaatcccagctactcgggaggctgaggcaggagaatcgcttgaactccgagggcagaggttgcagtgagctgagatcacgccactgcactccagcctccagcctgacaacagagtgagactccgtctcaaaaaaaaaaaaaaaaaaaaaaaccagaatatgcagtgggtggccgcagcgggtcacacctgtagcactttgggaagtcgaggcaggcagatctcttgaggccaggacaggagttccagaccagcctggccaacatggtgaaaccctgtctctcctaaaaatacaaaaattagcaggcatggtggttcatgcctgtaattccagctactaaggaggctgaggcaggagaatcatttgaacccaagaggcagaggttgcagtgagcctagattgcaacactgcactccagcttgggcaagagtgagactccgtcccaagaaaacaaaacaagactaggactgggcaccgtggctcacacctgtaatcctagcactttgggagactgaggcggccagatcattagaggccatgagtttgagaccagactggccaacatggcgaaacccgtctctactaaaaacacaaaacattagactgggagcgctggctcacacctgtaatcctagcactttgggagaccaaagtgggcggatcacaaggtcaggagttcgagaccaacctggccaacatagtgaaaccccatctctactgaaaatacaaaaaattagccaggcatggtggcacgcgcctgtagtcccagctacccgggaggctgaggcaggagaaccgctggaacccaggaggcgtaggttgcagtgagctgagatcgcaccaccgcactccagcctgggcaacagagtgagactccgtctaaaaaaaaaagtacaaaaattagccggagcggtggcatgcgcctgtaatcccagttacttgggaggctgaaatgggagaatcgattgaactcggaaagtggagtttgcagtgagcggacatcgcgccactgcactccagcctgggcgacagagtgagacttcatctcgaaaaattaaaaaaagaatatgcaacaatataagctacaaaatttaaatatccaataaattttaagtttaaataaatttgctgtatcagaggacaaaaagaaacataaaatagttactgtttgtcacacatactgtttaatcctactaattggtactgttaagtagtcctattgtggttttgttcaaatagcatttatgcaacagtacagttaataatatagaactatataatttcttttttttttttttttcagacagagtctcgctctgtcgcccaggctggagtgcagtggcgcgatctcggctcactgcaagctccgcctcccaggttcaggccattctcctgcctcagcctcccgagtagctgggactacaggcgcctgcaaccacgcccggctaattttttgtatttttagtagagacggggtttcactgtgttagccaggacggtctcgatctcctgaactcgtgatccgcccgcctcggcctcccaaagtgctggaattacaggggtgagccaccgcgcccggcctagaagtatataatttcaagtaaacaccagtttttcattttttatgttaaagtggtaatttctttttttttttttttttttttttggagacagagtctcgctctgtcgcccaggctggagggcagtggcacaatctccgctcactgcaagctctgcctctccagttcgcgccattctgcctcaggctccggagtagctgggactacaggcgcccgccaccacgcccggagaattttttttttttttttgtatttttagtggagacggggtttcaccgcgttagccaggatggtctcgatctcctgacctcggcctcccaaagtgctgggattacaggcgtgagccaccgcgcccggcctaaagtggtttttgtaattcatttttcttttttttttttttgagacagtcttgctctgttggccaggctgaagtgcagtggagcaatcttggctcactgcaacctccgtctcccgggctcaagcaattctcctgcctcatcctcccgagtagctgggattacaggcatgtgccaccacgcccggctaatttttgtatttttagtagagacgtggtttcaccatgttgggtcttgaactcctgatctcaggtgatccacccgcctcgcctcccaaagtgttgggattacaggcgtgagccaccgcgcccggctagtatttgtaattcttatctatcacattaaggctcttgtccggtgtggttgtgttccggggcggtccccgaccccgcccctcacaagccccgccccccgcaccgggccccgcctcctgaactccgaagctcccgaccccgcctccgcagggtccaggcttcgcccctggtgacaggtggtgctggtgtagtcaaggaggagggctcgctttttttggttcaggttgtcatggtggcgcccaagcccgccttgccggccttgtcttttccggtctcagtccggcgtggcagcggaggcaggcaccgttaggtcttccagtccctctctgtcatggcgacgcccagcctcttcttccggccacagcctgtcatggcggcacccgaagtagtccctgccggggccagcctgttctgttgccctggctcttcctagtccaggctgccatggcggcgctcagggcttaccggaagtaaaacttcggaagtgaggcgttcctctgcccggaagtgagcgcggcgctaggaaagatggcggcagcggcggcggtgggcaacgcggtgccctgcggggcccggccttgcggggtccggcctgacgggcagcccaagcccgggccgcagccgcgcgcgctccttgccgccgggccggcgctcatagcgaacggtgacgagctggtggctgccgtgtggccgtaccggcggttggcgctgttgcggcgcctcacggtgctgccattcgccgggctgctttacccggcctggttgggtgccgcagccgctggctgctggggctggggcagcagttgggtgcagatccccgaagctgcgctgctcgtgcttgccaccatctgcctcgcgcacgcgctcactgtcctctcggggcattggtctgtgcacgcgcattgcgcgctcacctgcaccccggtaagtgtgtacacgcgagcccgacccccagcacggtcgagcctcgccgtgggtcccagctgcggccttcctgtcggtcaccatcgcgacctgggccactcatctgcctggcctggattcccaggggcaccctctacactttggcgcaggcttaatcatgaccccactgctgacttgctgtgcatgcctggtgcgggttatttcctttttctgaagtcctccctgttatggtcatttagattcagtg

SEQ ID NO: 8119 - DNA, 6000 bp, Homo sapiens
gcaaggtctgggaagatacctgggggttgtaaccggggtctcagtggcctttgtcctgccgctcgtcctcctcctccaatgtcggcgtcagagcaaacacaggacattgggtgagcagggaatgggggaacctgtgggcccaccgagggtgggatcagggcaccaaccaaaggggaaccaaacacacaagaaagtcagcttagaaaaacagctccagaaagtcccagctgaaaaatctagaaagaagagaataaatatgagtgtatgtgcaagtaatttattctttgagctttttattttattttatttgagacgtgatctggctctgtcacccaggctggagtgcagtggtgtgatctcggctcgctgcaacctccacctcccaagatcctcaatgatcctcctacctcagcctcctgagtagctgggactacaggcccctatcaccacgccaggctaattatttttttgcgggggagagatggggggtctcactatgttgccgaggctggtctcaaactcctgagttcaagcaatccacccgcctcagcctcccaaagtgctgggattataggcatgagccattcggcccaacgtcttcgggcctttttaagtgtatccagtatttaaaacaactatgcctgtaatcgcagtactttggaaggctgaggcaggtggatggcttgagcccaggagtttcagaggactctgggcaatgtggtgagaccccatctctacaaaaaaaattaaaaatgcaaataagccaggtttggtggtgtgcacccgtggtcccagctactcaagacgctgaggcaggaggatcacttgaccctatgaggtcaaggctgcagtgagctgggatcgcaccactgtgctccagcctgggcgacagagcgagaccttgtctcaaaaaaaaaatatatatatatatatatatatatatatatatatatatgggtgtgttttcaagtttcattttttcccctaaagtcgcatgtactgggtgggtggttctaaggttcccagggctgagactttgtccttcttcacctagcccagagagaggctgatttccaacaccctgcaggggccgtgggaccagagcccaagaacaggggtctgctgaggaggtaattctgcccaaagaccccagactcccacactccaccacaccacactctcgtgtcctcccccaggtccagcccagctgctgacatccaagaagaaaacctcagtgagtaagaggaagagggggtgcacctggggtgcagatggggaccctgcagtttcactagtaacaggaaggggctgggaagggtctggggctcaggggaacatggttcacttcatactgtggaacctcagggacatcacacccgctccctagatctcagcagtcccactgggagcaggacagggggaggtggtactgagaggtcccagggaaacttaccaggagacgaaccccttgctttgccccagcagaccctgctgcgaattttttttttttttttttttgagatggagtctcgctctgtcacccaggctggagtgcagtggcgcgatctcggctcactgcaagctccgcctcccgggttcatgccattctcctgcctcagcctcccgagcagctgggactacaggtgcccgccaccacgcccggctaattttttgtatttttagtagagacggttttcaccgtgttagccaggatggtctcgatctcctgacctcgtgatccgcccgcctcggcctcccaaagtgctgggattacaggcgtgagccaccatgtcccgcctgaaagtgagacttttaacagggtcttgcaaaattggatgtctgctaggtaggcatagccggggcagtcacagcaggtaatttatctcttggcactcaactatcccttccccagttcctcactggtcgagtactatgaggttacaatcttcccagacttcgcctgagtttcattatcccccttataaggttgtaccccgtccccttccccgcttaagttgcgatttcccaataacaaaatttttttcccttttatgggctgaccgcctcctcccccacaaccccccgccattctgttcacttattgtgatttgctaggagcatgagccgtgcggtttgttacatccgcagactggctgccaatacttggatatcatgacttgaaaatggaccctttaaaatgtgttctcacaaattccctcctcttttttatttacttcctttggtctcattttcatttgaacccttctggtgcttgaatcgctttagaagttgtttactttctttttttctttttctttttctttttttttttttttttttttgagacagagtcttgctgtgtggcccaggctggagtgcagtggtgccatctcagctcactgcaatgtccgcctcctgggttccagcgattctcctgcctcagcctcccgagtagctgggattacaggcgtgcaccaccatacccagctaattgtttttgtatttttaggagagatagggtttcaccatattggccacgctggtctcaaactcctgacctcaggtcatccgcccacctcggcctcccaaagtgctgggattacaggcatgagctaccacgcccggtcaaatttttcactttatggctacatagtaggtgtatatatttattaaattacttttcgatggtattaattcaatttactatttttcaccttcacgacgtctgtctaatgcatttcaacaactgtctgtgttttcctcacgtatcttggttgtcattcctgtgggacagctcctcccacgcacccggcctttcataaagggtttctcccacggctgtccaggcatcagcctgatgaaggggattgttgccgctgctcctgccccactcccccaaactcagtgtcagctcaagattgtgcccagcagggatgggaccaacgccagcctcacactcacctgtggggcagacgcccatgtctgaccaccgtggattgaatctgtttctcacacacaggggaggggctgagcgctgaccgtggcctccagtgagtgagcagagaccccccagcgcctgtccacacacacaggggagggggagccaccgcttccagcctcacccagagccctgacccctccctgcctgggaggacgtggggttcctcttctgtcccacatggaggtgggagcctcctcctccctaatgacgctcggtggtcccagacacctgtggccactcagcattgaactctgctcatggaaggggatgcgtctcaatgtgaggaactgtttttcctctttctctgcctgtggctgtgatgatctgcatatttcagacgtatcacaaggagaatttcatggtatttggagccgatgtgggctcttgagtgggggcgtcaatcatcctcctcgactgtgaagcccagcaccaggatcctctcccgtccccaccctcctgtctgaactggtctggaaattcaccatggctgagcctcccatgtcctgggcaccactgacccccacagccactgtgatgagtggggttcatgacagcaggctcagaggtgacattcatgtccaaagtcacataaaccctagatgataatcaggaattaaatacaaatcagctcaccttccccagaatcagattatagattacaatgaaacatatatatatatatttctctttatcccctctatttctcctttttagacaggatcttgctctgtcgcccaggctggaaggccaaggggtgatcatagctccctgaagcctccgcctcccgggcccaagtgatcctcccacctcagcctcctgagtagctgggaccacaggcatgagcctccatgcccagctcacttttttcttttctgtagaaacagggtcacagtctgtttcccaggactgtctgaagctcctggcctcaagccatcacccgccacagcctcctgaagtactgggattccaggcatgagccaccacggtagaccctgcatttctctgtgctcactgctacacgcagctcagcctggactacacagccaggtgtcaggtgcgtctctgctgatctgagtctgcctgcagcatggacctgggtcttccctgaagcatctccagggctggagagacgactgccatggtaaggaccccgtaacgctgaactgatggacgagctgaaggagggagggagaccccatggggaggctctgagagggaggaggagcccacggtcaccctcgcctgaaaggggctgactcaggaaggcaccaggtctatttgcggctgtgtccccgtcctcagtgagataaagataaatcaggcagacagtggcccgggggcagggagaccccatttctctctgaaatgcctgcagagagcctggtgcctgcccccacttcagccctggggaaatcagagccaggttcctggggtggcagttcctcttcctgtgggctgaggatgagacaaccccatgacaagaaggacccagcctccgagcggccacaccctgtgtgtctctctgtcctgccagcactgagggctcatccctctgcagagcgcggggtcaccggaaggagacgccatgacgcccgccctcacagccctgctctgccttggtgagatttcaagatggggagggggagatccgagtcttggaggaaccccaccccacacacaagccctggtccatcaggagacctcaaaagctcaggaggcacccgggcggggacctgctcaggcttcagggcaaatgcctcacagggaactctcttccagggctgagtctgggccccaggacccgcgtgcaggcaggtgagtctgtccccagctgtcccaggtccctactcctcactgggacagggggccacccatgggcagctgggggaggagacagtagttctgggtgactgatggggatgatggggaagtcctggggctgggagctgggatctgagcgtggggatgtcttgggatccagcctctgatttccatctagggcccttccccaaacccaccctctgggctgagccaggctctgtgatcagctgggggagccccgtgaccatctggtgtcaggggagcctggaggcccaggagtaccaactggataaagagggaagcccagagcccttggacagaaataacccactggaacccaagaacaaggccagattctccatcccatccatgacacagcaccatgcagggagataccgctgccactattacagctctgcaggctggtcagagcccagcgaccccctggagctggtgatgacaggtgagaggacactctggggtcccagccccaggctctgccctcaggaagggggtcggctctcaggggcgtctccctctcacagcccagccctggggatgatgtgggaggtgggagccccatttaacacggtgcctctttctctcctaggattctacaacaaacccaccctctcagccctgcccagccctgtggtggcctcaggggggaatatgaccctccgatgtggctcacagaagggatatcaccattttgttctgatgaaggaaggagaacaccagctcccccggaccctggactcacagcagctccacagtggggggttccaggccctgttccctgtgggccccgtgacccccagccacaggtggaggttcacatgctattactattatacaaacaccccccgggtgtggtcccaccccagtgaccccctggagattctgccctcaggtgagggagccacggccttgtctaacacactttcggggcagctgacaggttgtggggagtttggctggtgactgaatctggaaaggacccagagtgatgtgttgaaggacgggctgaaggcatgagggagaccccatggggaggctctgacatgggaggaggagcccttgaccacgttcacctggaaggggaggactcaggaaggcatcggtgtgtttgctgtgaggtcccagctctcagggagaggaggaaagatcaggcacag

SEQ ID NO: 8120 - DNA, 6000 bp, Homo sapiens
gttaggagttcgagaccagcctggctaacatggtgaaaccctgtctctactaaaaatacaagaattagctgggcatggtggcgggcacctataatcccagctacttgggagactgaggcaggagaatcgcttgaacctgggaggtagaggttgcagtaagctgagatcgttccactgcactccagcctgggcgacagagtgagattccctctcaaaaaaaaaaaaaaagtctagcttgggcaacatagcgagaccttgtctctacagaatgtatataaattaaaaaaaaaatgtgtggtggtgtgcacctgtagtctcaactacttgggaagctgaggcaggaggatcacttgagcccaggagttcgaggctgtagtgagctatgatcatgccactgtactccagcctggatgacggagtgagactctgttgcacaaaattaaaaaatgaaatgaaataaaaattaaaatgcatgtgccctttggtacggcattcaaacgactcaggaaaatttgtccaaataacacatggatgagggtgtttgcagagggcagatgggcccatggtgcacacagcaccaagcctcctccaaacactgcccctctgctccccaggggctgcacggatatcatatgctgtgtgttcctgctcctggccattgtgggctacgtggctgtaggcatcataggtgagtagagaatgagcaggacttggagttgcagggtaggcggaggcagccatggcctctggagtgggaacagggctggatctgaggagtggcagtgtctcagtatccctggatctttccacagcctggactcatggagaccctcgaaaggtgatctaccccactgacagccggggcgagttctgcgggcagaagggcacaaaaaacgagtgagttgactccttgcggcctggtggggctggggaagagggggcagaagattctaggcattccccatctctctaagtccagttaacaagtgcttataggctgggcgcggtgactcacgcccgaaattccaacactttgggaggccgaggcaggaatattgctttaggctaggagttcgagaccagcctggccaacatggcaaaaccccgtctccactaaaaatacacaaattagccaggcatggtggcacatgcctgtaatcccagctactcaggaggctgaggcaggagaatcacttgaaccacaggaggcagaagttgcaatgagccgagatcgtgccactgcactttagcctggggcacagagtgagactctgtctcaaaacaaacaagcaaaaattaagtggacgtggtggggcacacctctagtcccagctacccagcaggctgaggtgggaggatagcttgagctgggaggccaaggctgcagtaaggtatgattgtaccattgcactccagcctggacgacagagcgagacctggtctcaacaaaacaacaagaaaagaaaacaagtactgataaacgtcccactaccctcagccactagtctagtccttggggacacacagctctaaatgagatagtaagcatcctgttctctggcagcacacattttaagggcgggagagactgagaggggacagtcctggattacgcgtcaggtggtgatgaacaggtgagacaacagagcaagcatagcctgagtggcgtcacttcctggctctgtgacctagggcaggtgtctcaatctctctgaacctcgttttcctcatctctaaaatgaggatcataacagtcccaccctcatggggctattttgatggttagatgtgccaatacatgtacagagcttagaatgccacctggcatcgctgggcgtggtggctcacacctgtaatcccagcacactttgggaggctgaggtgggaggatcaagaccagcctagtcaacatggtgaaaccccgtctctactaaaaatacaaaaaaattagctgggcattgtggcatgttcctgtaatcccggttactcaggaggctgaggcaggagaattgcttgaacctgggaggcagaggttgcaatgagccgagatcgtgccactgcactccagcctaggcaacagagcaagactccatctcaaaaaaaaaaaaaagaatggcacctggcatagagttgctgatgctgcagtttttaaactattattattattattattactattattattttgaaacggaattttgctcttgttacccaggctagagtgcagtggcacaatctcagcccactgcaacctccgtctcccgggttcaagcggttctcctgcctcagcctcccgagttgctgggattacaggcatatgccaccatgcccagctaatttttgtatttttagtagagacggggtttcatcatattggtcaggctggtctcgaactcctgacctcaggttatctgcctgccttggcttcccaaactgctggtattacgggtgtgagccaccacacccggcctattattattattactattattattattttgacacagtgtctcactctgtcagccagtggcaggatcatagctcgctacagcctggaactcctgggcttaagcgatcttcccacctgggccttccaaagtgctggcacaagacaggcctgagccaccctgcctggccctatataagatatctttttttttttttgagacagagtctcgctctgtcgcccaggctggagtgcaatggtgcgatcttggctcactgcaacctccgccacccaggttcaagcaattctcctgcctcagcctcctaagtagctgggattacaggtgcccgccaccacacccagctaattttttgtatttttagtacagacggggtttcgccacgttggccaggctggtctcgaactcctgacctcaggtgatccgcctgccttggcctccaaaagtgctgggattacaggtgtgagttactgcacccggccatataaaatatcttaaaggaaacaataggccgggcacggtggctcacgcctgtaatcccagtacttagggaggcccagactggaggattgcttgacaccagcctgggcaacatggtgaaattctgtcgctaccaataatagaaaaaattagccaggtgtggttgcgcacacccgtagtctcagctgctcaggaggatgaggtggaggatcacttgatcctaggaggtagaggctgcagtgagccaagattgtgccactgctcgctctgtctgggcaacagagaaagactcttgtctcaaaaaagaaaaaaaaacaaaagaggccgggcgcagtggctcacgcatataatcccaacactttgggaggctgaggcgggtggatcacctgaggtcaggagttcgagaccagtgtggccaacatggcaaaaccccgtctccactaaaaatacaaaaattagctgggcatcgtggcgggcacctacctgtagtcccagctactcgggaggctgaggcaggagaattgcttgaacccaggaggcggaggttgtagtgagcccacatcacaccattgcactccagcctaggcaacagagcaggactccatctaaaaaaaaaaaaaagagaaaaataaaaaaagttttctatagggtggttaagaagtcttaacaggtcgggtgtggtggcttacacctgtaataccaacactttgggaggccaaggcaggcggatcacctgaggtcaggagtttgagaccagcctggccaacatggtggaaaccccatctctactaaaaatacaaaaattagccgggcttggtagcgggcacctgtaatcccagctactcgggaggctgaggcaggagaattgcttgaacccgggaggcggaggttgcagtgagccgagatcacaccattgcactccatcctgggcaacaagagcgagactctgtctcaaaaaaaaaaaaaaatcttaacagtttccattctcccttctctaactccaggaacaaaccctatctgttttatttcaacattgtgaaatgtgccagccccctggttctgctggaattccaatgtcccactccccaggtaacctggtccccaccgttccctttttcctctccccgcttcccatccttttccccctgtgaatgtgggctgcgacctcagtcctgagcagtctgccccaactccacccaatcccttccttctcccctcccagatctgcgtggaaaaatgccccgaccgctacctcacgtacctgaatgctcgcagctcccgggactttgagtactataagcagttctgtgttcctggcttcaagaacaataaagtgagttgtagactgtcctgagagcacaggtatgggcagtggcagtgtactagacttggggactcacctccctccatctctcttggcagggagtggctgaggtgcttcaagatggtgactgccctgctgtcctcatccccagcaaaccctgtgagtcaggggatcccaggaggctcaggtggtgacggggaggctctgcagaggctcagcctgactggtgccatcctctgctccatgcagtggcccggagatgcttccccgctatccacgcctacaagggtgtcctgatggtgggcaatgagacgacctatgaggatgggcatggctcccggaaaaacatcacagacctggtggagggcgccaagtgaggatattggcgcaccgcgccagggtctcactttgctgggtgggacaggcaatcccctgtggttggcctgatcatggaagagggtctgacccgagccttgtcctccttcccccaggaaagccaatggagtcctagaggcgcggcaactcgccatgcgcatatttgaagattacaccgtctcttggtactggattatcatgtaagtcaggagggaaggggcctctcccctggctgccccctctaagcctggctgagggtggagtctgttcatgaccgttttcttttccccagaggcctggtcattgccatggcgatgagcctcctgttcatcatcctgcttcgcttcctggctggtattatggtctgggtgatgatcatcatggtgattctggtgctgggctacggtgcgtcaccccctccctgtggcttctctttcctgaatccgcacactgccctgccctttcccgtggaaatggcccatcaggaaaacaaaaaaaagtcaggccgggcgtggtggctcacgcctgtaatcccagcactttgggaggccgaggcaggcagatcacccgaggtcaggagttcaagaccagcctgaccaacatggagaaaccccgtctctactaaaaatacaaaatcagccgggcatggaggtgcatgcctgtaatcccagctactcaggaggctgaggcaggagaatcgcttgaacctgggaggcggaggttgtggtgagccgaaatcacgccattgcactccagcctgggcaacaagagcgaaactccatctcaaaaaaaaaaaaaaaagaaaaaatgtctcagcaccgtagttaaggatgcatactctggtatcagaatagcagaggttcaaatcctggctttgccaattctttgggcaagtgcctcaacctaactgtgcttcaatttctttcttttttttttttgagacggagttctgttcttgtcacccaggctggagtgccatggcgcgatcttggctcactgcaacctccgcctcctgggtccaagctattctcctgcctcagcctcccaagtagctgggattacaggcatgcacctccatgcccggctgatttcgtatttttagtagagatggggtttctccatgttggtcaggctggtctcgacctcctggcctcaggagatctgcccgcttcagcctcccaaagtgctaggattacaggcaggagccaccgcgcccggactgcttcaatttatttctctataaaatgagggtaattcatatttctagttggcaaactaaatgacaaggaggtaatgagcagataaaatatgggtaggggcctgtttagttcaggcctgtggaatccagaggcacaa

SEQ ID NO: 8121 - DNA, 6000 bp, Homo sapiens
cataatgtgatcactttggaattcagagcagacctaaaccttagcataatattaaaagaagtactacttccagcaattgatcttagatctttaggccattgataagaatttccacttatggaaaaaatttaatgtttcccccaaatgtctttcacttttttaactatagtcagaaaataacatgagatctaaactcctgacaaatttttaagggcaaattatagtactacagattgagtatcccaaatcctaaaatccaaaatctgaaatgctccaaaatccaacattttttgaccactgacatgattctcaaaagaaatgctcactgaaggccgggcacggtggctcatgcctgtaatcccagcacttcgggaggccaaggcgggaagatcacaaagtcaagagatcaagaccatcctggccaacatggtgaaaccccgtctctactaaaaatacaaaaattagctgggcgtggtggcatgcacctacagtctcagctactttggaggctgaggcaggagaatcgcttgaacccgggaggtggaggttgcagtgagctgagatcgtgccactgcactccagcctggcaacagagcgagactccatctcaaaaaaaagaaaaagaaagaaaagaaaagaaaaaagaaaggctcactggagcactttggattccgtattttcagatttggggtgctaaactggtaagtatattgcaaatattcaaaactcaaaaacagtcagaaatccaaaacacttttagtcctaagccttacacataagacatactcaatctgtatgaactataggcaccaagctgaacagcagatccctagaacctcctcatcctgcataactgaaactgcagacccatgaacaactctccattcccccagttcccaggctttgacaaccaccattctactctctgattccacaagtgtgactactctagggacctcatataagtggaatcctacagtatctgccctgtgagtggcttatttcatttagcataatgtccaatgggagaaaataattgcaaaacttcttctcaaagttctgtctcataactgtcaaacacacatggtccttgagggccagatttccagcagttcatgctcccccttttccaccagtcagttctgcatttgcaaatgtccacatgtatttatggagagatccacagcatcctcgcctgccctctgcaaggggagaagggacattaaagaccaaagacaggccgggtgcagtggctcatgcttgtaatcccagcactttgggaggccaaggtgggcagaacacctgaggtcagaagttcaagaccagcctgaccaatatggtgaaaccccatctctactaaaaatacaaaatttagctgggtgtggtggtgggcgcctgtagtcccagctactcgggaggctgagacaggagaatcgcttgaacccgggaggcagaggttgccatgagccgagatcgtgcctggccaacacagcaagactccatctcaaaaaacaaacaaacaaacaaagaccaaagacaaagaacatacatatggttctgctgttaaatccgggcagctcctgcctgtcacctgaagttctagatcattccctggactccactctatctttaggggtctctggctcaagtcagtcatcatcaaacacctgggaaaaactgccccaccttgtgcctccactgcctaacgactgagctgacctccaggcttgcctctggtgtcccctgtgttatttctactgaaacatccagtcccaggccaggctgcacaatatgtacagggtttaaggacaatgggaagacccatcactatccatttctaggatgtccttgcaaagggaaaccacagaaaaaatatacctagggaaacaaagtaggactgaaggtggaagggacccagcacttgaatgttccaggtgaggaccctacagtgggccaagtagtcaactggtcagggagggaccaggagaggcaccaggagctgtgacctcccccccagtcctgtgtctgttcacagcccaatgctgctgcttaattcacacttgagaaagtctgtgcttcccccacaccgagcaggcagcctcgcagtctctgagatctcagatcatcgtgcatctgtcttgtgacacatgcacccaccgtgggtttttaagggctcaggtgggctgagaggtggaaggtgccaactctgattgaaagatgcctgtgaggaatcaaaggtgccacacagggcaatcttctctctgttatctgcacagcggagctgcccaagccctccatctccagcaacaactccaaacccgtggaggacaaggatgctgtggccttcacctgtgaacctgagactcaggacgcaacctacctgtggtgggtaaacaatcagagcctcccggtcagtcccaggctgcagctgtccaatggcaacaggaccctcactctattcaatgtcacaagaaatgacacagcaagctacaaatgtgaaacccagaacccagtgagtgccaggcgcagtgattcagtcatcctgaatgtcctctgtgagtatatctgctcctctctggcccaggctgccagcccaaatccacagggccagaggcaggatttctcagtccctctcaggttcaagtacacagaccctcaaccctggacatccagactgtctgtgactttctgccccagaaaaacctgggcagaccaagtcttgaccaagaataggaggggaggggctgcttctgtcctgggaggctcagggtccacaccctatgatgggagaaacaggtgaatatctcagactcaggctcagtagatacaagaggggtttggctgagactttaggattgtgattcagcttagagggacactgtggtccttccatagaccaggaacttccacttccctctgacaatatcacctgtggctttattttgtttgctccagatggcccggatgcccccaccatttcccctctaaacacatcttacagatcaggggaaaatctgaacctctcctgccacgcagcctctaacccacctgcacagtactcttggtttgtcaatgggactttccagcaatccacccaagagctctttatccccaacatcactgtgaataatagtggatcctatacgtgccaagcccataactcagacactggcctcaataggaccacagtcacgacgatcacagtctatggtaagtggatccacgaagcactgacatcatgttttgaggtggagtctgtctggttttcaaacaagagccaggaagacattttctatcccagcctgtgtccagtgggcacaagcaaatcccagattctcccactgaacctccccaatatgtctctacagactcttttcttcttgttctgatttctcatggcgggccccaggtccagcttggaatgtggggaggaggctccctcagccccacagccctgtgtagtggaggaagcttcacagagcgggaaggagcaagggttctcaaggtcaagttgcttctctctgtcaccaatgtgtccctttctgtcacctctttgtgttcttttgcctactccatgagctacaagcaacattcaaggctttgaaacaagctcatacttttttcccaaatgagagaaggaagccccttgggtgagggagacacagctcagactgctccctgctctgctctgggctcccctgggtgactggccttgcctgactccacctaggtgggaacgaggtgtgtggagaaggagcccgggtggtctgtcctgaattcggctaaatcaagctgccaatcaacaccaaagcttcccttcgtcccagtcaggctgcaggaaaatggaaagagagggagcctcagggcagactcctgagctgcgtcctggctctgatgtcaccagctatatgaggctgtgggcacagcacatgggacacagcacaggggacagcaagtgacccacacttggagaaatcaggagattcaccacaggggctctgcacggcagggaatggcagtgtcaaaaatcgtgtgtttatacagatggtaacagtacatatctaacacaaacttaccatcttaacttttctacacatgcagttcagtggtattaaatatattccccttgttctgcttccatcaccaccatctacccacaggactcttttcttcctcccaaaatgaaactctgttcccatcaaactcctgggcagagctgccccatctatggcccacagtctgatccctgacttgtcacctctagacatgctcctagtctcctgcactatttctgctcaaacatccatctccatcatcacctatctctaggatgtccttaaatagcaaagcctcagagcaaacacaacttggctgggtggtgtgggactgtgcagctggaagaaacgcagctccttcaaattccaggtgaggaccccaatgggccaggcagccagccagtcaggaaaggaccagaagtgctgggggctgtgacccccagccctgtgtctgtccacaacccaatgctactgcccaattcacacttgagaaagtctgtgcttctcccacacaaaacagccagcctcatggtctctgagccctcagatcattgtgcatctgtcttgtgacgcacacacacctgccatgagcttttaaggactcagttgggctgagaggtgggagatgccaactctgattgatagatgcccgtggaggaatcacaggtgccacacagggcaatcttctctctgttatctgcacagcagagccacccaaacccttcatcaccagcaacaactccaaccccgtggaggatgaggatgctgtagccttaacctgtgaacctgagattcagaacacaacctacctgtggtgggtaaataatcagagcctcccggtcagtcccaggctgcagctgtccaatgacaacaggaccctcactctactcagtgtcacaaggaatgatgtaggaccctatgagtgtggaatccagaacaaattaagtgttgaccacagcgacccagtcatcctgaatgtcctctgtgagtatcttctgttcctctgtggctcaggctgccagcccaaatccacatagccaaagtccaggcctctcagtccctctcaggcccaaggacagagacttttacccctggacatccaggctggccctacccccagcaaatccatgcaggcccagtcctgaccaagaataggaggggagggtctgctcctgtcctgtaacactcgggatccacagctagtgatgggagaaacagatgaatgtctcagactctggctaattggatacagtaggggtttggttaggacttcaggattgtgacttggctcagggggacactgttgccctttcacagaccaggagcttcccctttgctctgatgacattcacctgtggccctattctctttgctccagatggcccagacgaccccaccatttccccctcatacacctattaccgtccaggggtgaacctcagcctctcctgccatgcagcctctaacccacctgcacagtattcttggctgattgatgggaacatccagcaacacacacaagagctctttatctccaacatcactgagaagaacagcggactctatacctgccaggccaataactcagccagtggccacagcaggactacagtcaagacaatcacagtctctggtaagtggatccctggaccgttagcaatatgttctggagcggaatctgtctggttttcagaaaagagccaggaagaaattttctttcctagtatgcatccaatgggcacaagcaatcccaaattcaatcctgagcactcccaatttgtctctacaaacactcttccccttgtttttctgatttctcatggctgaccttgtgtccaccctgagaaatgtggggaggggtcttcatcagccctgagccctatgtagtggaaggggcttcacagagggggaagcaagaagggtcctcaaggtcaagttgctcctc

SEQ ID NO: 8122 - DNA, 6000 bp, Homo sapiens
gcattcctgagctctgatctcgggcgatggctggaggccctaagggcggggtggacccctcccctcccctcccctcggcgcgcccccctcccctgcgcgcccccctccgcggctagcccaccttccgcgggggacagaatgagtgacgccctcgctcgtcctcctcccctgcttgggacggggcagtagcccgccttctagagcacgggacgctgggccagtcccgatttccttctccttcgagggtcctggaggggcgtgggggcaggcagtgtctggctccgggtggagcctcccaggtgctcccgcaagccccgaatggcgattagggaggccgtgggaggcgtagctgggcctcgggcctgacgccagcaccgcgtgcagtttccggcctggagcctgagcccctcagaggcccgggtccctgcccactccggtcttagagatgctcttgggggggctctcagcccatgtttatagggatccagaaatgcaggcctccaaccctgagagtcggggtccccaccccccggaaatccgggagagggcgggcagccccggaggcgggcgggggtccgggcaccgcctcctggtccctgacacattccagatgcctgggccgactcgaagcccttataaggcgcggagacaccggctctggctgggccgcccgcctccacagccgccgcccagggttctcccgccactgccgcccgcacccccgcccccgcggggttaagatcacacacgcgcccacgccggcccgcggggcgtgcactttcgctgggttccgtccgccgcagcccaaacagttaactgaacggggaggggagggggcggggcttacccggggtcaccgccagggccctgctgggttccacgccacgttcctgtctccgcagggcgttcgatccctagagggaggagcctgtccaaacggacgctaacggcctacctccccctcaggtgctcttacagcctgttccaagtgtggcttaatccgtctccaccaccagatctttctccgtggattcctctgctaagaccgctggtgagtaggcagcgggcctggactccggggtccgagggaggaggggctgggggcctggactccggggtccgagggaggaggggctgggggcctgggctcctcggtccgagggaggaggggctgggggcctgggggcctgggctcctgggtccgagggaggaggggctgggggcctgggctcctgggtccgagggaggaggggctgggggtctggactccggggtccgagggaggaggggctggggtctggactcctgggtccgaggaaggaggggctggggtctggactcctgggtccgaggaaggaggggctgggggcctgggctcctgggtccgagggaggaggggctggggtctggactcctgggtccgagggaggaggggctggggtctggactcctgggtccgagggaggaggggctgggggcctggactccggggtccgagggaggaggggctgggggcctggactccggggtccgagggaggaggggctggggtctggactcctgggtccgagggaggaggggctgggggcctgggctcctgggtctgagggaggaggggctgggggcctgggctcctgggtctgagggaggaggggctggggtctggactcgtgggtctgaaggaggaaggattaggtcctgggctcctagatcctgggagaaggaccaggaagcttgggctccaaggaatagggtcccagacactgaggtatctgaggaagaagcgagtccaggccctggctcctttgtctcagggagctgctgtcctgcgactgccacgaagaggttaaggcctgtgctactgccctgcaaagtgcctgaagctgaaaggaggaagttactttcctgtggctaggagaggccttgggtttagtcctgtggctgcgttgagacagtttacagcctaaggaaagaactgggcacctggtttctaagaggacgggcacttgattcctgggggccattaggacaaggaggtggaagctgtaggttttgcaaggactaaagaagcaaattggttttctggagtctggggcatctgggatccttcaggctaagggtccagggccagaggtctgaccccttataacaggacggtgatggccaggcgcagtggctcatgcctgtaatcccagcactttgggaggccaaggcgggcggatcacttgaggtcaggagtttgagaccagcctggccaacatggcgaaaccccatctctactgaaaatacaaaaattagccgagcatggtggcacacacctgtaatcccagctactcaggaggctgaggcaggagaatcgcttgaatccgggaggcggaggttgccgtgagtcaagatcgcaccattgcactgcagcctgggtgacagagcgactccatgtaaaaaaaacaacaaccaaaaaacaggattgtgaggcctagagagagttcagtggaagggcctggggttcctactggacagttggaaatctggggagctgagtttcccagaagctgggggaccagctggctgggttttggggagagaaggtggaggtagatggactcagtatgcaggagtgtggagggggaggctcaaactagcttttttgggttgcagtactccagtcctaaatctcaggtgggagttagactgagagtgaaggttgctaatctccaaggtggggggtagggagaggaggaggccgctaagagtttaggctccttgtcagaagggaggggagatctcttggttttccacggctgggatctctatgagaagatatcctttatcgggaggtcggagctcttattagatgtgggtccctgagagtggaagcctggggaggttgggccgtttagaggctgcaaatgtctaggtcactgttcgatggaagaaggaagtttgctcacagggtctggggtgcagagctctgaatactgaaagaaaaggaagttgagagatggggttttcagagcctgtggaagacaagcgttttgttctgacacttgggttgtggcaggaggcagaaggaggatgctttattttttatttattttatttatttttattattttattttattttttgagatggagtttcactcatgtcacccgggctggagtgcagtggcgcaatctcggctcactgcaacctccacctctagggttcaagcgattctcctgcctcagcctcccaagtagctgcgattacaagcgcccaccaccacacccagctgatttttgtatttttagtagagacggggtttcaccatgttggtcaggctggtcttgaacttctgacctcaagtgatctgccagcctcggcttccgaaagtgctgggattacaggcatgagccactgcgcccagattattttattttttttgaggcggagtgtggctctgtggctcaggctggagtgcaggggttctatcttggctcactgcaacctctgcctcctgggttcaagtgattctcctgcctcagtctcccgagtagctgggattgcaggtgcatgccaccacgcccagataatttttgtattattagtagagaccgagtgtcgccacgttggccaggctggtctccaactcctgacctcaagtgatccacccaccttggcctccgaagtgctgggattacaagtgtgagccaccacacccggcctatttgtaattaaaaaaaattttttttttttgagtcagggtctcactctgtctcccaggctggagtgcactggtgcatcacagctcactgcagccctgaccccacaggctcaagcaatcctcccacctcagcatcccgagtagctgggaccacacgcacacaccaccacacccagctaattaaaaaatttttttttggtaaatgaggtctccctaaggttgcccaggctggtctccaactcctgggctcaagcaatcctcctgcctcagcctcttggagtgctgggattacaggcatcagccacacctgtgcctggccagaggggtggtgctatagagtacagagtgctaaatggctgagctactgagtcccttggggagggagggaaagagggaagcacggtatctggagtgggaagcaaacagtgtagttgtacagtagttaggtcttgaaagagagaagaatctcttgagaaggaggaaaataggggcctagactcctggattctgatacgagtaggggaggagtgagccttgaaccggaggggacaggctcatccctgtatgcccaggactgtccccatttgaaaacccaaggctgggcccggtggctcacgcctataatcccagcactttgggaggccaaggccagcggatcatgaggtcaggagatcgagaccatcctggctaacacagtgaaaccccgtctctactaaaaatacaaaaaaattagccgggcgtggtggcacatgcctgtaatctcagctactcgggaggctgaggcaggagaatcacttgaacctgagtagcagaggttgtagtgagctgagattgtgccaatgcactccagcctgggccacagagcaagactctgtctcaaaaaaaaaaaaagaaaagaaaaccgaaagccccacatcttgggaactccctaattagagctcatattaatttgtccctggggtaggcaatggctaagggacctggattcttatgtttgtgactgtataaggacactgtctttcccctttttgcagccatgccagtgacggtaacccgcaccaccatcacaaccaccacgacgtcatcttcgggcctggggtcccccatgatcgtggggtcccctcgggccctgacacagcccctgggtctccttcgcctgctgcagctggtgtctacctgcgtggccttctcgctggtggctagcgtgggcgcctggacggggtccatgggcaactggtccatgttcacctggtgcttctgcttctccgtgaccctgatcatcctcatcgtggagctgtgcgggctccaggcccgcttccccctgtcttggcgcaacttccccatcaccttcgcctgctatgcggccctcttctgcctctcggcctccatcatctaccccaccacctatgtccagttcctgtcccacggccgttcgcgggaccacgccatcgccgccaccttcttctcctgcatcgcgtgtgtggcttacgccaccgaagtggcctggacccgggcccggcccggcgagatcactggctatatggccaccgtacccgggctgctgaaggtgctggagaccttcgttgcctgcatcatcttcgcgttcatcagcgaccccaacctgtaccagcaccagccggccctggagtggtgcgtggcggtgtacgccatctgcttcatcctagcggccatcgccatcctgctgaacctgggggagtgcaccaacgtgctacccatccccttccccagcttcctgtcggggctggccttgctgtctgtcctcctctatgccaccgcccttgttctctggcccctctaccagttcgatgagaagtatggcggccagcctcggcgctcgagagatgtaagctgcagccgcagccatgcctactacgtgtgtgcctgggaccgccgactggctgtggccatcctgacggccatcaacctactggcgtatgtggctgacctggtgcactctgcccacctggtttttgtcaaggtctaagactctcccaagaggctcccgttccctctccaacctctttgttcttcttgcccgagttttctttatggagtacttctttcctccgcctttcctctgttttcctcttcctgtctcccctccctcccacctttttctttccttcccaattccttgcactctaaccagttcttggatgcatcttcttccttccctttcctcttgctgtttccttcctgtgttgttttgttgcccacatcctgttttcacccctgagctgtttctctttttcttttctttttttttttttttt

SEQ ID NO: 8123 - DNA, 6000 bp, Homo sapiens
atggttactatgagagctataattgagaaagcaggggaaagctaggtctcccgccatttgggtgcttgtcctaaagagacgttgtatgtggttacctgccaatcaagaaatgcgagacaattcataaagaggaactgctatgattagcttcttattggtgtctcctcttcttccaggtaaccccagacacctacatgttctgattgggacctcagtggtcaaaatccctttcaccatcctcctcttctttctccttcatcgctggtgctccgacaaaaaaagtaagtctcacgaagcagaggccagagagctcagggccatgtggggaagcaggatgggagcacgcggatgtgtgttcctcaccagcaggatggtccctggcccaagacaggagccacagaggcaggactttctagagagagcaccagattcccttcccctgccttcagctcacagaccattgcctgattctgaactgtatcctcacgtcccctgcagccactcacatccaggagaaggttccatgacaggcagaaagtgggagatagaatcaatgggatgggacctcagagctattcatgggatgggtccttgaactcagagagatagaatgtctgagtctgctgttggcaactgagggacctcaggcacctatggcctccccctgtttgttggtatctgcttatgaaatgaggacccagaagtgccctccgagctcttttgttgacttccgtcttctacagatgctgctgtaatggaccaagagcctgcagggaacagaacagtgaacagcgaggtaggtgctcctccgcccagcctcgtggctagtcttattcccaaagagtcctgaaaaatgtgagcaccctccctcactcagcatttccctctctccaggattctgatgaacaagaccatcaggaggtgtcatacgcataattggatcactgtgttttcacacagagaaaaatcactcgcccttctgagaggcccaagacacccccaacagataccagcatgtacatagaacttccaaatgctgagcccagatccaaagttgtcttctgtccacgagcaccacagtcaggccttgaggggatcttctagggagacaacagccctgtctcaaaaccgggttgccagctcccatgtaccagcagctggaatctgaaggcatcagtcttcatcttagggcatcgctcttcctcacaccacgaatctgaacatgcctctctcttgcttacaaatgtctaaggtccccactgcctgctggagagaaaacacactcctttgcttagcccacaattctccatttcacttgacccctgcccacctctccaacctaactggcttacttcctagtctacctgaggctgcaatcacactgaggaactcacaattccaaacatacaagaggctgcctcttaacacagcacttagacacgtgctgttccacctcccttcagactatctttcagccttctgccagcagtaaaacttataaattttttaaataatttcaatgtagttttcccgccttcaaataaacatgtctgccctcatggtttcggtaacgagactcttttcttgcctaaggcttccggtgttatcattaccatgtccacataaccccatctgttctccattgggttctcagccctggactctgagcttctggaagcagaatggagcctgatttgtctctgagactccaatttccatccaaagatacagcacataggaggctccaaggatcgtgaatcacatgaacaagtgatattcttactctctgcagacctggaaagctggcagagtcattccacgatgaaacatttgtagagtcataggccttgttagtctcatctccacggggacacatatcaacatatcatctttcataatataaatatacagtcggtcctccatatctgtggggtttacaggtgtttattgaaccaacaataaatcaaaaatattttcagaaaaaaatccccgaagtttcaagaagcaaaaaactatgttgaatcgacacaaattgagtggcgtgtaggctgtgtcaggaattataagtaatcaagggatgatttcatgtatacaggaggatgtgcatgggttctatgcaattgctatgctattttttttttttttttgagacagtctcactctctcacccaggctggagtgcagtggcatgatctcagctcactgcaacctccgcctcccaggttcaagcgattgtcttccctcagcctccccagtagcctcccctaggattacaggcacgtgccaccatgcacagataaatttttttgtgtgtgtatttttagtagagacggggtttcagaatgttggaccagctggtcttgaactcctgacctcgtgatctacccaactcagcctcccaaagtgctgggattacaggcgtgagccacggtgcccagcttcgctatgccatttcatgcaaggggcttgagcatctgcagattttggtatctgaatggggatcctggaaccaatcacccaggaatagtgaaggaccacagtatataatttttatttgtcaatcttaaaaataaagcataaaaagtttacaacaacaagataaaaaataagaagtgtctttatagtgtgaggataagtttagatttattttttcctacgtgtaaccctatggtcctgtgttatttgttgagaaaatattctattccaccttaaactacatggcagcctttgtcaactataaagggactgtgtatccacagatgtattttagacacagttttctgcccagtggttctctgtatcccctctcatgaggatgctgcatttcatataaacttatagaaccccttaaaatttggtaacctgagttctctgatttgttattataggttatttagtttgcttttttttttctttcttgagacagactcttcctctgtcacccaagctggagttcagtggcttgagctcagctcactgcagcctccgcctcccaggttcaagcaattctcgtgcctcaggtttagtactagaaactcatcaggaaaattagaatggctttttgtcacaattactctgataatgttaataatacctcttagatattttgcacattacacatgaagaaaagtttgaatctcagataaaaacaaaaatacatcaaaagtctttaatgtaagcacagaattcaatcacctcatgtgtgagaggttggatctgagacgtcttttgagtctggtcatagtgaaggatgcaaggtggcaattgtagtcacaacaatttccaggaagccatgttccgctcttgagcgagcacccactgggcctcatgcaaggtagaaagagcctgcgtacgtcaccctcccatgatgtggtcaacatgtaaactgcatgggcagggcgccaaataacatcctgtgcgctgctgagctgagctggggcgcggcctcctgtctgcaccggcagcaccatgtcgctcacggtcgtcagcatggcgtgcgttggtgagtcctggaagggaatagagggagggagagtggggatggagatctcggcctagaggtaaagatatgggcctggagtggagatatgggcctggagtggagatatgggcctgggtgtggagatatgggcctggaggtgtaaatatgggcctggagtggagatatgggcctggaggggagatatgggcctgggtgtggagatatgggcctggagtggagatacgggcctggagtggagatatgggcctggagtggagatatgggcctgcaggtggagatctgggcctggagtggagatatgggcctggagtggagatatgggtctgatgtggagatatgggcctggagtggagatatgggcctggagtggagatatgggcctagaggggagatctgggcctggagtggagatatgggtctgatgtggagatatgggcctggagtggagatatgggcctggagtggagataggggcctggagtggagatatgggcctggagtggagatctgggccaggaagtgttgatctgggcctggagcctgggtctctccacagctgagagccctgttcttggcagcaggtagcagggaggctaagtttaccttcagcccagcaagggcctggctgccaagacacacagtgcagtgggggcagcagggtgccctggtttgcctgcagttggatcgtctatcatgatctttctttccagggttcttcttgctgcagggggcctggccactcatgggtgagtccgtccccaaaccttagggtgtcatctccccacataagaggatttttctgaaacaggagggaagtcctgtcggggagtctctcataaactaggaagaggggacccttggatactcggcccacatttctgacctcgccctccctggcctttctttccctttcctgagtcaagctctgtgaagactggggtgagactggggtgctccaagctggggtgtgcagggaggaagtggtgtcagcagcagagaaagagagggaagcagtgctaggaacagcaggtcctctgaggacaaaggtataactgacaccctccagcgtttccgtgacggtaggggctgcagtgtggctgcggtctttctaccagaagaggggggaaaccacagccatggccctgacattccaaatcctctgagggggctcagttcatgaattggctgatattccattcacataggacatgccctccatgccgtgtctactttgtgttgttttatgtgagtaattttgcagtattaaaatctagtaagagtcacttattcagcacttgctcaaagttctcagctgacacttgttgtagggagacgccatgtctatgtggggtgggtccttcctgtagccctgggcacccaggtgtggtaggagccttagaaagcggaaatgggagaatcttctgagcacagggagggaggggtggctccacatcctcctctctaaggcagtgcctccttctcccccaggtggtcaggacaaacccttcctgtctgcccggcccagcactgtggtgcctcgaggaggacacgtggctcttcagtgtcactatcgtcgtgggtttaacaatttcatgctgtacaaagaagacagaagccacgttcccatcttccacggcagaatattccaggagagcttcatcatgggccctgtgaccccagcacatgcagggacctacagatgtcggggttcacgcccacactccctcactgggtggtcggcacccagcaaccccctggtgatcatggtcacaggtcagaggctttctgtctgggcttctcactgtcccacctcctgaatcccagagcttctggtgggggtgtccatcagggtcccatcacccaggccccaactgtatttggggtcaagggggattgaatacaggggaaatgggcgctgtggtgggaagaataactgtcgccaatgatggctacattgtaaaccctggagcctgtgactatttatgttatagggcaggggactgaaggggaaggtggagctcaggttgttgatgagttgaccttgagatggggagacagcctggactgtcctgctgggctcagtgtaatcacaagggtccgcgtgagaggtggaggaagaggggagtggggattagagcagtgtagtgggagggagacgctatcagccactgtgggctttgaaggtggaggaaggccactagtcacagaatgcaggtggcctctaagggctggagaagtcaagagaactgatttgctgagtctccagagggaacgcagccctgcagatgccttgatttcagcacagggagaactggatccaatttctgtccccagaagtggaaggggtcagtgtgttctctcctgctgccatgtttgtgataattttctgcagcagcaacaggaaaccgacacaggaacccaggtcaaggacaagctaggaaaccaaacaaggatagccaggtgtggtggtgggcacgagtaatccaacgactggggag

SEQ ID NO: 8124 - DNA, 6000 bp, Homo sapiens
ggctccggagtagctgggactacaggcgcccgccaccacgcccggagaattttttttttttttttgtatttttagtggagacggggtttcaccgcgttagccaggatggtctcgatctcctgacctcggcctcccaaagtgctgggattacaggcgtgagccaccgcgcccggcctaaagtggtttttgtaattcatttttcttttttttttttttgagacagtcttgctctgttggccaggctgaagtgcagtggagcaatcttggctcactgcaacctccgtctcccgggctcaagcaattctcctgcctcatcctcccgagtagctgggattacaggcatgtgccaccacgcccggctaatttttgtatttttagtagagacgtggtttcaccatgttgggtcttgaactcctgatctcaggtgatccacccgcctcgcctcccaaagtgttgggattacaggcgtgagccaccgcgcccggctagtatttgtaattcttatctatcacattaaggctcttgtccggtgtggttgtgttccggggcggtccccgaccccgcccctcacaagccccgccccccgcaccgggccccgcctcctgaactccgaagctcccgaccccgcctccgcagggtccaggcttcgcccctggtgacaggtggtgctggtgtagtcaaggaggagggctcgctttttttggttcaggttgtcatggtggcgcccaagcccgccttgccggccttgtcttttccggtctcagtccggcgtggcagcggaggcaggcaccgttaggtcttccagtccctctctgtcatggcgacgcccagcctcttcttccggccacagcctgtcatggcggcacccgaagtagtccctgccggggccagcctgttctgttgccctggctcttcctagtccaggctgccatggcggcgctcagggcttaccggaagtaaaacttcggaagtgaggcgttcctctgcccggaagtgagcgcggcgctaggaaagatggcggcagcggcggcggtgggcaacgcggtgccctgcggggcccggccttgcggggtccggcctgacgggcagcccaagcccgggccgcagccgcgcgcgctccttgccgccgggccggcgctcatagcgaacggtgacgagctggtggctgccgtgtggccgtaccggcggttggcgctgttgcggcgcctcacggtgctgccattcgccgggctgctttacccggcctggttgggtgccgcagccgctggctgctggggctggggcagcagttgggtgcagatccccgaagctgcgctgctcgtgcttgccaccatctgcctcgcgcacgcgctcactgtcctctcggggcattggtctgtgcacgcgcattgcgcgctcacctgcaccccggtaagtgtgtacacgcgagcccgacccccagcacggtcgagcctcgccgtgggtcccagctgcggccttcctgtcggtcaccatcgcgacctgggccactcatctgcctggcctggattcccaggggcaccctctacactttggcgcaggcttaatcatgaccccactgctgacttgctgtgcatgcctggtgcgggttatttcctttttctgaagtcctccctgttatggtcatttagattcagtgatgtaatacttgtaaaaggcttagcgcagggcccagcatacgtcgcccaggtcaggtaggagttgtttatactagttcccatattagcgactactcttgttctggaaacggccctaccttccatctcatctgtctcctaccttggttttcaaagtgtaaggcgagatcactgggataggtttcccccatctatgaagcttagttggttcttagactgaaccaagtcttgctgtccagtgcttagtggtcttccatactgtgatggaaaggagcatgaaatgcagttaattacagtgttgaagagaggcagaggtgtttatgagcgagtcatttacatgatgtctttccgcaaaatgagggtggtgatactgagttctgtcggggatacaacagcaagcaaggtcgcgctcctgacccacagtttagagttctgagtgaccaagtgtcgtcggaggagttggtgactgtgagcttccctgggcctgaagcagtgactgtgtcgtctctctctgggcctgcctcaggtgacaccagcaggtttggagccatggacactgaggtatatcaggaagcttcccctctgattccaggagtgtgtttgcctcaagaagaggaaaagggaacagcatcaagggctacagaaagacagaagccccccaccctggctggctctgaatgtgggtagaatcctcattctcctctcctgagagacaacctgttctgtccttcaaaaagacttatctatcccaggggaggagctcaacgtggtagctttgaggtagtacaatgaaagacaccaatgagggacaaaataaaggaggggttaaggggactgtggcaccgctcaaacttcagctgccttttgacctgcagctaagcagcttagctcttaacttcctctccagggatggagaagtgggaggagctgaacagccatcagccaggagaggtggatctgggtttgattcagatctcagaaagggccgcttctgctctctgagtttcagtttcccccttctgtaaactgagaaccgtaactaacaactactgggtgccatcttgagaagcggagatgatatctgcagagtgcccgccctggggccatcacagcgtatagcctcttgtacctttcttccgtgacgtcacgtttgtagttatgtgattgttgttatttgctgcctgctttggaggcccatgaaccacccgtgcggtggcgctttgtttctgcgggtcatcattgtgctccccccatctccatgcagctcgtctccatgcagctcggtctagcagagcagcagaggaatggatggcggttcacggggtccagggagcactgaacgagttccattcaacatttctgtgtcttaggtgctggggaaacagcagtgaacaaaacaggcaaatccccctgcctttgtggtgttactgggagggagaactcatagtcagcagttgatgccaaacagagatgacatctaacatcaggacaggatgggacattgccgggaactttagatggggcagccagggaggggctcctgagaaggtgatgtttcagcaaaagcctgaggcagcaagggagctgtgtgactgtgtattccgggcagagaaaacagcacatgccaaggccctttgctgaggcacgatcgagccccatgtgcgtgtggagctgtggagtgtagtgagcagggttggtggaagaggcagagctgagcaggaggccgggggcctgtgatggggcgggggcttggctcacgtgaattgaggacgtactgggtgggtgcctggcagcgttcttcctatttgagttcatgtcaccttcagcagagcagagccctgggcattaggtgctgtctgtgcacccagcttcccagctttttttgttgttgtttttgtttttgttttgttttttggggtttttttgtttgtttgtttgtttgtttttgagatggagtctggctctgttgcccaggctggagtgcagtggcacaatctcggctcactgcaacctccgcctcccaggttcaagtgattgttctgcctcagcctcccgagtagctgagactacaggtgcctgccactatgcccagctaatttttatatttttagtagagacggggtttcaccatattggccaggctggtctcaaactcctgacctcgtgatcccccctgcctcagcctcccaaagtgctgggattacaggtgtgagccactgcacccagcctttttattttgagacagagtcctgctctgtcgcccaggctggagtgcagtggtgcaatctcggctcactgcaagctctgcctcctgggtgcacgccattctcctgcctcagcctcccaagtagctgggactacagatgcctgccaccacgcccagctaattttttgtgtttttagtagagatggggtttcaccgtgttagccaggatggtctcaatctcctgacgtcgtgatctgcccacctcggcctcccaaagtgctgggattacaggtgcgagccactgtgcctggctggttttttgtttttttttttttaattgagataggatctcactctgccacccaggctggagtgcagtgttgcaatctcagttcactgcaacctccgcctcccagttcaagggattctcctgcctcagcctcctaagtagctggtattacaggtgtgcaccaccgtgtccggctcatttgtgtatttttagttgagacagggtttcgccacattggcgaggctgatctcaaactcctgatctcaagtgatccgcccaccttggcctcccaaagtgctgggattatgggtgtgagtcaccgtgcccagccttgtgctcccagctttaagtgtggcaccagaggcacagcaagatggtctcgtttgtcctgatgacagacgagggagtgacagaggcagcaccagagcccagtggcatttcagaatatacccatagagctgctgcacccaaaacctcccgggggggtcttggaactgtaggttgagaagagctaagccacaatgctttctttgtctctgtcaggagtacgaccccagcaaagcgacctttgtgaaggtggtgccaacccccaacaatggctccacggagctcgtggccctgcaccgcaatgaggtagggactgcctgctgggctcctggaggaggggcttgagtaggattcccaggcgctgacaccccaaggtcaggggcctctgtggcaaacacaccttctaccgcagggcgaagacgggcttgaggtgctgtccttcgaattccagaagatcaagtattcctacgatgccctggagaagaagcagtttctccccgtggcctttcctgtgggaaacgccttctcatactatcagagcaacagaggcttccaggaagactcagagatccgagcagctgagaagaaatttgggagcaacaagtgagtccttgatttgcctgtagcacctttgcctttctgtcctgctcccctcctgattcagggtgcctaggaagcgggacagaggcatctgcccttttatttatttatttactattattttatttttattttattttttatttttgagactgagtctcgctctgtcacccaggctggagtgcagtgacgcgatctcagctcaccccaacctccgcctccccggttcaagtgattctcctgcctcaacctgccaagcagctgggaatacaggctccccccaccacgcctggctaatttttgtatttttagtagagatgggggtttcaccatgttggccaggctggtcttgaactcctgacctcaggtgatcctcccatgttggcctcccaaagtgctgggattacaggcgtgagccactgcacccggccaaatctgcccttttagccaaatgtcccaggtgactgtgatgccgcttgagcaacatgctctaagtccagtctcccctgaacttgcctgctggcaggaaccccagagggtctgcagctggaagcccgtgccctggggtgtgagaccttgagtgtaaggttcttcacaggagtctagcctgtggcccctcctcagcaacagctttattttaaattcttttaaaatgtttatttgtgtagagatggggtctcgccgtgttgcccaggcttgtctcaaactcctggcctcaagcagtcctcctaaatcaacatcccaaagtgctgggattacaggcatgagtcactgcacccaacctaaacatttcagtcctcactgtttcgagtctacgcatctcagcgcttcagaatggtgatggaagaccgtgaccatgtctgcccttttgtactgagtacaatggccaatgtgcggtgcacaccctctcccttcatcttcac

SEQ ID NO: 8125 - DNA, 6000 bp, Homo sapiens
gtgagccgagttcgtgccactgcactccagcctggcgacagagctacacttcgtttcaaaaaaaaaaaaaaagatagatatttctgatcaatatgttttcataaataagtattcctggcctcgcacagtggctcacaccagtaatcccaacactttggaaggccaaggtgggcagatcccgtgagcccaggagtttgacaccagcctgggcaacatagcgaaacctcgtctctacaaaaaaatacatattaaaaaaatttagccaggcaaggtggcatgatcctgtagtcccagctactcaggaaatggttgtggcagaatcacctaggcctcaggaggtcgaggctgcagtgagctgggatagtgccattgtacttcagatggagcaacagagagagaccttgtttcaaaaaaatatatataaagaaatatgcattcccactttgttgctatatgtatattccagaaacgtttctatacaaatttacataatatataaacaatcgaaacatcatatttgcgcatgagattgaacatttgtgccatgcaaccctcacgaatattttgttcacttaatctatcaaagtctgatcaatatttcttcaaatcctccactgtgtctcaattgatgctttgtaaattttaaggacatgtggttggttgagtgaaagtgtataactttctcttcttcacagattgctgatttaaaagtatgaaatatccgggcgtggtggctcacgcctgtaatcgcagcactttgggaggccgaggcaggcggatcatgaggtcaggagatcgagaccacggtgaaaccccgtctctactaaaaatagtaaaaaattagccgggcgtggtggcggtcgcctgtagtcccagctactcgggaggctgagccaggagaatggtgtgaacccggcaggcagagcttgcagtgagccaagatcgcgccactgcactccagcctgggtgacagagcaaggctccgtctcaaaataaaataaaataaataaataaataaataaaagtgtgaaatatcatctatttttcttttcaaaggctgtttgtgttagtattggtttgctattgctgccataacaaattacacgtattgagcagcttcagcaacacaaactcattatctcacagtcttttaggacaaaatcaaggccataacgtggctgcattcctttctggaggctccagagacgcgaatccatttccttgctctttcagattcttagtagaaatgcatatacttgtatatacacagattacagatagatctatgcttattcgttttttgtatgtactgttgacttattcacagtagcatctcatcttctccatttggggttcattattccactccctgatttacattgtttagtattgctttcagaaagagcccagatgcaaacatgtctgcagccttgcagctcaagcgatgcctgcttctctgtctctgtctctctccgtgtgtgtgtgtgtgtgtgtctccctctccctctctctctctgtctcaatctctctctgtctctccgtctctctctgtctgtctcaatctctctctttctctgttgttatcatagtacctgataaaaggacactgaaaacgccctccttattcctcataaggccaccgcctgacctgacgggtcacgagtgccccgagtctccttatgttctaggatttatccacagctgacactgcaactcggtcctttaataataactaggccaggttgcggtgagccgagatcgcgccattgcactccagcctgggcaacaagagcgaaattgcatctcaaaagataataataataataataataaataattataatagtaataattaggcccagcacagaactctctcctcacagttaaacgcttgtggttgtttctcctgtatcttctggggctgctgtttgctctttggaactccagtcccgacgagcttgtcattcattcaagggtaatttacattttctctggtagttttatgattattttaaattaatgcctcatggttttcactttaccatgatcgagatattcaatttagttataaactgatgttttctcttcagttctgtaaaaatttcaaccattagctcttcatgcatatcatgaactaacatccttcttccttctttcattctgaaaccgtgacagacacgttctttcttctcattcaacttcgtgtatatatcaatattttctattgttcaatttctgttctttccatgatacagtctggaaaatttcatgaatattttatcccaatgtatatatttattatttcagctgtcttgccctggattaaattatgctttgattttgttatgtttgcatggtaggtatatatggttagtaaattgcttctttttttgagacacagtttcgctcctgttgtcccagctgaagtacaggggcgcaatctcagcacacagcagcctccatcttccaggttcaagagattctcctgcctcagcctcccgagtagctgggattacaggcactcaccaccacgcccagataattttttgtatttttagtagagatggggtttcaccatgtcacccaggctggtctcgaactcctagcctcaagtgatctgcccgcctccacctcccaaagtgctgggattacaggcatgaactaccacgcccagacataaattcctttttaatggcgttaatttaatatagtttttcaccttcacgatgtctgtctaatgcatttcaacaactgtctattttgtcctcatatggttgtcattcctgtggggcggctcctcccacgcacctgacctttcataaagggtttctcccacggctgtccaggcatcagcctgatgaaggggattgttgccgctgctcctgccccactcccccaaactcagtgtcagctcaagattgtgcccagcagggatgggaccaatgccagcctcacactcacctgtggggcagacgcccatgtctgaccaccgtggattgaatctgtttctcacacacaggggaggggctgagcgctgaccgtggcctccagtgagtgagcagagaccccccagcgcctgtccacacacacgggggagggggagccacagcttccagcctcacccagagccctgacccctccctgcctgggaggacgtggggttcctcttctgtcccacatggaggtgggagcctcctcctccctaatgacgctcggtggtcccagacacctgtggccactcagcattgaactctgctcatggaaggggatgcgtctcaatgtgaggaactgtttttcctctttctctgcctgtggctgtgatgatctgcatatttcagacgtatcacaaggagaatttcatggtatttggagccgatgtgggctcttgagtgggggcgtcaatcatcctcctcgactgtggagcccagcaccaggatcctctcccgtccccaccctcctgtctgaactggtctggaaattcaccatggctgagcctcccatgtcctgggcaccactgacccccacagccactgtgatgagtggggttcatgacagcaggctcagaggtgacattcatgtccaaagtcacataaaccctagatgataatcaggaattaaatacaaatcagctcaccttccccagaatcagattatagattacaatgaaacatatatatatatatttctctttatcccctctatttctcctttttagacaggatcttgctctgtcgcccaggctggaaggccaaggggtgatcatagctccctgaagcctccgcctcccgggcccaagtgatcctcccacctcagcctcctgagtagctgggaccacaggcatgagcctccatgcccagctcacttttttcttttctgtagaaacagggtcacagtctgtttcccaggactgtctgaagctcctggcctcaagccatcacccgccacagcctcctgaagtactgggattccaggcatgagccaccacggtagaccctgcatttctctgtgctcactgctacacgcagctcagcctggactacacagccaggtgtcaggtgcgtctctgctgatctgagtctgcctgcagcatggacctgggtcttccctgaagcatctccagggctggagagacgactgccatggtaaggaccccgtaacgctgagctgatggacgggctgaaggagggagggagaccccatggggaggctctgagagggaggaggagcccacggtcaccctcgcctcaaaggggctgactcaggaaggcaccaggtctatttgcggctgtgtccccgtcctcagtgagataaagataaatcaggcagacagtggcccgggggcagggagaccccatttctctctgaaatgcctgcagagagcctggtgcctgcccccacttcagccctggggaaatcagagccaggttcctggggtggcagttcctcttcctgtgggctgaggatgagacaaccccatgacaagaaggacccagcctccgagcggccacaccctgtgtgtctctctgtcctgccagcactgagggctcatccctctgcagagcgcggggtcaccgggaggagacgccatgacgcccgccctcacagccctgctctgccttggtgagatttcaagatggggagggggagatctgagtcttggaggaaccccaccccacacacaagccctggtccatcaggagacctcaaaagctcaggaggcacccgggcggggacctgctcaggcttcagggcaaatgcctcacagggaactctcttccagggctgagtctgggccccaggacccgcgtgcaggcaggtgagtctgtccccagctgtcccaggtccctactcctcactgggacagggggccacccatgggcagctgggggaggagacagtagttctgggtgactgatggggatgatggggaagtcctggggctgggagctgggatctgagcgtggggatgtcttgggatccagcctctgatttccatctagggcccttccccaaacccaccctctgggctgagccaggctctgtgatcagctgggggagccccgtgaccatctggtgtcaggggagccaggaggcccaggagtaccgactgcataaagagggaagcccagagcccttggacagaaataacccactggaacccaagaacaaggccagattctccatcccatccatgacagagcaccatgcagggagataccgctgccactattacagctctgcaggctggtcagagcccagcgaccccctggagatggtgatgacaggtgagaggacactctggggtcccagccccaggctctgccctcaggaagggggtcggctctcaggggcgtctccctctcacagcccagccctggggatgatgtgggaggtgggagccccatttaacacggtgcctctttctctcctaggagcctacagcaaacccaccctctcagccctgcccagccctgtggtggcctcaggggggaatatgaccctccgatgtggctcacagaagggatatcaccattttgttctgatgaaggaaggagaacaccagctcccccggaccctggactcacagcagctccacagtcgggggttccaggccctgttccctgtgggccccgtgacccccagccacaggtggaggttcacatgctattactattatacaaacaccccctgggtgtggtcccaccccagtgaccccctggagattctgccctcaggtgagggagccacggccttgtctaacacactttcggggcagctgacaggttgtggggagtttggctggtgactgaatctggaaaggacccagagtgatgtgttgaaggacgggctgaaggcatgagggagaccccatggggaggctctgacatgggaggaggagccctcgaccacgttcacctggaaggggaggactcaggaaggcatcggtgtgtttgctgtgaggtcccagctctcagggagaggaggaaagatcaggcacag

SEQ ID NO: 8126 - DNA, 6000 bp, Homo sapiens
gtcacataggtgtgcagctcagagacaagggtttccagagggcttaacttttgggactcctcagtgtggagctggtgggtggggcctgaataaattgtccccagggcaccctgtgtagttgggaagagaagaggcctgtggctcgctctctttgtccactgcttggaatgggtagggtgggaccagccagcctttgggctggcagagacttcgagaaccacagggcttctttaggagtctgggtcaccccagggcatgacctggcgcctcaggccttgcctgtggtccaggtgtttagacagggcccctctgctggtggctactaggaggagagggcgcctttttaaggataagttgagttagtgaccagagccctgcctgcgagtcctagagtctaaggcagcagctacaattattggacaccaaatgtatatgatcacgctgactgtataacctcatgctgtctgtgtacacccagcactaaatgtatattcctgctgaggatacctccacaccacctgtataatgccatgttaaccaaataattggctgcactataaatatctataaatattcaagtagaggcaggttgtggcgtggtgactcgtgcctgcaatcccagcactttgggaggttgaggtgggaggattgcttaaggccaggagtttgagcccagcctgggtaacacagtgagatcctgtctctatttttattgtattgtatttttttttttttttgaggcggagtctcgctctgtcgcccaggctggagtacagtggcataatctcggctcactgcaacctctacctcccaggttcaaacgattctcctacttcagcctccccagtagctgggattacaggtgcccaccaccacacctggctaatttttgtatttttagtacagacagggttttgccttgttggccaggctggtcttgaactcctgacctcagtgatctgcccgcctcggcctcccacagtgctgggattacaggcatgaaccaccacacccggctaatttttgatttattgattgattgattttttgagacactcgctctgtcacccaggctggagtgcagtggcacgatctcggctcattgcaacctccgcctctcgggttgaagtgattctcctgcctcagcctcccaagtagctgggactacaggtgcacaccacaacatccagctaatttttgtatttttagtacagacggggtttcaccaagttggccaggatggtctcgatctcttgacctcatgatccgcccacctcggcctcccaaagtgctgggattataggtgttagccaccacacccagcctattttcttttttctttttctttttggagacagagtctcactctgtcccccaggttggagtgcagtgaggcaatcttggctcactgcaacctccacctcctgggtttaagcgattctcctgcctcagcttcccaagtagctgggattacaggcatgtgccaccacactggctaatgtttgtatttttagtagagaaggggtttcaccatgttggccaggctggcttagaaatcctgatcgacctgcctcagcctcccagagtgctgggattacaggcatgagccactgcacctggcctatgcctgctctttgaggtcagttttggtttcatactttagcctcattttgcagttgaggaaactgaggcttaaggaagataagccctttgttaagtatcctctagttcagagggtgcagaaggagcatttgaattcagggcgacccaggaggatgtgggctccacaagggtggagattgggtctctctggttcctcactgtatgcggtgccccgcccaaggcctgcacccactaagggctgaataaatacttgttctaagaccaggcccagtagtgcacgcaggtaatcccagcactttggggggccacggtgggaggagcccacgagtccaggagttaaagatgagcctgggcaacatagcaacatcccatctctacaaaaaaaattaaaaattagccgagtgcagtagagcacctgtagtcccagctactcaggaggcttagtcaggaggatggcttgaggcagggaggtcgagactgcgatgagctgtgattgcaccactgcactccagcctgggcaacagagggagatcctgtctcaaaaaaaaaaagcagcagacagaaagaaaactaatttcctgcacagcttggagaagttttcagcaccaacattccacagttggttgtctgggtttgggcagtaggccgttttccctcccagtgcctcagtttccacacctgcaaaacgaagccacggaaacgccctttcagggtggccaggggttctaggcggcatcgcccggtggcagggtgttcccagggtgaagccgcagggttcccgggtgggggcggggaaggctaaatgcggccggccggtgagtggcgggagcagctgcagccccgcccgcgccctcccgggtcccttagtctgggcagctgcccagctcgggccggtctgaccggtttgggccgccccgcctggcgctgtgctgggaggagccgccgccagtcgcgcggtcagtgcctccctccagactcgggagggtcgagggggcgcgggagagagcgcgggcggccgccggggctggtcgcctgcagggatgggggacgagcggccccactactacgggaaacacggtaggcagcgacccccgcccgtagccccgggccgacccctcggtccctcggagggggccttgagagaacatggggcgcagggaagggggctggagggggagcgcaattgcaaatctgcgcctggagcctccccaccatcagccaggccccttcaccccacttatcccccgcagcctcgcagacgaccctccttactctcccctacccgaaggacctgcccctgtacccctctgcctggcactgctgccggcgcctccttccccctatcccacctcagatcttccccatctccacctggttccgtggtggtcaccatttcagccctcttcccagtgggtggccgccagttaataagtttgttcacagttagtgatccctccttcctcccctgtcctggcctgccagaactgggggcttgggtgtggtcacctggaggtgggtgaggcagaaaattccacaggtctctgaattttattcttgccaaggcaaagacacccctaggggcttttgggagggggctctcccagccctgtcttggttcaggtctccaatcccatccatcttaatcttcttgactttcaggaacgccacagaagtatgatcccactttcaaaggacccatttacaataggtaagagctctgggttttggggggttctccccgctaatactaccccaatccctgtctcttcacaccccctcccatctgttctccaacaaactggtgacaaatatttgaaacttttttttttttttgagatggagtcttgctctgtcaccaggctggagtgccgtggcgcgatctcaatctcggctcactgcaaccttcgcctcccgggttcgagcaattctcccacctcagtctcccaagtagctgggattacaggcttgcaccaccacacctggctaatttttttttttttttgtacttttagcagagatgtttcgctgtgttgcccatgctggtctcgacctcgtgagctcaaagcgatccacctgccttggcctcccaaagtgctgggattacaggtgtgagttaccacacctggcctggacttaatttttaccatgtttatatttatttatttatttatttatttttgagatggagtctcactctgtcacccaggctggagtggtgcaatctcagctcactgcaaccttcccctcctggttcaagcacgtcttctgtctcagcctctccagtagctgtgactactcagaggctactcagaaggctgaggcaggagaattgcttgaatctgggaggtggaggttgcagtaagctgagattgcgccactgcactccagcctggaggacaagagcgagactctgtctcaaaaaaaaataacaaaaaaataaaatacagccaggcacggtggctcacacctataatcccagcactttgggaggccaaggcaggtggatcacttgaggttaggagttcgagaccagcctggctaacatggtgaaaccctgtctctactaaaaatacaagaattagctgggcatggtggcgggcacctataatcccagctacttgggagactgaggcaggagaatcgcttgaacctgggaggtagaggttgcagtaagctgagatcgttccactgcactccagcctgggcgacagagtgagattccctctcaaaaaaaaaaaaaaagtctagcttgggcaacatagcgagaccttgtctctacagaatgtatataaattaaaaaaaaaatgtgtggtggtgtgcacctgtagtctcaactacttgggaagctgaggcaggaggatcacttgagcccaggagttcgaggctgtagtgagctatgatcatgccactgtactccagcctggatgacggagtgagactctgttgcacaaaattaaaaaatgaaatgaaataaaaattaaaatgcatgtgccctttggtacggcattcaaacgactcaggaaaatttgtccaaataacacatggatgagggtgtttgcagagggcagatgggcccatggtgcacacagcaccaagcctcctccaaacactgcccctctgctccccaggggctgcacggatatcatatgctgtgtgttcctgctcctggccattgtgggctacgtggctgtaggcatcataggtgagtagagaatgagcaggacttggagttgcagggtaggcggaggcagccatggcctctggagtgggaacagggctggatctgaggagtggcagtgtctcagtatccctggatctttccacagcctggactcatggagaccctcgaaaggtgatctaccccactgacagccggggcgagttctgcgggcagaagggcacaaaaaacgagtgagttgactccttgcggcctggtggggctggggaagagggggcagaagattctaggcattccccatctctctaagtccagttaacaagtgcttataggctgggcgcggtgactcacgcccgaaattccaacactttgggaggccgaggcaggaatattgctttaggctaggagttcgagaccagcctggccaacatggcaaaaccccgtctccactaaaaatacacaaattagccaggcatggtggcacatgcctgtaatcccagctactcaggaggctgaggcaggagaatcacttgaaccacaggaggcagaagttgcaatgagccgagatcgtgccactgcactttagcctggggcacagagtgagactctgtctcaaaacaaacaagcaaaaattaagtggacgtggtggggcacacctctagtcccagctacccagcaggctgaggtgggaggatagcttgagctgggaggccaaggctgcagtaaggtatgattgtaccattgcactccagcctggacgacagagcgagacctggtctcaacaaaacaacaagaaaagaaaacaagtactgataaacgtcccactaccctcagccactagtctagtccttggggacacacagctctaaatgagatagtaagcatcctgttctctggcagcacacattttaagggcgggagagactgagaggggacagtcctggattacgcgtcaggtggtgatgaacaggtgagacaacagagcaagcatagcctgagtggcgtcacttcctggctctgtgacctagggcaggtgtctcaatctctctgaacctcgttttcctcatctctaaaatgaggatcataacagtcccaccctcatggggctattttgatggttagatgtgccaatacatgtacagagcttagaatgccacctggcatcgctgggcgtggtggctcacacctgtaatcccagc

SEQ ID NO: 8127 - DNA, 6000 bp, Homo sapiens
gcggggcgtgcactttcgctgggttccgtccgccgcagcccaaacagttaactgaacggggaggggagggggcggggcttacccggggtcaccgccagggccctgctgggttccacgccacgttcctgtctccgcagggcgttcgatccctagagggaggagcctgtccaaacggacgctaacggcctacctccccctcaggtgctcttacagcctgttccaagtgtggcttaatccgtctccaccaccagatctttctccgtggattcctctgctaagaccgctggtgagtaggcagcgggcctggactccggggtccgagggaggaggggctgggggcctggactccggggtccgagggaggaggggctgggggcctgggctcctcggtccgagggaggaggggctgggggcctgggggcctgggctcctgggtccgagggaggaggggctgggggcctgggctcctgggtccgagggaggaggggctgggggtctggactccggggtccgagggaggaggggctggggtctggactcctgggtccgaggaaggaggggctggggtctggactcctgggtccgaggaaggaggggctgggggcctgggctcctgggtccgagggaggaggggctggggtctggactcctgggtccgagggaggaggggctggggtctggactcctgggtccgagggaggaggggctgggggcctggactccggggtccgagggaggaggggctgggggcctggactccggggtccgagggaggaggggctggggtctggactcctgggtccgagggaggaggggctgggggcctgggctcctgggtctgagggaggaggggctgggggcctgggctcctgggtctgagggaggaggggctggggtctggactcgtgggtctgaaggaggaaggattaggtcctgggctcctagatcctgggagaaggaccaggaagcttgggctccaaggaatagggtcccagacactgaggtatctgaggaagaagcgagtccaggccctggctcctttgtctcagggagctgctgtcctgcgactgccacgaagaggttaaggcctgtgctactgccctgcaaagtgcctgaagctgaaaggaggaagttactttcctgtggctaggagaggccttgggtttagtcctgtggctgcgttgagacagtttacagcctaaggaaagaactgggcacctggtttctaagaggacgggcacttgattcctgggggccattaggacaaggaggtggaagctgtaggttttgcaaggactaaagaagcaaattggttttctggagtctggggcatctgggatccttcaggctaagggtccagggccagaggtctgaccccttataacaggacggtgatggccaggcgcagtggctcatgcctgtaatcccagcactttgggaggccaaggcgggcggatcacttgaggtcaggagtttgagaccagcctggccaacatggcgaaaccccatctctactgaaaatacaaaaattagccgagcatggtggcacacacctgtaatcccagctactcaggaggctgaggcaggagaatcgcttgaatccgggaggcggaggttgccgtgagtcaagatcgcaccattgcactgcagcctgggtgacagagcgactccatgtaaaaaaaacaacaaccaaaaaacaggattgtgaggcctagagagagttcagtggaagggcctggggttcctactggacagttggaaatctggggagctgagtttcccagaagctgggggaccagctggctgggttttggggagagaaggtggaggtagatggactcagtatgcaggagtgtggagggggaggctcaaactagcttttttgggttgcagtactccagtcctaaatctcaggtgggagttagactgagagtgaaggttgctaatctccaaggtggggggtagggagaggaggaggccgctaagagtttaggctccttgtcagaagggaggggagatctcttggttttccacggctgggatctctatgagaagatatcctttatcgggaggtcggagctcttattagatgtgggtccctgagagtggaagcctggggaggttgggccgtttagaggctgcaaatgtctaggtcactgttcgatggaagaaggaagtttgctcacagggtctggggtgcagagctctgaatactgaaagaaaaggaagttgagagatggggttttcagagcctgtggaagacaagcgttttgttctgacacttgggttgtggcaggaggcagaaggaggatgctttattttttatttattttatttatttttattattttattttattttttgagatggagtttcactcatgtcacccgggctggagtgcagtggcgcaatctcggctcactgcaacctccacctctagggttcaagcgattctcctgcctcagcctcccaagtagctgcgattacaagcgcccaccaccacacccagctgatttttgtatttttagtagagacggggtttcaccatgttggtcaggctggtcttgaacttctgacctcaagtgatctgccagcctcggcttccgaaagtgctgggattacaggcatgagccactgcgcccagattattttattttttttgaggcggagtgtggctctgtggctcaggctggagtgcaggggttctatcttggctcactgcaacctctgcctcctgggttcaagtgattctcctgcctcagtctcccgagtagctgggattgcaggtgcatgccaccacgcccagataatttttgtattattagtagagaccgagtgtcgccacgttggccaggctggtctccaactcctgacctcaagtgatccacccaccttggcctccgaagtgctgggattacaagtgtgagccaccacacccggcctatttgtaattaaaaaaaattttttttttttgagtcagggtctcactctgtctcccaggctggagtgcactggtgcatcacagctcactgcagccctgaccccacaggctcaagcaatcctcccacctcagcatcccgagtagctgggaccacacgcacacaccaccacacccagctaattaaaaaatttttttttggtaaatgaggtctccctaaggttgcccaggctggtctccaactcctgggctcaagcaatcctcctgcctcagcctcttggagtgctgggattacaggcatcagccacacctgtgcctggccagaggggtggtgctatagagtacagagtgctaaatggctgagctactgagtcccttggggagggagggaaagagggaagcacggtatctggagtgggaagcaaacagtgtagttgtacagtagttaggtcttgaaagagagaagaatctcttgagaaggaggaaaataggggcctagactcctggattctgatacgagtaggggaggagtgagccttgaaccggaggggacaggctcatccctgtatgcccaggactgtccccatttgaaaacccaaggctgggcccggtggctcacgcctataatcccagcactttgggaggccaaggccagcggatcatgaggtcaggagatcgagaccatcctggctaacacagtgaaaccccgtctctactaaaaatacaaaaaaattagccgggcgtggtggcacatgcctgtaatctcagctactcgggaggctgaggcaggagaatcacttgaacctgagtagcagaggttgtagtgagctgagattgtgccaatgcactccagcctgggccacagagcaagactctgtctcaaaaaaaaaaaaagaaaagaaaaccgaaagccccacatcttgggaactccctaattagagctcatattaatttgtccctggggtaggcaatggctaagggacctggattcttatgtttgtgactgtataaggacactgtctttcccctttttgcagccatgccagtgacggtaacccgcaccaccatcacaaccaccacgacgtcatcttcgggcctggggtcccccatgatcgtggggtcccctcgggccctgacacagcccctgggtctccttcgcctgctgcagctggtgtctacctgcgtggccttctcgctggtggctagcgtgggcgcctggacggggtccatgggcaactggtccatgttcacctggtgcttctgcttctccgtgaccctgatcatcctcatcgtggagctgtgcgggctccaggcccgcttccccctgtcttggcgcaacttccccatcaccttcgcctgctatgcggccctcttctgcctctcggcctccatcatctaccccaccacctatgtccagttcctgtcccacggccgttcgcgggaccacgccatcgccgccaccttcttctcctgcatcgcgtgtgtggcttacgccaccgaagtggcctggacccgggcccggcccggcgagatcactggctatatggccaccgtacccgggctgctgaaggtgctggagaccttcgttgcctgcatcatcttcgcgttcatcagcgaccccaacctgtaccagcaccagccggccctggagtggtgcgtggcggtgtacgccatctgcttcatcctagcggccatcgccatcctgctgaacctgggggagtgcaccaacgtgctacccatccccttccccagcttcctgtcggggctggccttgctgtctgtcctcctctatgccaccgcccttgttctctggcccctctaccagttcgatgagaagtatggcggccagcctcggcgctcgagagatgtaagctgcagccgcagccatgcctactacgtgtgtgcctgggaccgccgactggctgtggccatcctgacggccatcaacctactggcgtatgtggctgacctggtgcactctgcccacctggtttttgtcaaggtctaagactctcccaagaggctcccgttccctctccaacctctttgttcttcttgcccgagttttctttatggagtacttctttcctccgcctttcctctgttttcctcttcctgtctcccctccctcccacctttttctttccttcccaattccttgcactctaaccagttcttggatgcatcttcttccttccctttcctcttgctgtttccttcctgtgttgttttgttgcccacatcctgttttcacccctgagctgtttctctttttcttttcttttttttttttttttttttttaagacggattctcactctgtggcccaggctggagtgcagtggtgcgatctcgactcactgcaacccccgcctcctgggttcaagcgattctcctgccccagcctcccaagtagctgggaggacaggtgtgagctgccgcacccagcctgtttctctttttccactcttcttttttctcatctcttttctgggttgcctgtcggctttcttatctgcctgttttgcaagcaccttctcctgtgtccttgggagccctgagacttctttctctccttgcctccacccacctccaaaggtgctgagctcacatccacaccccttgcagccgtccatgccacagccccccaaggggccccattgccaaagcatgcctgcccaccctcgctgtgccttagtcagtgtgtacgtgtgtgtgtgtgtgtgtgtgtgtgtgtgtgtttggggggtggggggtgggtagctggggattgggccctctttctcccagtggaggaaggtgtgcagtgtacttcccctttaaattaaaaaacatatatatatatatatttggaggtcagtaatttccaatgggcgggaggctttaagcaccgaccctgggtccctaggccccgcctggcactcagccttgccagagattggctccagaatttttgccaggcttacagaacacccactgcctagaggccatcttaaaggaagcaggggctggatgcctttcatcccaactattctctgtggtatcaaaaagaaaaaaaaaaa

SEQ ID NO: 8128 - DNA, 6000 bp, Homo sapiens
ccagaactgggggcttgggtgtggtcacctggaggtgggtgaggcagaaaattccacaggtctctgaattttattcttgccaaggcaaagacacccctaggggcttttgggagggggctctcccagccctgtcttggttcaggtctccaatcccatccatcttaatcttcttgactttcaggaacgccacagaagtatgatcccactttcaaaggacccatttacaataggtaagagctctgggttttggggggttctccccgctaatactaccccaatccctgtctcttcacaccccctcccatctgttctccaacaaactggtgacaaatatttgaaacttttttttttttttgagatggagtcttgctctgtcaccaggctggagtgccgtggcgcgatctcaatctcggctcactgcaaccttcgcctcccgggttcgagcaattctcccacctcagtctcccaagtagctgggattacaggcttgcaccaccacacctggctaatttttttttttttttgtacttttagcagagatgtttcgctgtgttgcccatgctggtctcgacctcgtgagctcaaagcgatccacctgccttggcctcccaaagtgctgggattacaggtgtgagttaccacacctggcctggacttaatttttaccatgtttatatttatttatttatttatttatttttgagatggagtctcactctgtcacccaggctggagtggtgcaatctcagctcactgcaaccttcccctcctggttcaagcacgtcttctgtctcagcctctccagtagctgtgactactcagaggctactcagaaggctgaggcaggagaattgcttgaatctgggaggtggaggttgcagtaagctgagattgcgccactgcactccagcctggaggacaagagcgagactctgtctcaaaaaaaaataacaaaaaaataaaatacagccaggcacggtggctcacacctataatcccagcactttgggaggccaaggcaggtggatcacttgaggttaggagttcgagaccagcctggctaacatggtgaaaccctgtctctactaaaaatacaagaattagctgggcatggtggcgggcacctataatcccagctacttgggagactgaggcaggagaatcgcttgaacctgggaggtagaggttgcagtaagctgagatcgttccactgcactccagcctgggcgacagagtgagattccctctcaaaaaaaaaaaaaaagtctagcttgggcaacatagcgagaccttgtctctacagaatgtatataaattaaaaaaaaaatgtgtggtggtgtgcacctgtagtctcaactacttgggaagctgaggcaggaggatcacttgagcccaggagttcgaggctgtagtgagctatgatcatgccactgtactccagcctggatgacggagtgagactctgttgcacaaaattaaaaaatgaaatgaaataaaaattaaaatgcatgtgccctttggtacggcattcaaacgactcaggaaaatttgtccaaataacacatggatgagggtgtttgcagagggcagatgggcccatggtgcacacagcaccaagcctcctccaaacactgcccctctgctccccaggggctgcacggatatcatatgctgtgtgttcctgctcctggccattgtgggctacgtggctgtaggcatcataggtgagtagagaatgagcaggacttggagttgcagggtaggcggaggcagccatggcctctggagtgggaacagggctggatctgaggagtggcagtgtctcagtatccctggatctttccacagcctggactcatggagaccctcgaaaggtgatctaccccactgacagccggggcgagttctgcgggcagaagggcacaaaaaacgagtgagttgactccttgcggcctggtggggctggggaagagggggcagaagattctaggcattccccatctctctaagtccagttaacaagtgcttataggctgggcgcggtgactcacgcccgaaattccaacactttgggaggccgaggcaggaatattgctttaggctaggagttcgagaccagcctggccaacatggcaaaaccccgtctccactaaaaatacacaaattagccaggcatggtggcacatgcctgtaatcccagctactcaggaggctgaggcaggagaatcacttgaaccacaggaggcagaagttgcaatgagccgagatcgtgccactgcactttagcctggggcacagagtgagactctgtctcaaaacaaacaagcaaaaattaagtggacgtggtggggcacacctctagtcccagctacccagcaggctgaggtgggaggatagcttgagctgggaggccaaggctgcagtaaggtatgattgtaccattgcactccagcctggacgacagagcgagacctggtctcaacaaaacaacaagaaaagaaaacaagtactgataaacgtcccactaccctcagccactagtctagtccttggggacacacagctctaaatgagatagtaagcatcctgttctctggcagcacacattttaagggcgggagagactgagaggggacagtcctggattacgcgtcaggtggtgatgaacaggtgagacaacagagcaagcatagcctgagtggcgtcacttcctggctctgtgacctagggcaggtgtctcaatctctctgaacctcgttttcctcatctctaaaatgaggatcataacagtcccaccctcatggggctattttgatggttagatgtgccaatacatgtacagagcttagaatgccacctggcatcgctgggcgtggtggctcacacctgtaatcccagcacactttgggaggctgaggtgggaggatcaagaccagcctagtcaacatggtgaaaccccgtctctactaaaaatacaaaaaaattagctgggcattgtggcatgttcctgtaatcccggttactcaggaggctgaggcaggagaattgcttgaacctgggaggcagaggttgcaatgagccgagatcgtgccactgcactccagcctaggcaacagagcaagactccatctcaaaaaaaaaaaaaagaatggcacctggcatagagttgctgatgctgcagtttttaaactattattattattattattactattattattttgaaacggaattttgctcttgttacccaggctagagtgcagtggcacaatctcagcccactgcaacctccgtctcccgggttcaagcggttctcctgcctcagcctcccgagttgctgggattacaggcatatgccaccatgcccagctaatttttgtatttttagtagagacggggtttcatcatattggtcaggctggtctcgaactcctgacctcaggttatctgcctgccttggcttcccaaactgctggtattacgggtgtgagccaccacacccggcctattattattattactattattattattttgacacagtgtctcactctgtcagccagtggcaggatcatagctcgctacagcctggaactcctgggcttaagcgatcttcccacctgggccttccaaagtgctggcacaagacaggcctgagccaccctgcctggccctatataagatatctttttttttttttgagacagagtctcgctctgtcgcccaggctggagtgcaatggtgcgatcttggctcactgcaacctccgccacccaggttcaagcaattctcctgcctcagcctcctaagtagctgggattacaggtgcccgccaccacacccagctaattttttgtatttttagtacagacggggtttcgccacgttggccaggctggtctcgaactcctgacctcaggtgatccgcctgccttggcctccaaaagtgctgggattacaggtgtgagttactgcacccggccatataaaatatcttaaaggaaacaataggccgggcacggtggctcacgcctgtaatcccagtacttagggaggcccagactggaggattgcttgacaccagcctgggcaacatggtgaaattctgtcgctaccaataatagaaaaaattagccaggtgtggttgcgcacacccgtagtctcagctgctcaggaggatgaggtggaggatcacttgatcctaggaggtagaggctgcagtgagccaagattgtgccactgctcgctctgtctgggcaacagagaaagactcttgtctcaaaaaagaaaaaaaaacaaaagaggccgggcgcagtggctcacgcatataatcccaacactttgggaggctgaggcgggtggatcacctgaggtcaggagttcgagaccagtgtggccaacatggcaaaaccccgtctccactaaaaatacaaaaattagctgggcatcgtggcgggcacctacctgtagtcccagctactcgggaggctgaggcaggagaattgcttgaacccaggaggcggaggttgtagtgagcccacatcacaccattgcactccagcctaggcaacagagcaggactccatctaaaaaaaaaaaaaagagaaaaataaaaaaagttttctatagggtggttaagaagtcttaacaggtcgggtgtggtggcttacacctgtaataccaacactttgggaggccaaggcaggcggatcacctgaggtcaggagtttgagaccagcctggccaacatggtggaaaccccatctctactaaaaatacaaaaattagccgggcttggtagcgggcacctgtaatcccagctactcgggaggctgaggcaggagaattgcttgaacccgggaggcggaggttgcagtgagccgagatcacaccattgcactccatcctgggcaacaagagcgagactctgtctcaaaaaaaaaaaaaaatcttaacagtttccattctcccttctctaactccaggaacaaaccctatctgttttatttcaacattgtgaaatgtgccagccccctggttctgctggaattccaatgtcccactccccaggtaacctggtccccaccgttccctttttcctctccccgcttcccatccttttccccctgtgaatgtgggctgcgacctcagtcctgagcagtctgccccaactccacccaatcccttccttctcccctcccagatctgcgtggaaaaatgccccgaccgctacctcacgtacctgaatgctcgcagctcccgggactttgagtactataagcagttctgtgttcctggcttcaagaacaataaagtgagttgtagactgtcctgagagcacaggtatgggcagtggcagtgtactagacttggggactcacctccctccatctctcttggcagggagtggctgaggtgcttcaagatggtgactgccctgctgtcctcatccccagcaaaccctgtgagtcaggggatcccaggaggctcaggtggtgacggggaggctctgcagaggctcagcctgactggtgccatcctctgctccatgcagtggcccggagatgcttccccgctatccacgcctacaagggtgtcctgatggtgggcaatgagacgacctatgaggatgggcatggctcccggaaaaacatcacagacctggtggagggcgccaagtgaggatattggcgcaccgcgccagggtctcactttgctgggtgggacaggcaatcccctgtggttggcctgatcatggaagagggtctgacccgagccttgtcctccttcccccaggaaagccaatggagtcctagaggcgcggcaactcgccatgcgcatatttgaagattacaccgtctcttggtactggattatcatgtaagtcaggagggaaggggcctctcccctggctgccccctctaagcctggctgagggtggagtctgttcatgaccgttttcttttccccagaggcctggtcattgccatggcgatgagc

SEQ ID NO: 8129 - DNA, 6000 bp, Homo sapiens
ttttctttggtttgagacagagtctcgctctgtcgcccaggctggagtgcagtggtgcaatctcggctcactgcaacctctgcctcctgagttcaggtgattctcctgcctcagcctcccaagtagctgggactacaggcgcatgccaccacgcctggctaatttttatacttttagtagagatggggtttctccatgttggccaggctggtctcgaactcctgacctcaagtgatccgcccaccttggcctctcaaagtgctgggattacaggtatgagccaccgtggctggccccttcccccaaactttatctggcacccagtttgcctggaagggaggagtcatgaacacccagattgtgccctcccaccaccctactctgcccagtttctggtgtgtgaagtctgggtgggggcctaggaacctgcatttcttttacttttcattgtttgttttgagaccaggtctcgctctgttgcccaggctggactgtagtggtgtgatcatagctcactgcagcttcaaacttctgggctcaagcgatcctcccacctcagcctcccaagtagctgggactacaggtgtgcaccaccatgccaggctatttttgtttttttgagaggagtttcgctcttgctgcccaggctggagcgcaatggcgagatcttgactcactgcaacctctgcctcccgggttcaagcaattctcctgcctcagcctcctaagtagctgggattacaggcatgcgccaccatgcccgactaatttttgtatttttagtagagacagggtttctccgtgatggtcaggctggtctcgaactcctgacctcaggcgatccacctgcctcaacctcccaaagtgctgggattacaggcgtgagccactgcatctggccacgccagactaatttttaatttgttttgtagagatgggatcttgctatgttgcccaggctggtcttgaactcctgggctaaagtgattctcctgcctcagcctcaatcccaaagcactgggattacaggcatgaaccactgcacctggctttggaacctgcatttctaacaagctcccagggtgaggctgatgtggctggcccagggaccacaccttgagagccagtggtctaaatcttttttcaaaacagattctgggtgaatcaggagctctgtccatgacctgcgtccaaagaactcttcctggagccttaaaatggtcaaggccgcctgcagtggctgacgcctgtaatcctcacactttgggaggccgaggtgggcagatcacctgacaccagcctggccaacacagtgaaatcccatttctactgaaattacaaaaattagccaggtatggtagcacacacctgtggtctcagctacttgggaggctgaggtgggaggatcgcttgaacctgggaggcagaggctgcagtaagccgagatcacgccactgcactccagcctgggtaacagagcaagactcatctcaaaaaagaaaaaacaaaaaatggtagtaaaatacgcacaacatacaattcacaattttcaccatttcttttttttcgagtcttgctctgttgcccaggctggagtgcagtggtgccatgttggctcactgcaacctctgcctctcaggttcaagtgattctcctgcctcagcctcccgagtagctgggattataggcctgtgccactatgcccagctaattttttggtatttttagtagagacagggtttcaccacattgaccaggctggtcttgaactcctgaccttaggtgatctgccagcctcggcctcccaaagtgctgggatgacaggcgtgagccaccgcacccggcccattttcaccatttctttcttcttcttcttcttcttttttttttttttttttttttggagacagagtcttgctctgtcgcccaggctggagtgcagtggtgccatgttggctcactgcaacctctgcctttcgggttcaagtgattctcctgcctcagcctcccgagtagctgggattacaggcacgcgccaccacgcctggctaattttgtatttttagtagagacggggtttctccatgttagtcaggctggtcttgaactcccgacctcaggtaatccgcccacctcggcctcccaaagtgctgggattgcaggtgtgagcccccgcgcccggcccattttcaccatgtctaagagcacagctccgtggccttaagcacattcccatggctgtgcaaacatcaccgccatcatctccagaatgttctcatcttctgagactggaagtctgcccctgtgaaacactcactcctcgtctccccccaagcccctggcaccccccatcctactttctgtctctgtgaatgtgacaactctagggacctcctaggagtggaaccacacagaatttgtctttttgttttttttgtttgttttttttttttgcggggacagacggggtctttctctgttgcccaggccagagtgcagtggtgcgatcatagctcactgcagccttgagttcccgggctcaagcagtcctcccaccttagcctactaagtagctggctaattaaaaaacaattttttttgtaaagatgaggggtctcactacacctagctaattaaaaaaattttttttgtagagatgagagggctcactatgttacccaggctggtctagaactcctgagctcaagtaatcctcctgccttggcctcccaaagtgctggaattacaggcgggagcctctgtgcccaccccaaacattatttatgtgcataggtaatataatcattatgatttacatttatgtaaataatataaacgttattacttaaattaacataaacaacataagccttattatgtgcttatataaagaacataaatatggccgggcgcagtggctcacacctgtaatcccagcactttgggaagctgaggcgggaagatcacgaggtcaggcgttcaagaccagcctggccaacatggcgaaacctcatctctactaaaaatacaaaaattagccgggcgtggtggcacgtacctgtagtcctagttacttgggagggtgaggcaggagaatcacttgaaccctggaggcagaggttgcagtgagctcagatcgcccccctgcactccagcctgggcaacaacagcaagactccatctcaaaaaaaaaaaagaaggatataaatattgctacttacatttgcataaatatatataatttattatgtatttctataattatatgtttcttataatagcaaactgtattattattgataaaataatataaagaaaacaataacatatctatacttacgtaatacaaacgatggaatataaatattatttgcaatatgataataaacaggtagttaattgcaaatgttattgatatgtattgcgtagatcaatgttaataacatgtattgtgtagatctatatatatatatatttttttttgatatggagtctcgctctgttgcccaggctggagtgcagtgacacgatctcagctcactgcaagctctgcctcccaggttcaccctattctcctgccttagcctcccaagtagctgggactacaggcgcccgccaccacgcctggctaattttttgtatttttagtagagacggggtttcaccatgttaaccaggatggtctcaatctcctgacctcgtgatccgcccgcctcggcctcccaaagtcttgggattacaggcatgagccaccgcgcccggccctgtgtagatcaatattatttacatgtactgtgtatatcactgttattggtatattttgtgcatatcaatgttattgacatgtagtgtgtatatcaatgttattgacatgtagtgtgtacattaatgttattggcatgtagtgtgtatatcaatgttattggcatgtagtgtgtatatccatgttattggcatgtagtgtgtatatcaatgttattgacatgtagtgtgtgtatcaatgttagttacatgtattgtgtagatcaatgttattggtattcattgtgtatagcaatgtgattggcatgtattgcatatagcaatgctatttgtatgttttatgtagatccatgtcaatgatatagtatagattcatgttattggcatgtattgtgtatatccatgttattggcatgtattgtgcatatccgtgttattggcatgtattgtgtatatccatgttattggcatgcattgggtaactccatgttattggcatgtgctgtgtaggtccatgtgtggttttttttgggacagagtctcactctgtggcccaggctggagggcaatggtgcgatctcagctcactgcaacctctccctcctgggttccagcgattctcctgcctcagcctcccgagtagccgcgattacaggcatgtgccaccacgcccagctattttttgtatttttagtagagacaggatttcaccatgttggtcaggatggtcttgaactcctgacctcaggtgatccgccctcttcggcctcccaaagtgccgggaatataggcgtgagtcaccgcgcccggccagatccatgttattgtcatgcgctgtgcaggtccctgttattggcatgtgctgtttagatccatgttattggcatgtgctgtgtacatccatattattggcacgtgctgtatagatccatattattgtcatgtgttgtgtagatccatgttattggtatgtgttgtgcacagcaatgttattgatacgtatcgtgcctgtcaatcttactgacctaatacgatggaatggcgagcctggctctgtactcccacccctgggcgcgagggggcactcgaggcgctcctggctgcgggtcgcaagcaggccccgcccccgagccccgattggccgcgcgccgtccgcggcgtcgcacgcacgcaggccccgccccgtccgccccgcgccggcccggcgcgccctcccttggccggcggcgcttgttgttcggcggcggcggtcgcagctcgggtccccctcgggcgcccccgccgccgtccgcgcgcggccatggagctggaggtaccggacgaggcggagagcgctgaggcgggggccgtgccctcggaggcggcgtgggcggcagagagcggggcggcggcaggtaacggcccggcctcccggggctgcggcccgctgggctcgtccgagcgccgagagtcgcggggctgcggggccggggcgggggctgcacggtcgctgcgggggcgccgccggttccaggagcctggggcggggcagtcccctggagccgcggggaggacggggctgaagccgcgccgggaagcgggaggcctgcgaggggctacctcccaccgctcccgggccgggggcgactcggcgtgggcgccgctggggatccccgttctgcctgacccgctcccaggggctgcccgtcgtgtgagtggcggctgcttgggtggaggcgggggtctctgaggccgtgcgtgcccacctcctgatgtcacctccctttctgtaagtccccagacctgagtccgggtgcgcgacctttcctcaccttcctgggcctcagtttacctccctgctaaaatgaggggaggaaaagggttacatctcaagatgcctccaccgccccggctgtgcacacagggtgccctgtcgcccccttttcctctccccgagccttcccccaggacacactggtggggctgcgggctgggcggggggcacggctgtctcatgccccctttagctgcttcctggacctccagccgggtaggtggcggcagctgggccttcccttctgtggggacggtgtgcagagcccagaggaagggaacagttccttctcagtcgaggtcacaagctcccaaatcggaagtttccggattcacaaaatcctctgctcctcccaggcagccagcagcagcgtctctgtagacacccacacgggcatccgtcctccttctccccccaggcctccc

SEQ ID NO: 8130 - DNA, 6000 bp, Homo sapiens
ccccagctagctccgccagggtggggacttgtgtctgttttgagcccttctgtatccctcaagcctagagcagggcctggcatgcagtcagtggtcaataagtatttgcaggacgggtgcggcggctcacgcctgtactcccagcactttgggaggccgaggtgggcggatcacctgaggtcaggagttcaagaccagcctggccaacatggagaaaccctgtctctactaaaaatacaaaattaggccaggcgtggtggctcacgcctgtaatcccagcactttgggaggccagggcaggcggatcacgaggttatcaggagttcgagactagcctggcaaacatggtgaaaccctgtctctactaaaaatacaaaaattagctgggtgtgacggcgggcacctgtaatcccagctactcgggaggctgaggcaggagaatcattggaacactgggaggtggaggttgcagtgagccaagatcacaccactgcactccagcctgggcgacaagagcaaaactccatctcaaaaaaaaaaaaaaattagccaggcatggtggcgcatgcctgtaatcccagctactctgaaggctgaggcaggagaaccgcttgaacccaggaggcagaggttgcagtgagccaagaccacatgactgcattccacactgggtgacagagcaagactccatatagaagaaaaaaaaaaatttttttttttttttttgagaccaagtctcactctgttgcccaggctggagtacaatggcgtgatctcagctcactgcaacctctgcctcccaggctcaagcaattctcgtgcctcagcctcccaagtaactgggactacaggaatgtgccaccacacccggctaatttttatatttttagtagagacgaggtttcaccatgttggccaggctggtctcgaactcctgacctcaggtgatccaaacgccttgcctcccaaagtgctgggattacaggtgtgagccacggcgcccagcctgaaaaaaaattttttttaagtatttgcttaagataaagcattgttttaggtacttgacatgtgttctaatctcatgaattcctcacagccctctgagggagggatgggtcccatcaccccattacagatgggcagagccctgaagccccctgccctaaagccaggatgggtaggtgtgactattaggctccggctggagtggcgatccgcctctccgggaaggggtcctcctggggcggaggaaggaatagtcattgcaggatgacacagcctggcctactcaccattcagggtactcagcatccggtttcaggggtacatcctgcccttccttgtagatgttgacgcccatggcatatgtggtgagctggacaggatctgtgcatacgtcggggtccttgagggcctcgctggtcactgcaccttttcccgatttggcccccttcataactggggagacgagagggagagtcatttcagcccagcccctcctctggaagccaaacttctctcacagaaccctgtctcaggtggcctctgcccctggctggactctgctacactcaaaactttctttttttttttttttgagacggagtctcgctctgttgcccaggtggagtgcagtggcgcagtctcagctcactgcaagctccgcctcccgggttcaagccattctcctgcctcagcctcccaagtagctgggactacaggcgcccaccaccacgcccagctaattttttgtatttttagtagagacggggtttcaccgtgttagccaggatggtctcgatctcctgacctcgtgatctgcccaccttggcctcccaaagtgttgggattacaggcgtgagccaccgcgcccggccactcaaaacttttttttaaagacagggtctcagccaggcatagtggctcatgcctgtaatcccagcactctgggaggccgaggtgggaagatcacctgaggtcaggtgagtttaagaccagcctggccaacatggtgaaaacttgtctctactaaaaatacaaaaaaaaaaattagctgggcatggtggcatatgcctgtgatcccagctactcgggaggctgaggcaggagaatcacttgaacccgggaggcggaggttgcagtgagctgagatcgcatcgctgcactccagcctaggttacagagcaagattccatctcaaaaaaataaaaaatctaaaaaattaaaaaataaagacagcccggccgggcgcggcggctcacgcctgtaatcccagctctttgggaggccaaggtgggcggatcacgaggtcaggaggttgagaccatcctggctaacatggtgaaattccatctctactaaaaatacaaaaacattagccgggcatggtggtgggcacctgtggtcccagctacttgggaggctgaggcaggagaatggcgtgaacccaggaggcggagcttgcagtgagccaagattgcgccactgcacactccagcctgggcgacagagcgagactccgtctgaagaaaataaaaaaataaaaaataaaagcccaggctggagggcaggggcacaatcatggctcactgcagcctcaaactcccaggctcaagtgatccttctgcctcagcctcccaagtagctgagatcacagttgtgagccaccatgccccgcttatttttatttttatttatttatttatttattttgagacagagtctcactgtgtcgcccaggctggagtgcagtggcgtgatctcggctcactgcaacctccgcctcctgggttcaagcagttctcctgcctcagcctcctgagtagctgggattacagacatgtgccaccatgccccactaatttttgtatttttagtagagctagggtttcaccatgttggtcaggctgatcttgaattcctgaccttgtgatccacctgcatcagcctcccaaagtgctgggattacaggcgtgagctaccgcgccaggcaatttttttttttttttatacaaacagggtcctgctatgttgcccaggctggtctcgaactcctgggttcaagcaatcgatcctccctccttggcttcccaaagtgccgggaataaaggtgtgagccatcatgcctggcctcgaaatcactttaagtgggatttggacacagcattaagtaactttaagtgggatttggacatagcattaagtaacaccgatgcttggaatgaccaagtcattcaagttatattttgtctgctatgtgtctgtctttaaggccgaacattggacaatttccccctttcaacaaaggagatcaggcaaggctgtatccagctaaaccttaataaccttgttttgttcttgctgaagtggccaattaaacgggctccataatttctttgaatgtttggtaacgtcttggccaaggttacccagcgatttggaggcaggcagagaaacagaactggaacccaagttcatgacctccccagactcccttcaaatcctttccaacccgcgcctgcgcagtgaaacgcgtggtctccacgtaaccacatcctcctcccaggccgctccgccccaagctggcgcctgcgccctgggtccaatcgctacagtatctccgagccagacgcccgagctccaagcggcgctgggtccctcaaactgcgcctgcgcatacagcctggcatccgcctctctgcgcttgcgcatcagttctagcaccacctccccaaccaccgcctgcgcactgtcaattcctcagtgcacccaccgtccccatttggttcctcttaacccagctcacctggtttcttggcataatcccgggccaggagtcttccggaagtggcggggtttaggagctcccaggccccccagccggcccacgtccgggtagccccgaaaaggcgtttggtcgccatgacgtattgcgggcagcttgcaagtgcacgtttccggaagacgtcagtggcccaagggtgtttgggagttgtaggccccgtggaagtgtaggccccgtggaggtgtctgggaaatgcggtctcccaagctttcataatctatggtgatttcttcagacttttgtagacatacacagttactataggaggaggcgttcaagggatatttcattgacttcttgcccttcttcaattacataacatttactaaaaatatcacactttatatgttcctgattccatccaatgagtaattattcaaagctttaaagttaaaaaaagaagattaacaatgagtctaatatactccagtagggctggagtctaatcactgttaatttttataacattatatttttaaaattatatataacatatataatacatataatatatagtatgttttatatataatatataaattaataatatatattttatatattcttttccagctctactactgctaaatccttaacccgcttgatctaatttaatcctcacaattgagaggtaggtactattttttccccagcttataatgaggaaactgagttctcagggaggtaaagttcccaggccgaccccaaatccatggtgcacctatgtgtctccctactgtgagccaaaccgaaagtccgtctttaacagggtctccacgacgcttccggtgcctcaaggtcccaaggaaaccacctctcacacttctttaatatttcccaaccccacttctccccatctgccatcctttggaataatgaacacagcccccagagccaggcagtgattattaaccctattttgcaggagaacaaacaggtcctggggccagccggggcagtctgcgggccgggaagcctgggattcgaactcccctccaacatctgcagttgtcccagcgcccccgcgtggcgaggctgggtgggagaactacatttcccagcaggcctcgcgaggccgcgcatgctcaatgggccagggctctgcgcggatagaggagcgggcgccgggaccgggaatccccgagctgcgccttctggggacgcggcccgggctacgtcggggccgtccgtggggagcggggtcctggaggctgcgcggggctgaggcggcctcgatttgggaagtgagtgtcctcgaggtgcagagcgcagtctgagtcggcgcttgaggtcttcggtctgaggggggactagggtctgggcttggggctgggtcctgaagtcggggtctgagtctggagtcgatcttggggtagcattggaggtttggagactggggtccgccttatggcgtcttgggtctctggtattaagtccagggtcctgggtctaaagttctggatggaggtattgggggttgaggtcatgggactggggtcttgggtctggggtcttggggaactgcctctgaccagtcggtagagtcagggtgtgaggtctgggtctccagcctgggttccgcgtcttgagggaggaggacctggaagaaccagggctggagtgaacagactccattagttgagagaggtctgggatgacacaggggctcgggaagccactgcctcacacctccccattctgtggctcagtttcttcatctgtaaaatgggaatcctaacttccttgcaagggttagtgggtattaaattatgtgccctgtatgaacagtacccagctagagcctagcaccggataggcagccgggaaacctcaagttttttgtttttcgggtttgtttgttttttttaagacagggcctcactctgtcacccaggctggagtgcagtggcacaatcaaggctcactgcagcctctgcctcccctggttcaggtgatcctcccacctcagcctcccaagtagctgggactacagcctacaccaccacccctagctagtttttttttttttttttggagatagtctcgtctgtcgcccaccttggagtgcaatggcgcgatctcagctcactgcaacctccgcctcccgggttcaggcgattctcctgcctcagcctcttgcgtagctgggattacag

SEQ ID NO: 8131 - DNA, 6000 bp, Homo sapiens
agtggatcacgcctgtaatcccagcactttaggaggccaaggcgggtggatcacctgaggtcaggagttcgacaccagcctggccaacgtggtgaaaccctgtctctactaagaatacaaaaatttactgggcgtggtggcgggtgcctgtaatcccagctactctggaggttgaggcaggagaatagcttgaacccaggtagtggaggttgtagtgagcagagatcgtgccattgcactgcagcctcggggacaagagtgagactccatctaaaaaaaaatacacacacacaaaaaagccactggctgggcacggtggctcacgcctagtaatcccggcactttgggaggcggaggcgggtggatcacgaggtcaggagatcgagaccatcctggctaacacggtgaaaccccgtctctactaaaaatacaaaaaattagccaggtgtggtggtgggcacctgtagtcccagctactcaggaggctgaggcaggagaatggcttgaacctgggaggcggagcttgcagtgagccgagatggcgccactgcactccagcctgggcaacagagcgagactccgtctctgtctaaaaaaaaaaaaaaaaaaaaaagccagaaaagcacaattatcatagtgagttgttgttgtgtgtgtgtgtgtgtgtgtgtgtgtgtgtgttttgacaaggtctcactctaccactcaggctggagtgcttgtcatgatcatggctcactgtagtcttgacctcctgggctcaagcaatcctcccacctcagccttccaagtagctggaactacaggtgcgcacaaccacacccagctagtttttatattttttgtagagatggggttttgctatgttgcccttgctagaatacagtctttttttttttttttttttttttgagacagaggtcttgcttgttgcccaggctggagtgcagtggcgagatctcagctcactgcaagctctgcctcctgcattcaagctgttctcctgcctgagccttccgagtagctaggattacaggcgtgtgccaccacccccggctaattttgtatttttagtagagatgggttttagccatgttggccaggctggtctcgaactcctgacctcagtgatccgcccgccttggcctcccaaaatgctgggattacaggcgtgagccacctcgcccggcctagaatacattcttaatgttgtgagttttaatatatctacttttaatgtttcaatatggtttcaacagcattctgagagaaataaccattaaaatacataaaatcaggacagggatagtggctcagccttgtaatcctagcactttgggaacccaagtcgggaggattactcgagcgcaggagtttgagaccagcttgggagagatagcgagaccccatctctactaaaaatttttttaaaaattagccaggcatagtggcacccacctgtggtcccatctacacgggaggcttgcggtgggaggatcccttgatcccaggaggtcgaggctgcagtgagctgtgattgcaccaccgcactccagcctgggtgacagtgagaccctgtctcaaaaacacccaaaaacccctcaaaacacataaaaacaggcacagagaggtacacattttagactccaatagaatttggcaaatctctacgaaaacttgcctcaatggaaacttttgacaatttgttcatgatggagttatttaccagtaattattttatttttatttgtttaaatttatttatttatttatttatttatttatttatttatttagagacagagtctcactgtcgcccagtctggagtgcagtggcgcgatctccactcagtgcaagctccgcctcccgggttcatgccattctcctgcctcagcctcccgagtagctgggactacaggcgcctgctaccacgcccggctaattttttgtatttttagtagagacggagtttcaccgtgttagccaggatggtctcgatctcctgatctcgtgatccgcccgtgttggcctcccaaagtgctgggattacaggcgtgagccaccgctcccggccaaccaataattaaattttctttcttttttttttttttttgagagggagtctcgctctgtcgcccagtctggagtgcagtggcgcgatctcggctcactgcaagctccgcctcccgggttcacgccattctcctgcctcagcctctcgagtagctgggactaatttttttgtatttttagtacagacggggtttcaccatgttagccaggatggtctcgatctcctgacctcgtgatccgccctcctcagcctcccaaagtgctgggattacaggcgtgagccactgcgcccggctaatttttaaaagaatattatggtggggtgcagtggctcacgcctgtaatcccagcactttgggaggcggaggcgggcgtatcacttgagctcggaagttcaagaccagcctggccaacatggtggaatcccatctctacgaaaaatacaaaaattagcctggcatagtggctcatgtttgtaatcccagctactagggaggctgaggcacgagaatagcttgaacctgggaggtggaggttgcagtaagtcaagattgtgccactgtactccagcgacaacagagagagaaaaaaagatgtattgaaatattatttatcttgattattgagttttttggcaccaccttaatttttgcacctggtgccagtgccttacaatgctttagtctcctcaccctaatcccagccccgcaggagtgagggtgtgcagaattttacagcagtctgattctaaattcttgccatcatcttcccacctcttctactgtctctttaagaaaataaagaggcctggcgtggtggcacatgcctgtaatcccagcactctgggagactcaggcgggcggatctcttgaggtcaggagttcgagaccagccatgaccaatatggcgaaactccatctttagtaaaaatacaaaatatagtcaggcgtggtggcgggtgcctgtaatccccgctacttgggaggctgaggcaggagaatcgcttgaatccgggaggcggaggttgtagtgagctgagattgcgctactacattctagcctgggcaacaggagcaaaactccatcggaaggtaaacacatacacacacagtttttcttttcagaaagctcttttacagtgtagttggggtcgggcgcggtggctcatgcctgtaatcccagtactttgggaggctgcaggcgggcgaatcacgttgaggtcaggagctggaaagcagcctgggcaacatagtgcaggccctctagtctctacaaaaaatacaaaagttagctgggagtggttgcacacgcctgtagtcccagctataaggcaccgtctctacaaacgcattttttaaaattcagccaggcgtggtggtccacacctgtggtccaagctacccaggaggctgaggtgggaggatcgcttgagcccaggaggtggaggctgcagggagggatgatcgtaccactgcactcgagcctaggcgacagaacgagactctctctaaaaaatacaaaaaacaaaacacacaaaaaagtagtttgatctaaagcaaaatggtgaatatctgcagaaactaatgtgatatcaagtatagattgatatctatgagatgaaaagcttcatttgaccccggatgggtttgtgggccgtttgacgtgcattgttttaatggaaggtggatttatgataaagtgataaacatgtgtgtgggtgggtgggtgtgttggaaagggtgtttattggatttctttttgtcttccttattttccttctttcggtctctactgtatcaaatacaataacagatattcaggaagagcggatattgctttagctgactgtagccagtgtttctttggtgggacaacgcaactatcactgcaacattatctctataggagaatttaaagaaccctgacgcctaccggtttccgtagtgtagcggttatcacattcgcctcacacgcgaaaggtccccggttcgatcccgggcggaaacaggtcagctgtttttcctaaccggagagtaatactatttgaaattcaccgaaagaacgattctagtcccattctttctcttccgccttcctcctgccttttagacatttttatgggatttaaaaaaattttccgtgattgatggctcacgcctgtaatcccagcactttgaaaggccgaagagggcggatcacctgaagtcagagttcgagaccagcctggccaaaatggtgaaccgcccccccccccccaccccgccccaccccgccccaccccaccccatctctactaaaaatacaaaaattagatgggcgtggtggcgtgcgcttgtaatcacagctacttgggaggctgaggcaggagaatcgtttgaacctgggaggtggtggttgcagtgagcggagatcacgccactgcactccagcctgggggaccgagcgagactccgtctcaaaactaaaatgaaaatttcaaactcgcaaaagtggtaccgcatgcgttggccgggaatcgaacccgggtcaactgcttggaaggcagctatgctaaccactataccaccaacgccctgataggtagcatcctctccggatatccttaatagtgggggatcatgggtttgactgagtgataccaagtcacaggggggtgtctctccctaacccaccggaagatgtcgttcatggggcgttacgcaccttaggccgccgcgccgcgggctcccccccaagcgccgcggacgccttggtacgtgcctggtggtgtccaatcccaggccgccgcctgggtcgctcaacttccgggtcaaaggtgcctgagccggcgggtcccctgtgtccgccgcggctgtcgtcccccgctcccgccacttccggggtcgcagtcccgggcatggagccgcgaccgtgaggcgccgctggacccgggacgacctgcccagtccggccgccgccccacgtcccggtgagcagcgcccgcgcgcctcgtcccgccccggccgcgaccctgaacccgccattgaccggccccgcctcggccctgaccctgccctcgccatcgcctggcctccccgcaccccggagcctccatgcacccgtctgtgggtccctccggccccctgcctcgtttcctctccgccccaggccctcctccaccttctttccctccccgattcctgcgctggccaggccacctcccagtttctccccttccctgatgggcttccccacccatcccgttgctgcccaggccaccaggctctgaccccttccggaggtggccgcacccaagaacgtcctcgtagctgcagaccttgacaccctctcccctttcgtgcaggctctggaggtcccgatctcctccctctccccatgcaaatgctgtatatgcacagaggccacctccctcgacctgcatcctgtcctcactcctttaccacttcctccaaccttcgccccgaggcttggtctccccaatccagtcctgatcctcaaccctacttgatccctctattaagggtatccagagactctttttcctgccgaggcgttggtggtgtagtggttagcatagctgtcttccaagggtccagcccacagggttcagcccccttctctcagcctcccttctcaggcctgtccaaccgcctaccttcttcccacacagccttaggccagccctgacacttccctgttcacgctgcctctgagccatcaaaagtggtctattcccttggcccccaccccctggtcttccccaggggccccaggaggaagtcacttgcctcccaggcaagaaccaacctgctttcgaggagctgggactaaagcccagggggtgtggaccgtaggcaccaatccctgcattcctctgctgggtcccaggggaatcggggcccgtgggatggcttctctcccagatt

SEQ ID NO: 8132 - DNA, 6000 bp, Homo sapiens
agagggtgacaggaacccatggctgtccaagttcctgtctaattggctgtccaagtgccaattagaaaaacccaatggccagatggcaagatccaacgccctgcctccctgcttcctgtcatggagaatgacctgtgcccagtgccagaccctgagtccccagttcatccattttgccacaatagatccttgagaagcggatcctgatgtctcttcaatgatggcccacaattctgaccactgcaccatagacagtgcactcttcttaacattaaccacagtgctgaccttgaagctgatatcagtgcaactaggatgctgagtgtgactttgaccttagtatgactcaatcataattttgaccatagcttggccaggtcattatccacagcaagctcaggacaaggaccatagcactaggacagagcacagcataaccaggaaactgactgtagtactaatcaccacactgaccacaacacaaccaagaatgaccaggagtgaccacaattctgaccacaatgctgaccctggcagaaccaggatgttgacggcagcacagatcccggttcaacaggacacaaaccacaatgccatcaggacacccagagggccactaaccataccagtcaacgaccaacggcatcgaatgcattgactaaggtccagtcagaaaaacagcccatcccagcaaattcaatagaaagaatttaatatggggactttaattagccacacactgaggtattaggtaggtaggtttgtttgtttgtttgcttttgtggggttttttgagacagggtctcactctgttgcccaggctggagtgcagtggagtaatcatagctcactgcagtctcgaccttctcaggctcagatgatcgtcccacctcagcctcctgagtagctgagactacaggtgtgcaccaccatgcctggctcatttttgtatttttggtagagatgcagcatctctacagagatgttggccaggctggtcttgaactccttggctcaaacaatccacctgcctcagcctcccaaagtgttgggattagaagtgttagccatggcactcagccgataggtaggttttgtttttgtttttttcttttttgagacagagtttcactattgttgcccaggctggagtgcaatggcatgatctcagctcactgcaatctctacctcctgggttcaagcgattcttctgcctcagcctcctcagtagctggcattacagacacctgctaccatgcctggctaattttttgtatttttagtagagacagcattttgccttgttgggcaggctggtctcaaacacctgacctcaggtgatccacccacttcagcctcccaaagtgctgggattacaggtatgagccaccgcacctggccctattaggttggttttaagcgcaaactggagcaggtgaatcaactctagttgctagctatcatctttgcaaggactgaaacaacaaagggaggtggtagttacctgaatccaggagctgcagttacctggccagtcacctgcccccaccccccaccatggtggggaatacctaatgggactgagaccacagaggaggcacagcagccatggctagagacactcaaagtggagggggggaaattctctggcttctcctttcttggcaccctccaatctgcctgtagacctcccattggctgagcctaaccagatgcaaagaagcctgggaaatgtagtgtgtagagaacctgagaaagataatttgcaggagccattgccctgatacagaggggagcagggggaaagtggggaatagatctaagtgcatatcgaccaaattccaaccatataacacaggctgtagcttagttgtaactgtgatcgtcttagtgaccagagcccaaggaggacactgttcatggtcctgaaatgcagcattcatgagtcaagagtgctgactcttgaccgtgagacccactcttggtcaagagcttgtgggtcctaccaaccaatgtcctccttttatgcaatgccaactgcaggcttggcctgaagggcccacaaaggactgtctcccatttgggaaaaggagatagaagaataggatgggtgcggtggctcatgcctgtaatcccagcactttgggaggctgaggcaggtggatcacctgaggtcaagagttcatgaccagcctggccaatatggtgaaaccccatctctactaaaaatatgaaaaattagacaggcctggtggcaggcacctgcaatcccagctacttggaaggccgaggcgggagaattccttgaacccggaaggcagaggttgtaagccgagatcaagccactgcactccagcctgggtgtgacagtgtgagactccatctcaaaaaaaaaaaaaaaaaaaagagatagaagaataaacaggatgtcttcgcaggctcagactctattttgtgtccacatcccatgatgagtgtcctcaacccagtgcatggttggttattgcaaggcgtgctggggagtgagtgctagctaggtgctctctttgcttagagtcacagatgtctcccaataactgcaaaaaacaggtcttctaagagggggaaagctttttccctaaggtcacatggccaagaagtggcagcaccagggttgaacccagatctgtgggtcaccaagctctttctcattgacctgacaaaaccatcatcgacatgttttatccccagtagggttgagacaggaatgatccagggtggtcacaggcagccgtttcacatgactagaggctatgggctgataagatcctgaaaaccagggtgtggaccaagctggctaagacctactggacccaacatggcgttacattctacctaggtttcacctaggatctcattatgtactcattaaaatactaaaattacccacccaccagcgcccttgacaattccagggacacccaaatttggtgtaaaagtgggtggcaccacagtccacctttttccagttttcatgaatattccatcccttggttaaagagatacacagtggcctgttgtggtggctcacgcctgtaatctcagcactttgggaggccaaggcgggtggatcacgaggtcaggagtttgagaccaggctggccaatatggtgaaaccctgtctctactaaaaacacaaaaaattagccggctgtgatggcgcacacctgtaatcccagctactcaggaggctgaggcaggagaattgcttgaacctgggaggcagaggttgcagtgagccgagatcacaccactgcactccagcctgggtgacagagcgagactttgtctcaaaaaaaaaaaaaaaaaaaaaaaaaaagagacacataaaggtagcagtcccaaaccaccttgcccatctctctctcttaagtacgcccactcccttttctcaagtgtggacttttcccttaacaaaaaaatctccgaacttttcatgattttctgattcctccttgaattcattcttgcgatggtgttaagagcctggacaccagctggggtcgaggccccaccagcgtctggggagacccctcctagcccaacagtatcagggtcacaaaaatgccaggcttcctggcctcgcatattttatgcccgatttctttccaatctgacttatttgcccgcccccctcctccacctctgcctacatatatccgaatccctagaggggctgtggggaggaaagacgactagggacactttttttttttttttttttttgagacaaggtttgctcctgttgcccaggctggagtgcaatggcacgatctctgctcactgcaacctctgcctcccgggttcaagcgattctcctgtctcagcctcccgagtagctgggattccaggcatgcaccaccacgcccggctaatttttgtatgttttagtagaggtggggttttgccatgttggccaggctggtcttgaactcctgacctcagatgatccaccctcctcagcctcccaaattgctggaattacaggcgtgagccaccgcgcccggcctagggagacttttggaggagtgagaggcagagaaaggctggaaagcctcccgaaagtgaggctagacaaggacgcccttcatatgcaaatggcttcgcgtggaggcggtgttaatattttgattctctcgggggatgtggtctttcatcttgggctattgaaacagggagcgaagagaaactcttccaggtgtggcggaggcggggaggcttccagcgggaggactggtggggaaatggggcgcccggggagagtgaaaacgagacgcccctttttgaggccaagcccacccacgtggccatttccattggcctcttgcctgattctcggtctcctgtccccccaacctcaattttttcctcttattccccgtctccatctatgcctcacccctcttgtcctggcattgacccctcctccaacttccaatttcagattctgcctcagtttccctgttgactcttgagtttttagggagggggcgttcatcatttcccctctctgctaccaggccttcctcctattcctctcccccaaccattcgtccccgtcccacctgcaacgtgggaaatgcccccggagggtgaaatttacaaacacgtgacgggcacccctcccccacctccgcgacccgctcccggaatggcctgggggttggggggcgctgccaagtcctgtcctcaggtcccctcgccggcgctggctcccccacttccccgcccccacccccccacccgaccctgctcgagctgctcccgaagaggagctgggggcggggcggggggcggagcccgcaacaaagactcggagcgagcgagggggcgggggtggggcggaatcccggccgccggcgaggcgggggaggcggcggcgcagggtcgccccggccgggcgggcggggtcgcgcctggtggcggtccccgcgccgaggcgccgctagggcgggcgggggtcgggacgccgggctaggggcgcgtcatgtggccgctcacggtcccgccgccgctgctgctgctgctgtgctcaggcctggccggacaggtaggggcccggcgggcaggtgcgggcgcgggtggctccgggagaggaggggggcgcggagggttcccggagaaacggggttgggaggctccacaagcccccccagctgcagggcggcgaggggcgggggtcgcagcgggggaggggccgggacgtgcactctctggcttgggagaggacgaggggggcttcaaatccagcctcaagctgggctggtttggggggtggcgtctttggggttctcaacccctccatggccccgagcccccaccccgccatctcgctggagctgaatggggttgggagggaaacttcagggggcattggaggggggcggttgcttacccttgacttcctcttcggggccgagatgcccagtttctgaagccctccactcctcgcctgcagcccccagtgtggggcaggggacgggactcacgtgagagtgactgacggggacgcgtgtgaaatgctgtgggggtgcagggtaaacgtgtgtgtctttgtgtcgtggttgggtgtgaccggggggagtttgtgtgtgtggcggttggggggcttgtccaactagtgcccgagttggggtgtgatcagtacgtgagacagagtctgtgtgtgaccgtgtcctcattactggctccagatgactgggtgttgtacaatacgtgtgtggccaggtgtgtggccgtgtgagagccttggagtgagcgtgtgctattctgtacctttgggtaaatcactctaaaagggtgtgtgtgtgtgcaagcgctgtgtgtgcaaacgtgtccatccatgcacgtgtgtgtgtgtatcttggtgccttgctcacaaccgcacacgccattcatacccttacagaagcgggtctccctccccatggcacctttctcttgggcaggctcagggaggct

SEQ ID NO: 8133 - DNA, 6000 bp, Homo sapiens; identical to SEQ ID NO: 3307

SEQ ID NO: 8134 - DNA, 6000 bp, Homo sapiens
aggcaggaaaatcacttgaacccgggaggcggaggctgcagcaagccaagattgcgccattgcactccagcctgggcaacaagagcaaaactccagctcaaagaaaacaaacaaacacacaaaaaaaacagcccaagaaattatttatttttaacaacgagcatcctgagaaattgagctgcaaacatagataagcaagctggaagcttgcatgagaaaatgccagcagctgtgccaatagaaaagggctacctgagggccaggcatgttcaacatggagtctccatcttcccttttattatcacgtgtacagtaaaaaataaataaatagataaaaaataaacgggcatgatggtgcaggccaggcagagaacctacctacataatgaaagattaaggtggggggacttccagaaattcgcgccctatgcaaatggcacacctagtcctaaacagtttttgcgccctatgcaaatagcacacctggcccaaccaatctttcaagccctatgtaaatcagacactgcctgctcaccaagcatctataaaacgccctgcatttcacctcaaaaccagcaacctgttcaggacccctctctctgcagcagagacaggtattctttcacctgttaaactttcactcttggccaggcgcagtagctcacgcctgtaatcccagcactttggaaggccgaggcgggtgggtcatttgaggtcaggaggtcctggccagcgtggtgaaacctcatctctactaaaaatacaaaaaattagccaggtgtggtggcacacacctgtaatctcagctactcagaggctgaggcacgagaatcacttgaacccaggaggcagaggttgcagtgatctgagatcctgccattacactccagcctgggcaacagagcaagactccatctcaaaaaataagtaaataggccaggagggtgactcacacctgtaatcccagctacctgggaggctgagacaggaattacttgaacccaggaggtgaaggttgcagtgaaccgagattgtgccactgcactccggcctgggtgacagagcaagactccatctcaaaaaaataaataaataaatataaacttcctctcttaacctcactccttgtgtgtccacgtccttgatttcctccgctgtaagacaacgaatctcagttatcaccccagacaatggccctttcagtatcattccccccaggtccccagtgctcggtaaggctaggccaggctgaaccatttgagtcctggaagtttagaatggaatgggccacatgcctccacgcccaaccccagtcatccctggcttgaatcccttcagcctctggtgaaatgactggtcacagtagcctcctttgtttggctttctagcgccagactgtgacctggatgaaagaaacaatagtgagcatgtattgagcacctactggatgccaggcactaagcacttttgatgcaaccatctgattcttccaccttctctatttatttattcctgtgtttattcaacaaattatttattttattgtattgttctgtatttattttcagagacagggtcttgctctgttgaccaggctggagtgcagtggcatgatcattgctcactgcagcctcaacctcctgggctcaagcgatcctcccacttcagcctcccaagtagctgggactacaggtgcatgccaccagcccggctaatttttttatttttttgtagagacaggggtctccctatattgcccaggctggtctcaaagtcctgttctcaagtgatccttctgcctccgcctcccaaagccgtgtaattacagtcgttagccaccgcacccagtctattcaacaaatattttctaagcatctactgcacgccagttctgttctaggtgcagtaatatggcagtgaacaagacagacaaaattccctgcttcacagagctgagttgagagaagagaccaataataaacaaaataaataaggcaaatggatcgcagtttaaatggtgctaagtgcgaaggaggaaaataaaggtccagcatgatggctcacgcctgtaatcccagcactttgggaggccaaggcaggtggtttgcttgagcccaagaggttgagatcagcctgggcaacatggcaaaacctcatctctacaaaaatacaaatattagctgggcgtagtggcacgcacgtggaatcccagctactcgggaggctgaggcaggagggtcgcctgagcccaggaggcagaggctgcagtgagccgagatcatgacactgcactccagcctgggtaatagagcaagaccctgtcttgaaaaaataaaaaaataaagccaggaaaggggtggaatccatcaggaggaggggagccctcgctggctgggaacattatgagataggtattacaaacctcatcttacagatgagtaaactcagtctgcgagaaatgaagtcacttctgggggtcacacagggaaagtgagctagtactgtaatttgcctctctggactccctttgagctctgacctctgggtgagcagctgaagcacagagaaaggaagattaaggagacacgcccagaacacgtcagggttactggatgcagctgtgcaggctgtgcacggcacaactccagaagcaccattcatagagatcacaatgtgaatgctgcccccttgagtctagaagggcacaagaatcacagattaatgtggtggcctggagatagggacaggtcacacaggtagccctggaaagaaggtctcagctggacgcagtggttcaagcctgtaatccctgcactttgggaggccgaagcgggtggatcacctgaggtcaggagttcaagaccagcctagccaacatgatgaaactccgtctctactaaaaatacaaaaaaattatttgggaggccaaggcgggcggatcacaaggtcaggagatcaagactatcctggctaacacggtgaaaccccgtctctactaaaaatacaaaaaaagtagccgggcgtggtggcgggcgcttgtagtcccagctactcggcaggctgaggcaggagaatggcgtgaacccgggaggcggagcttgcagtgagccgagattgcgccactgcactccagcctgggcaacggagcaagactccgtctcaaaaaaaaaaaaaaaaaaattagctggccgtgatggcacccacctgtaatcccagctacttaggaggctaaggcaggagaatcgcttgaaaccagaaggcggaggttgcggtgagccgagatcacaccactgcactccagcctgggcaacaagagtgaaactctgtctcaaaaaaaaaaaaaaaaaagaaagaaaaagaaaagtctctattgccagttgtctattctcaatagcttgcttttttcacttaatatatcagcagccacttccccatgtcaacacataaagatctagttgagtaattctcccaaagctggtcactagaccagcaacatcacatcacctgggaatttttatagacagggtctcactctgttgcctaggctggagtgcagtgatgggatcacggctcactgcagcctggaactcctgggctcaagttatcctcctgcctcagcctcccgagtagctgggactacaagcgtgcaccaccacacccagcttttttttttttttttttttttgtagagatagagtctccctatattgcccaggctggtctcaaactcctgagttcaggcgatcctcccatctcagcttcccaaagctctgagattacaggtgtgagccactgccctggcccatatttttttttttccattagactgtttttctgttccattagactgtaagcttgaaagacaggaaccacgtctgcctttctgtctgaccactggacccagcataccatacagtagatgcctaatacatgctttgtcagactggggaaaaatatatattagatattaatattagatattaatatattttaaaattgtataaagattgcatatatatatataatttatttgaaatttcagctttaaataattgtttttgaccaggcacagtggcttacgcccataatcccaacactttgagaggctgaggcgggaggatccctggagcccaagagttcaaggttgcagtgagctatgattgtgccactgtgctccagcctgggcgacagaatgagaccctatctcaaaaaataataatataataataactgtatttatgaataacttttatttaaattaaatttatcaaaatctttcttggacaggcactgtggctcatgcccgtaatcccagcaatttgggaggctgaggcgggggaatcacttgaggtcaggggttcgagaccagcctggccaactggcgaaaccccgtctctactaaaaatacaaaaattagctgggggtggtggcgggcgcctgtaatcccagctactcaggaggctgaggcaagagaatttgagcccaggaggtggaggctgcagtgagccgagatcgcgccaatacactccagtctgggcgacaggtactgtgtctccaaaaacaaaaaattcttaaagtgactttatgcaaaattacatacattaacgatataatagatatcgtgccttttttaagagaaatttgaatgttttcaaagaaaaaactttttggaaaatgatatgaaaaataattttaatatgtgctttagcctcgggctaccagaagagccccagatagggtcgagggaggcctcagtcccacaccgtccccttctgccccgcccagatggatttccaggctcagggaagtcccctctcgggtccaaccatatcctgcgaagagacacagcacctgtcccgcctccgcctgtccgcgaggtgacgccaggcggaccggagcgatcctctggagtccttcatctctatgatctccgcagctgcctaaatgacccggaagctgtgtctgactgaggggtcagtggttccgggtaggagctaggtgaccctcggctgctgcagggatctgcagcgactgcagccatgggggcccacctggtccggcgctacctgggcgatgcctcggtggagcccgaccccctgcagatgccaaccttcccgccagactacggcttccccgaacgcaaggagcgcggtgaggcccagtgcgcaggcgcagccagagggcgtggggcgcgggtgcctgaacacctggcaccccagggctggcaccccagggctgggctctaacctcaggtgttgtatctgggtttgggtctagactaggagtccacaggacgtgcatgaccccacctcagtgtggaggcgttccagcccaagggcacggcttgagcaaaagccagggagcaaaagtgaggcgacaagtgggggttcgggcaggaatgcgacgcgcagagctgggtcgagtcttttttttttttcttttgagacggagtctcgctttttctttcaggctggagtgcagtggcttggtctcgattcactggcagcctccacctcccgggttcaagcgattctcctgcctcagcctcgcgagtagctgtgattacagatgtgtaccaccatgcccagctacttttttgtattgttagtagagacggggtttctccttgttggccaggctgctcttgaactcctgacctcaagtgatccgcccgcctcggcctccccaagtgctgggatcgcagaagtcagtcaccacgcccggcctcgggccaagtcttgggggacgtggggagtcatgggagggcagggacacgttcattgtacccccttcctgatgtcactgcaattgtggggtatgcacaaggaaataaggaagattcgagctgcaaatactgtcctgcaaagtgctttgttttgctttgagacgggatcttgctctgttgcccaggctgagtgtagtggcacaatcacagctcattgcatcctcgacctcctgggctcaaatgatcctcccgcctcagcctcccgagtagctggg

SEQ ID NO: 8135 - DNA, 6000 bp, Homo sapiens
gtgtctcagacccatgccccccacccttgcccctcggtgtgcccactggacaagcagcatatcaggtctgtgcctctgggtgggggggggtgggggtctctgcttcagcagcgggccccgcccaggctggagtccagtggactcactgcggggcttctccgcttgtgaaataggggcgggtgggcgctggggacgtggcctcaaaggcgggatgcgttgggttccttgcggcgccggcttgtgcccacagcttggggccgacattcatcctggggagatagagacagggctcctctgccgccctggtgccggggtgccccagggatgtggccccatgtgccaaatcacagtcactcgggttggcaggcgacggagggctctctgcctcttctgggggtgctgagacccctgtaccctcgactccccacctccagggatctcacccccaggtgcccatctcctctgtggggggcctgagccaccactgaccccacattaaggccactgacgtccccgtcctaggccagccagcccctgagaagcacccagtgctttgctgtgggacacaaagccacacatggctattcacgttatttcattaagttacataaaactggaggtccagggcctcagtcaccatggggagaggtcctcagtcgccatggggagaggtccgggtcctcagtcgccgtggggagaggtctggggcctcagtcactgtggtggacagcgattggtgggggcagggacatttcctttgtcttggaaagttctggacgctggtggtgtctggacactggagaacgggtctgtgttcaggccccagacctgaaggtgggatgagggagagaggaaggaggaggaaggggaggagggaggggacagagtgggaaggagaaggatgtgaatggagaggaaggatgggaggaggaaggaaggaaggagggaaggggaggaggaggaaggagaggagggtgcagaggatgggggaaggaggggggaggagggtgtgaaggggaaggagggaggagggagcggaggactgagaaggggaggaaggtgtaaaaggagagggagagaggaaggaagggagggggtattaagggggaagagagtgggaagggggaggagggaggggagggtagtatgaagggggaaggaaggagggaggggagaagggtgggaaggggaggaaggagagagggagggaggggaaggtgtgaagggaaggagggaggggaggtgggagggaagtagggagggggagggaggggaaaggtgtgaagggaaggagggaggggaggagggagggaggagggtgtgaagggaggagggggaggagggtgggaggggaggagggagggaggagggtgtgaaggtgtgaagggaggagggagggaggggaggagggagggaggagggtgtgaagggaggagggagggaggagggtgtgaagggaggagggagggaggggaggagggagggaggagagtgtgaagagaggagaatgggaaggatgggagctggggaggagggaggagggtgagctgggaatggggctgtgtgcctgctcttttccaccactggctgcaggggttgcaggaatcttgggtccatggctggatgggggtggggattttcatgttacccactggagaaagggatacatttttattttcaaggacagcgacccagcccaggggaaacgcccctggcccctggggctaagcgcagaccccagctccgtgcttcgcaggtggggggcgatggacagcggtggggctcccgccctgagtggagcctgtgacctgcccgggccccagcgccccgtgacccctgccgcctgatccttgcctggctgagatggggcttctgaaggctgccggcaccagggcaggcagcgcattgggtccaatttattctgtaatgagaaattctccccgcatatttttagcttcctcctggcgtcgcggcctttgaaggctgaggggctgcgggacgctgatcccaagccctgtggcctggccatgtgggcagtgggtgctgggcacgggctggacaagtcccttcctgagtctgggtagaccccagtcccagcagtgcagagcagggggcggggccagaccccatcaagccctgtactggctccagaccagggactgagggcgaccctggataacccctgaccttggcggacacctgttcccagagtgagcctgatttctgacccttggctccacaggaagcttactctagagtgacctccggccgcggctgcgtcccaaagccgggacagctcccagccccaggagggaacagggcttcttggacccccacagtggcccccctgccaggcaggggtttgccggggcagcctcgcccagggccaggcctcggagacgccctgccctcccctcccttccccaggtccttcctctaggagcggccagcgggcgcggggaggttgaatgggggacgcaccgcctttgttcccgtccctgcttgggctctgaccttgagagagacaagaacagaaggaaaacggagcttctgctcaaatccgttcagcggtggcggtggtggcggctctcgcctcggtggcccctgcatgcaaatgagtggccctgccatgcctgggtggaggtggtgcccttccagctcccacctgtgcaggtcccagtcctggtttgagaagagaccccctcctcccgaccctggcccacccctcctcacccacgagatcccttgaagcaggagggggcttctggtcccagggtagaaggaagcttccagaactcccacctttgccaggtggcatgctggggccgggcacgccaagaccccaggctcacggccccttgtcctgtgcttgggtgcagccgccacactctgctccgaaagtgctcacctccgggagtggccgtccccctccctaaaagagccccccaccagacggagccgcccgggaagcttctccagcctgtctgggctacagagccttgtgtggctagaacccaaggccctcactccaggggtgctgagagagcctgtccagagggcctgcctcagccaccacctgggacaggttcacgccctccactgaagagacacccggccagccctgggccttcgacctgggacgtctgtagtggggtcaggggatgagacctggagctcagaacagacgggctgagctccctggaggagagagaactgagaaccttgtcctggcagggacgctagagcactgggtgggacagacctttctggaagagcaagattttaacaggaagaaaaagtggaaggacttcccagcaggacccagcctgaacaaaggtcaggtggtgtggcccgcgtggcccgctggggaatcgggggaggagggcacgcaggagacacaggacagagcccaccacgtctcagagctgtgggacggtggtgggtccggtccccaccccaccttgctggggcacaggttagcttgcccatctctgggttcacggtccctgccaggagtttgggtaatgcctcacacagggaccttcgggtccaagggctgttggtgcttgccctgcagttccctctcctgcactgggcctggtgaatgacactaattcagagacgtacaacacgatctgggcatcgccagcaaagtccagccagcgtttgatgacagcctaccctccacaagctcagagtctggtgagggaggctgtggcatgaataagggcaaaaacagagggcaggccaggtgcagtggctcacgcctgtaatcctagcactttgggaagcccaggtgggaagatcgcctgagcccaggagttcaagaccagcgtggccaacatggccagacactgtctctatagattggaaaaaagacaaagcagaggccaggcccccagttccccacctgtgtcagcctaccaggaggagaaatcactcggcgttccctgaacagatcagaccccgggtctttgcacaagctgtgcccccgggcagcggccctcccctgcctgcaggattcgtgcgtggagactgatttgctgtcggccggggcttcactctgggcttcttggatcccatccccagctgctcacactccacatcggtccacctactatgctcccggcacccttagggctgaggtgtagggacttactccatccccagggaacagcgtgggtccggagaggcgactcccaggagggccccagggaggtcgcagcccgagcagctttggactttggccagcgcccctctgaaactctgccccggcccccgcagggagactggagttggccgagcccgatttgggacgcgtgcgtcggggttggtgaggctgcggatagcgctggaaccgggcaggtgagaggcccgggacccagggccgggccgggtggagcgcgtgggggcgcgggaggcagggtgcgcccccgcccctcggagaccccaggccgggccacgcggatgccggcggggggcgcgcagaatcggggtcgctgggggcaggccccgggggacgagcctgagacggggtgggccggggcagggggcgggcgcaggctggagacccccgcccagtccccgcgcggccggggcacggcgggagggggcgcccgcggccctcccgacgctcgggcgggacaaaggccggagcccgggcccctccccggcgggtgcggcggcggcggcccgcgctccgacagtccgcgcggccgggtcctgcgcccggggcgaccccggcgccccgccccgccgccgcctgacttctcggcgcccgaggtcgcgcgcgcggaggcgggggcggcccgggatctccaagcgccgccgcgccctcctcccgcccgccctccgcccgcccgctcggcggcggcggcggcggcggaggaggcggagaaggctggcaggcggcggccgggagagcgagcgcggcggccggaccggggccatggcgcccgcgcagcgcccgctgctcccgctgctgctcctgctgttaccgctgccgccgccgcccttcgcgcgcgccgaggacgccgcccgcgccaactcggaccgctacgccgtctactggaaccgcagcaaccccaggtgagcgcggccgcgcgcggggggcgcccggggaccccccaacgccccccaagccgcgcccggcctcgcgcccccggagctccgggcgccccccacgcgcgcgccgccgccgggatgcgggcgcccggttcccgcgggagccccccagggagctccggccccccggagtttgggggactcgcccttttcgcgcctgccttccccggggcgccccattgccctacggactgtggggactcgcgccccacatcccccagagcgccgacgtctcctggagtttggggaacccctctggtaccctccgatgccgggtagcccctgagttgcctgcctggacttggggggacccctgatccacccgcttctctggggagccccctcggtttcgcatttggtggggatccccggggaccttggcaccggaggtgggggactgtggccctcgagggatctctgggttcgtcctgcccgcaggtccccagatgaacttggggaagttggagtgtccctccctcaggacccagcatctgcttcactccagggggccaagggcccagctttgaaaggagactgaggggccggggagctgggggtcagccccgggaggggcagtgggatggagtcctctcttgtcctctgggcgctgaccaggaaactgaggtgcagaggggatgaggagctggctcaaggtcatgcaagggggggacttgggggcaggacccaggtggcccagtgccctgcctgccacgcccggccgagatgccgcacccgcctgctgcaggcccccttgttttgaaccaggtccgggccaggcacaacgtgggggacaggagaagcccccgttggtcagagcaaaaaaagtttgccggggcctggccatggcctggacgtgggtagaaccctctgaaccat

SEQ ID NO: 8136 - DNA, 6000 bp, Homo sapiens; identical to SEQ ID NO: 3305

SEQ ID NO: 8137 - DNA, 6000 bp, Homo sapiens
aatcccagctactggtgaggctgaggcaggagaattggttgagcctggaaggcggaggttgcggtgagccgagattgggccactgcactccagtctgggcgagagactgagaccctgtcaaaaaaaaaaaaaaaaaaaaaaaaaaaaaggaaggagggaaggaaggaaagaaaagagttcaaatccacttttggccaggcgaggtggctcacacccagcactttgggaggctgatgtgggaggattgcctgaggctggagtttgagaccagcctgggcagcatggtgagaccctatctctacaaaaagaaaaaaataaaagaagtaaatccagcttttgtcctggactcgctgtgtgaccttcacctgtcagagcctcagtctcctcatttctagcagattcgttcattccacaaacactgagcgccttcagaactgtggctgagaatgctgtagaccaagtttgtccaacccgtggcccaggatggcattgaattcggcccaacacaaattcgtaaactttcttaaaacaatgagattcttttttttttccctctcattagctattgttagtgttagtgtattttatgtgtggcccaagacaattcttcgcctttcagtgtggcccagggatgccaaaagattgcacacccttgccatagacacattccctgctgccctgaaattgtcagactagagggtgaagcagaaatagcaagtaaagggctgggtgcggtggctcaggcctgtaatcccagcactttgggaggccaaggcaggtggattacttgaggccaggagttcgagaccagcctggccaaaacctggcaaaaccctgtctctactaaaaatacaaaaattagctgggcgcacgcctgcaatcccagctacttgggaggctgaggtgggaggaggattgcatgaacccaggaggcggaggttgcagtgagccgagattgcgccacttcactccagcctgggtgacaaagccagactccgtctcaaaaaaaaaaaaagaaatagcaagtaaagctgtatgataattcaagatggtcacacataggatatgaaaaaaagagggatcctgaggtcagggaaggcctctctgaggaggtgacatttgaacaaagacccaaataaaatgagggaggtaagggccgggcgcagtggctcacacctgtaatcccagcactttgggaggccgaggcaggtggatcacgaggtcacgagttcaagaccagtctggccaggatgttgaaactccatctctactaaaaatacaaaaattagctgggcgcagtggcaagtgcctgtaatcccagctactcaggaggctgaggcaggagaactgcttgaacccaggaagtggaggttgcagtgagccaagaccgtgccagtgcacttcagcctgggtgacagagcaagactccgtctaacaaaaaacaaaagagggaggttgctacatgggtgtctgatggaagagggtgccaaccagagggaagagccagtgcagaggtcctgtggtgggagtgtgtctgatacgttggaggcaagtgtgtctgaggcagagtgagcgaggaggcagtggaaaaaaaggagggagcgaggtgacaggcagctcatgtaagggctcatagaccattaggccatgatcaaggttggctttaggcctcagtttacatctggcttcctaggacgggacaagcatcattgggctggaaggaaactcatccataaagggcttgtgtagcctcatggctaaaattcctgtctctgaagccagacagctgggtccataatccagctctgatctttctagattgggagaccctagccaagtcactcctctctgggccttggcttccccgtctctgaaatgggcctagtaaaaaccgtattcccaagggctgatctgacgaactggcaaaacaattcagggaagctaagggcattgaaaccttggtcggtgaacaaaaatgcatttctgggacaggtatagtggctcatgcccaacacactttgggaggctgagagggaggcggatcacttgagcctgggaggtggaggttgcagtgagccaatatcatgtcacttgcactgcagtctgggtgacagagtgagaccctgtcaaaaaaaaaaaaaaaaaaagaatatcacctggtgggtgtctggtgggtactttgtgaggattaaatgagatcataagaccaagtgtggtggctcacgcctgtaatcccagcactttgggaggccaaggcgggcagatcacttgagtccaggagctcaagaccagcctgggcaacataggaaaaccccatctctagaaaaagtacaaaaaattagtcaggcatggtggcgcacatgctactcagctacttagctgctcaggaagctgaggttgaaggatcacttgaccgcaggaagttgagactgcagtgagctatgatcgtgccactgtactccagcctcgatgacagagtgagatcctgtctcgagagagagagagagagagagagagagagagagagatattgagagagagagagagagagagatcatagctagaggcactggatgcacaggaagctttctaaagggttagttgctatcatcaccatcatcgtcattatcatcatcatctataccctctagctagtatagtgatttgcatattataagccttcagtaaatatttgtcaaatactgataataactgtagctcatattgagtgcttactaggttcagacacttttctgagctttttatgtgtccatccatggggtgagtggtagtattatacccattttacaactggggaaactgaggctcaatgaaatgaagtgactagcccgagatcaaatggctaagaagtgccagaggccacacgcaagcccaggcttcctcactctgggccccatggcatcagagccaacactagagaaggaaggatatttcacagaggtggactcgaaaatagagattcactgttgggcgcagtggctcacacgggtggatcacttgaggccaggaattcgagaccaacctggccaacatggtgaaaccccatttctactaaaaatacaagaaaaatttgccaggtattgtggcacatgcctgtaatcccagctacttgggaggctgaggcacgagaatcctttgaacctagcaagcagaggttgcggtgagccaagatcgtgccactgcactccagtctgggtgacagtgagagactgatgaaaaagaaagaaagaaagagagaaagggggaaagggaggaaggagaaaggaaaggaaaggaaaggaaggaagaaatgaaggaaggaaggaaggaaaataaggaaaggaaggagaaaaggaaaagaaagaaagagagggacggaggggaaaggaaaggaaaggaaagaaggaaggaaggaagaaagaaagaaagaaagaaagagaggaaggaaagaaagaaaagaaaatagagattcaccctcttttctcttttttttcgtgagacagggtctcactgtctcaagatggtttagtggcaccttcataactcactgcaacctcaacctcttggctcaggtgatcttcccacctcagcctccaaagtagctgggaccacaggctcatcccactatgccctgctaatttttgtcatcttttgtagagatgggatctcgccatgtcacctgggctggtctcgaactcctgggctcaagtgatccgcccaccttcacctcccaaagtgctgggattacaggcatgagccaccacacctgccttctaggggtgtcttaagagttgtaagacacatctcagaagctgtgggtggcattctaggttgtccccaaggactgtggggtgcatcttgggattctgttctagggtgtgagactgtcttaggagctggagaggaatctagttgtgtccctggggtctattggggcaccccagattttgctggcatctccatggttactagggcatcccctgagtctgaaggcattcccgaggttgtcttggggtctcagcacttgtgggggcatctcagagatgctgtagaaccattcagggattaagggacatctgagggactgtggaggtgttcctggggtctgtggagaactctaggatttggtgggaacctatattcggtctatgaaaatggctctgtgggtgtgggggattctgggggtactgagggagggtctatgcatgatgggatgatgagagttggggatgatggggagctctggaggaattttgggacatctgaggaactgtggtgggggttctgggatctgaagggttttccctgggctctcagagcaccactggcagggagtttgtgggagtgcccccagagatttgggggcatccctggcatttgtggatgcaccctgggattctcagggcactcctggggcttgtggcatgtcccagaaacagtgagaatactgctaggattatgggggcatctggagagctatgagagtgccctagggtttatgagggtgtctcagaacacctctaagttgtgctgagaagccccgggatttgggggggtacccctggacttcttgtgtggggttgtctcagggacaatgagggtgctccttgggattctgagagactgtggggtggctcctggggcttgtggggcctgtcaacaccacggggagtttgcaggagtgtccccacagatttgggggtgtccctggtgtttgtggggacgcgtccggcgattgtgaggacattagagccaacgcgggcggctttggggtctgcgggagagtccccaccagagccgtgcgggcgccccagacccgccccgccctgggggcggctccagcgcgaagccggaagggccgaggcgacagggcggggtggggcccgcgggcccggggctgggcaggcggcctgcgtgggcctggcggggtgggcggcgcagctccccagcgcccgccgaggcggggccgccccgcggccatggcgcggccgcgcggcctaggccgcatcccggagctgcaactggtggccttcccggtggcggtggcggctgaggacgaggcgttcctgcccgagcccctggccccgcgcgcgccccgccgcccgcgttcgccgccctcctcgcccgtcttcttcgccagcccgtccccaactttccgcagacgccttcggcttctccgcagctgccaggatttgggccgccaggcttgggctggggctgggtaagtgcagcgctggtggccgtgggttcaagtcgcccctggccacctggcgcactccagggtctagggttcgtggctcactctctccagcctcactttcctcttctgtcacatagcagcgatcaaaatcatccctgaccgccagggttgccctggagacctctgatagggcatgcagtagacgtttaataaatgttgcatccttcccacttcctgtgcaaacctgaagctgcggtcacgctttggaggagtgagggcgacctgccatccaggtcatgtgttcatcctggggtatgtgttcagttctgtcagcctcagtctactggcctgtgaaatggggccagtcatgccttctgtgggtggccttgcggtgaggcttggtgtcactcctagtaccgggccacagagggcaaatggaagttccctttctggccagacggggtgggctgcgggggcttgaagtctgggagtgacaggccccgaggccacatccagtctggctttctaatgtccttatatcctggaggcagaagttggcagcccggagttgggcactggctggccctgggggcttctccgggtcctcagcctccccctcttccacctactttccacgtgcaattgaggcacagactgaaggagggcacggcggggcaggaccgggcccagcgactggccccaggaacgaaatggggcggggacagaagaggaagaggggccagggcctttgggagccccgcgtggggtccgcagggtgtgtgtagggaaatcgttgcttc

SEQ ID NO: 8138 - DNA, 6000 bp, Homo sapiens; identical to SEQ ID NO: 3314

SEQ ID NO: 8139 - DNA, 6000 bp, Homo sapiens
tgtctgacgtcagttgttttccagaagggctttgggtaaatcacggctgcaattgaggtcagccacgctggccccggaccaggcgctgggctgcatgcgtcactgggaatgtcattcggtcccacgtcgaaccgggcgctccatagggcagcaccatcaccaggtgcacagctgaggcccagggtctgcttcggaccccggccagaccccagcgagcccctctctgcccctggacccagccctctcgtgtcagggtgtcttgggtggacgcttctcactcgtgcagacctggctgcccgtggccccgctggctgcacaggggaggttgcacaggtcagcagagtggctgcagggccgggctctgaaccgcagggccatggagacggggaggagatggtctctccacacccacctcacagatggaggcgctgaggcctcggctcccctgggagcctgggagaccacacggtttagtcaaaatccagatccccaagctctcaaggaggtccccctgggacgccacatgggccccacgtagctgtgagatcctcagggcctgctgttgtcattatgaccaataagcaaggggcccagagagcctaagagacctgcccagcaccgcacagccagaacggggcgcagacccaaagcaggagtgtcccctcgagacaaagcctccgccgaggccgccgtgactccccgcccatcagcaaacctctccgagcacctctgtgtgccaggcactgtggagtgaccccaagaggtggagaccacttccccggctgctctaggcagctccgtcccacggagccagcgggaagccagccaccgcgaagccgtgccccggagatcgtccaggagctgcccagaggggcctgctgggaggaggagcactggagagacccagcggccctgctggccaccccaccataggcagggagcagttcgcagaggccgcctacggaggggggtgcttggactttgaaaaacacctgacttgaaggggcagacgtggggagggtggtctcggcagcaggcacagcagaagcggaagtgtgggggccagaagggaggcagggcagccattgaaagcaccccaaggcctgagtgctgaagaggctgtgcccttggttctggtcttcctggggtcacccggttctgggtcccagctgctactgccccccacttcccctgtctgcccagctgctggctgagggtgtccctctctgtccccccaactcctgcaggacaaggaagccacctgtcctgccctttcttttttttcattttttgagacggagtcttgctctgtcgcccaggctggagtgcaatggcatgatctcagctcactgcaacctccaccccccaggtacaagcaattatcctgcctcagcctcctgagtagctgagattacaggcgcctgccaccatgcctggctaattttgagttttttgtttgtttgttttttgagacagagtctcgttctgtcgcccaggctggagtgcagtggcacaatctcggctcgctgcaagttccgcctcccgggttcacgccattctcctgcctcagcctcccgagtagctgggactacaggcgcccgccatcatgcctggctaatttttttgtatttttagtagagacgaggtttcaccgtgttcaccaggatggtctcaatctcctgacctcgtgatctgcccgcctcagcctcccaaagtgctgggattacaggcgtaagccaccgcgcccagccttgtttgttttttttgagatggagtctcactctgtcacccaggctggaatgcagtggctcaatttcagctcactgcaacctctggcctgggttcaagcgattcttctgcctcagcctcccgagttgctgggattacaggctcctgccaccatgccccaataattttttgtatttttagtaagagatggggttttaccatgttggccaggctggtctcgaactcctgacctcaggtatctgcccacctcggcctcccaaagttctgggattacaggcgtgagccaccacgcccggccttaatctttgtatttttagtagagatagggtttcgccatattggccaggctggtcttgaactcctgacctcaagtgatccacctgccttggcctcccaaagtgctgggatgacaggcgtgagctcctgcacctggcctgtatccccgtttctaatgctgtagcagaaggatactgtcatccctgcccacgtgctgtgtgtgcccgggatgcccctcccagagagcggctctgaggtggctgctgccaccctcctccctgcgggccagttctttcagggctcaggtggggaccctgttttggccccacattttcaagtccccatgggatccatcagtgcagccaccaaatcagtactgagcacccacataggctccccatgccgggctctcaagggacgttgggtggacctgacctgccattcccacgtcagggattccaggctgcatttgctaccctggaggaacaggcaaggcctgcgctggggtcctggcccctcagtgcaggagtcagtcctccgcgatgcggcctcgcagggcaggagtgcgctgccctcggtgcccagggcccgggaacaggggtcttgtggaagctgtaggatcgggcagggtggagtgagcacagaggtgggccctttagagggagcatggaggcagagcccgaggcagggagaggcagtgctcctgcaggtgaggtctgggctcacctggagcacaagggaggcccctgctggcccaggctgggcaactgggagctggcagaggcatgggttggcctgggcagcaggtgggcagcgtcatcctgactggaaggacgagcagtgggtcttggggtgatggactgggttgtgactgtggcgagtttaggggccgagggccgccaggtggacgtggccaggcaggtgtgtattcaggcctggcacttcaggccgaggccaggcctggtggaaattcgcaggtcatctgtgccgggaggggcgttgaaggctgggttggtgacagaggcccgagagagaggaggacacaacaaggaagacagggcggccaggctggagccctgagaaagcagagcagcctaggggcaggagaagcagggggagcttgagggggtgggggctcctcaggaggcgggacggaggtgttggaggaacgcaccctccctccctccccagatcccacccagacctgggacccctcacgcaggcacagctgggaagagctgtccgtgtccctgcacacggccctgcctgtgcctagccctgaacttggccctcactctgccctgctgctcaggaaggcgtctcctggctcttgcagggtgggtggtccgagcctcagtctctcctagcacgtctgtgctggcagaggggactggccctgcccgcaggcagccatatattcaggtcccaaaaggcttctgggttgggaagtaggtccggcaccccgacctcccaggacccccatagagagcttccaggagcctgtgcgctggtgcccgtggcacaggcaggattgggggctgtggtggggccgggctgtggaggaggaggaggaggaggaacactcggtgctccaggtcgcgacccccacccgcttccgccggctctgtcacctgctatctcaggccctgcctcgactgaactaactgctttctgccgcccgccgtgccccgccccgccaagctgagctgaggccccaggcccgtccaggttgggagcaagtccaccgggtcagagagggcagctgggctgagccacccctcgtcttccatgggggattcgcctcttttatgttctcctgtctcttccttcctccctctgcctctcttgcacctcctcgcaccctgctcttccgcgccctcctgcacgcgcgcccacctgccagcccaccgatgagaggagctgggtgtactccccgctccactatagcgcccaggcccccccggcctccgacggcgagagcgacacagtaagtgcagcccaggtgcacccgccggtcccgtgggctccaaggttctactgagcgtggtccccagctactgggataggcagggactgaggcccggggcgggagggcacaggtggcccagagctccaccctgggctctctggctctgaggtggccgtgggctaagtgtctcagggcctgtgttggcccaaggaagccagtccctggcagggggcctggggtgggccctcgccccgcccaccttcacctgtcctcttgctcttgcagtaatttctatgcagcccccgacccagagccgagctccacttctgctccggctgcccccgaaggcgctgcccaccccgctgaggcccagagctcgggagatgcccgcctcgccgccccaccggacctcgtcctccccctgcacggatgccgacggccgggcccctccccgacaagcctcccagggccccggcaccccggtcggcagcctgcccctgtgagacccaccctcccgagcggccaatcgcatttgagtccttatttggcacagagacggaagcacgtgtgtgccgttttaggaaaagaacaaaaaagacacaaacaaaccaaccagagggagaagagcccctgcccactgcactctttggttctctgctgtgcctgcctgtgtcctgaggaagaagccaggctgttcgcggtggcctctggggacctgagccccgggggccccatcggcctgcagaggggacggctggggtcccgagcaactctgcctccatccacgtgggaagcggaccctcctgccctcagcttgggtttgggggcctcagtgcaggacatctggcctgaacatcgactgtggggacagccctcgccctgccaagcactgcggccactcagcagctatgttcccgccgcagtggggccctgacgcccacctcccaggtgcccctcgagcaaaaacctctggcgcctccaatccagacccaccacagctggagggccaggcctcctcttccccaggctgccacccacgctggcggagctcagggctggggacttgtccttctcttccaacgtaggccactcagcaactggcatggagggcccaggcaacggagacgttttctccatggcaggacagagcgggaggccgggccttgggccacaggagaccagctcagggcggaaggtcaggctccccgccccctccacgtggagacatggcctagggggccaggcccggctccacaggagtctccttcaggactggtgtggatgtccgccgcctctttcttgtttaagtgatgtgatgtctccgaggaggggagagaagactttgtttccgactcatcaccctccaagagggcagcgctcccagtggtgggactcagcccagactgccctggggcagcttcctgggcccgctgcgctcagagggtgctggttggaggccagagctcggcagagtcacccaccctgcccttccccaggacccctgagaggggcttattggtgatggctgtgggaatcccccacttccaagatgtgcccaggatgtgaggagctggagtggaagctgcacctttgggaagaattcctctccagacctggcagagcctggtgtggggtctgagacggccggagaacctcccaggcagggctctgtgttttgtctgttacaacctccgtatgacgccacgccacccgctgttcacgtcccgtcggcctcctgcacagcccacacgctgcgcccggaaggcccctgctgtggagaagccggacccatccccgaggtccccagcgaggacacacactccacgagagcagcccctccactctgcccaggagaggggccgaccctcctcgggaaccggccagccgcgtggctcccagcatccatcaggacaagcccacgtggggtcctccctgcgtgctcagagggtctgtccagccctgggaagcgaccttggcctcagttcacagcctggtgctcatctgct

SEQ ID NO: 8140 - DNA, 6000 bp, Homo sapiens
atgctgctatgaatattcatgtttaggtcttttcatagacatatgctttggtttctcttgggtagatggaattgctgggtctttaaaaagagttttagggtctggcgtggtggcttatgcctacaatcccagcattttgggaggctgaggcaggtggattgcctgagcccaagagtttgagaccagcccgggcaacatagtgagaccccatctctacagaaaacttaaaaaattagctgggcacggtggtgtgcctctgtagtctcacctattcaggaggctgaggtaggaggatcacatgagcccaggagtttgaggttgcagtgagctatgattgcaccactgcactccagcctgggcaacagagtgcccagcccctcgccttaaaaaaaaagataaaagaactaaagtggccaggcatggtggctcatgcctgtaatcccagcactttgggaggccgaggtgggtggatctctagaggtcaggagttcaaaaccagcctggtcaacatggtgaaaccccatctctactaaaaatacaaaaattacccaggcatggtggcatgcacctgtaaacccagctacttgggaggctgaggcacgagaattactcgaacccaggagatggaggttgcagtgagcagagatttcaccactgcactccaacctgggcaacagagcgagactccatctcaaaacaaaacaaaacaaaaaacaactaaagtagggtaagtggcacagagtggtggggtgttcagattgtagatgaggtggccagggaaggtcctttggataagatcaccatatcactgagggtcttgttagggaaacaaactacgtgtttcagagaggggaaatttaatacagggaattggttaagtgggagaagaaagagttgagaagccacatgggatgatgaggaaatctggcataagctacagcagaaagctactggagggacatggcaaagagaggatgtgataaggaagggacccttggggaggaactggcactatggaggaggtgtagccactgtcagaaaacaccctccaccccaagcagacacaggagagaaacaccctggcttctgccttcctctccaatctccgatctccctccagtggctcccattggataaaccgaccaggaagccagtatgcaatggaatctgggaaatgtagttttctgggggaagggcagggcatggctctgacccacacaatgacagagcagagatataaattaaataaaggaccgggaatggtggctcgcatctgtagtcccagctacttgggaggctgaggcaggagaatagcttgagcctaggagttagaggctgcaatgagctatgattgaaccactgcactccagcctgggtgacagagcaagactctgtctctaaaaaatacattaattaagtaaaggaacaagccatggggggcatccttgatgtattttgtgtagaaggaacaggaagttcaaaggtcctgaggttgcagtgtcccagatggagccaaaaccttgagagtgggtgtgatggtccaggcagaatgagagcggcagggaacccaggacaaagccctgaaagatacagagttttagggagtagcaggagacagcgacggcacagccagagaggtgggtgcagaactaggaagtgataccgtgtctctgaagtcaagggaaaaaggagtttcaagaaggtgatggtgagtggggactgactgactgtgagaatgatctaatgaggactggcatgagggtgtggacctggcaaattggcacctttggtgagaagagttttggaaacgttggggaggtgggaggcaaggagttaaatgcaagcaagtgcaaactcgagcacagaccactccttggagaagcctggatgcgctgaactaaggcagtttcccacagcacccatggccagagagtgagaaagtttgtttgggtcccaaattgtctaagccaggaggcctggagcccagttggtcttagggtctgaaatcagacagtcctggtttcaaaacctgggcccccacttccctgctgggttcccctgatctgggtccctctcctctctgagctcagtttcctcacctggaaataggggtgtcactgtactgtttatggatgttgcagcagttgttaacattgcatctgcaaagtgttcagcactcatcagtgaaagctttagaacaagctggcaagaactcatcttttttttcttttagacagggtctcactcgtctgtcgcccaggctggagtgcagtggctcgatcttggctcactgcaacctctgcctcctgggttcaagcaattctcccacctcaacctcccaagtagctgggattacaggcgtgcaccaccatacccggctaacttttgtatttttagtagagacagggttttaccatgttggccaggctggtctcgaactcctggcctcaagtgatccaccctcctcggcctcccaaagtgctgggattataggcatgagccactgtgcccggcctcaaataataacaacaatggtagctactatttgaaaaacttaccatgtcccagacacttgtaaagtattttacaaacatcatcattccttattctccccctggctcactccaactacactggcctccttcctggtcctcaaacactcctgccccagggcctttgcacttgctgttcctgttgcgtggaactctcttcccctagatatccagatggttcccttcctcacttcaggtctctgcttaaacgtccctttctcgccaggcgcggtggttcacgcctctaattccagcactttgggaggccgaggtgggcagatcacgaagtcaggagattgagaccatcctggctaacacggtgaaaccccgtctctactaaaaaatacaaaaaattagccgggcgtggtggtgggtgcctgtagtcccagctactcgggaggctaaggcaggagaatggcctgaacccgggaggcagagcttgcagtgagccgagatcacgccactgcactccagcctgggcgacagagcaagactccgtctcaaataaataaataaataaataaataaataaataaataaaaaagtccctttctccaatcactctgtttaaagtttacttccccttcctcctaatatcttatgtactttacttttttcccgtatttcttgactgtctcaccccatagaatattcatcttcacatccaacccggaggctcattcttggaatgccaacactttgggaggccaaggtgggaggatcgattgaggccaggggttcgagaccagcctgggcaacatagcgagatgcccatctctaccaaaaaaaaaaaaaaaagagagagaaaagaaaaagaatattcaatttcacacaggcaggcatttttgtctgttgttcacagtgcctgggacatagtagatgctcagtaaattacctgattctcaggatgaccaagccctttacacgtgttaggtctccaccacccactttgcagatggggaaactgaggcagagaggaacagtcatccctacaggtcacacttgcatcttggtgttgtccagctcagaaaaaaagacggttcgagacccctagcccccctccccgctcatgcttggcgctcctccccagccagagccctcagccccaggccgccgcctggaaaggcctgagtcatcgccgcctccagacggcggcggccgcgggctgagggcgacggcggcggcggagcgaggtgatgcggggacgccaggagggggcgtgagtgcaggcaaaacagaggaaattaaaactagcccggcgctcctctccgcggcccagcggctgccgccgccggctgatgcgtgggcggacgggtgggcggcgagggcactgcgcttcccgctcccccgagggagcgggccgggagcggggtccccggggccgcgaggaaggtccgaagcgtgagtgccccgcccccacccaaagttaaagttgcaagtagacacctgcccgggactcgcctcctaaaagccgcgtgccaggtctccgtggtccctgggtaggaaactgcccttggtagtcgtgggaactcctcccgtggccgaagtgaccccaggaccgcacctgcacccaaacaatttcgtctgctggccctggatcacgccaccctgggggcacgaaatgaccgaaggatccttagagtggtctcagtgcccgggaaggaagccccttcccccagctaaaggagacccttggtgacccgattcatgggagcgcacgagcgtgtcgcccccccacgccccccaatgcccgctgtccgaggttttaggtagccagggtgggtgtcccaacagtgggtgggtggggatttgcgactccggccccctgccgtctttgggtggccggggtgggccgagggcgcctttacgcgcggggtcccgcggctcaggctcgaagagggtctgcgtgcgggaggcggtccgggaacaccgcctagggggaggggggccgggaataccgttggggggcggggctggggaatgccaccgcggtggtggtggggcgcttggggaatgccaccagggggaggtcccccaccccatggagaggtcctcggcggggggcgggcgagggcgtggggtggggggtgggggcagtctgggcgccccccgccccccgccgggctccgggccggaggcgtgacgtcacggcggctggaagtgcccggcgcggaggcgcgggagggggcgggggcccgagccggcgctttataagaggagcccgccaggcgcgccgagccgcagcccgcgtccccgagccccccctcaccccgtcccggaccccctgccccgcagctcgcgctcgtgccccctcccccacgcccccccggggcgcctgggtgtcgagggaccgagcgccccgcggcgggccagagaagggacgcgcggcgggcggccgcggggcatgaggcggaggcgcgatgtcggtgccgctgctcaagatcggggccgtgctgagcaccatggccatggtcaccaactggatgtcgcagacgctgccctcgctcgtggggctcaacggcaccgtgtcccgtgcgggcgcctctgagaaaatcgtgagtggccgccgcgcggggggcgctcccggggggcgtggtacccgcgccacagccgctgccgccgccgcagcccccggggcccccacctgtccccctctacccctgtgcttcccacgaccctgcccggcacgcctgggtaggggacgccctctcggggttccagggtcggacgtggaggcagaaggagccccgggacccctagccacctccgcgccatttaggatggttcttgctgttattattgattattatgattattagtgagcaatgtctgagcgcgaatagcgtaccaggctcgctccggccccagggcggaggcgacaagggctgcagaattgagctgagtccgggctgagtggggtgcagcgggaggagggtgagactcgggggtttagaaggaccctgtctctgaaagaggggaggatcgaggggtttccgagtgtctccaccttcaaggtctctgcctggttgcgtctcggcgtctctgagtagttctgtctgagtctctattcatttcccctgctttgcgtctctgggtctctttctattaatatttctatctttccttgtctctgtctctgtggcgctgagaatttgtatctctttttttctctctttttctctcccctgcaccccttccgccattcttgcctcgccatgtgctgaatatttatccccataactcaccctccctgggaggtagacggggcgcagactggggccggagctgacactgcctccagaagctccaggatggcgccttcccatcccatccccctttgaggctttatcctccagcttccccactacagagcttccctggatcagggaagaaggagagaactcagtggggttctccccgtggtgtcctgaggagagaggggaggggt

SEQ ID NO: 8141 - DNA, 6000 bp, Homo sapiens
cgtgcgtcaccacacccagctaatttttgtatttttagtagagacaaggtttcaccatgctggccaggataagatgtcatctctttaaaagaaaaaataaataaataaaaaggtcaggcacggtggctcacgcctataatcccagcactttgagaggccaaagtgggtagattgttccaggccaggagtttgagaccatcctggccaacatgatgaaacccagtctctactaaaaatacaaaaattagtggggcgagaggcacatgcctgtaatcccagcttcttgggaggctgagacaggagaatcgcttgaacctgggaggcggaggttgcagtgagctgagatcatgccaccacactccagcctgggtgacagagtgagactctgtctaaaaaaaaaaaaaacacccaaccatattcacctctcccctctccccttttccactttgtctcttctccccggacctacctgagccacactccttgactgccatttcttccacgatcagccctggacacatatccacccttatgcagtacaagtgttctttccctaggtcccacagagtcccctccctccctctcagcctccctgggtccagcctcacagggcatctaccccagacagttgcttctctgcggacccctgacctgcctctgtcctcaatcacaggcacgctgaagacctcatcgtaacaccatttgctcaggtgagacctcttcccaaatggttaaggagagaaggggctccaatgctccgccacacttggggacagggcccagccccgctgcctctctaggggaaccccactcctcactgccgctccccatcccaggtgctggccagcctccggagcgtccgtagcaacttctcactcctgaccaatgtgcccgttcccagtaacaagtaagtgaaggctgggctgcaacagctgtgatcataaggtgaagcatatgcgggttctgctctcagccctgctgtgtgacctctggcaggcaggtgacctctctgaacctctgttcagacaacagctcccagaaagccagagagccattgcaggtcaagtgcctaagacacagaggtgttttttgtttgtttgtttgttttttgttttttgtttgtttgtttgttttgagatcaagtctcactctgtcacacaggctggagtgcagtagtgcgatcttggctcactgcaacctctgcctcccgggttcaagcaattctcctgcctcagcctcccgggtagctgggattacaggcatgcaccaccacaccgggctaatttttgtatttttagtagagatggggtttcaccatgttggccaggctggtctcaaactcctgacctttggtgatccacccgcctcagcctcccaaagtgctaggattacaggtgtgagcctctgcgcccggcccagaggtttttataaataaagatttaggggtctggatgcatggtggtgaggccacagccacagtccccaggcccaccctgggtcttgacaccaagttgctgggcaaatggcattccatggtgcttctgttgcccttctgcaaagtgatgatcacagccaagcgtgctggctcatgcctgtaatccagcactttgggaggccaaggcaggaggtcacttgaattcaggagttcaggaccagcccaggggaaacaaaatgagaccctgtctctaaaaaaaaaaaaaattagcccagcatggtggcatgtgtctgtggttcccacctacacagaaggctaaggcaggaggatagttttgagcccaggaggttgaggctgcagtgagctgtgttcccaccactgcactccagcctgggtgacagagcaagaccctggttcaaaaaataaatagataaataaagtgaggattacaataatgcctcccttagataactgctgtgaggagaggagatgatgtctagaaagtgctagaatattgccctgcgtacataggagtggatcttaattgtttcagtgcaagagatgtggctgagagctgccagtccttctgggggtgggggatagagacatccttaggggcttggaggatttgtggagagttaggcaagagagcagagatcttggaagcccaggacctgaccttaaggcggatcagccatgtggtcttgaagaagctgtttcacctccttgagcctcagtttccacatctataaaatggatttttctgggactcattgaggctgcaggcagagtacatggcagcgtccttaggacacggtgagttttcagacaaatgaaaattggcactgttcatgaaagcgggaggcagggacctggtggggggacccaggctgacattgcagccccatttttttttttctgcaggcggtccccgctgggcggccccacccctgtctgcaaggccacgctgtcaggtagctaagcccagaggggtgggaaggggccccccttgctgccccagtgggggtccctcagccccttccccacccagcagtccactcacctggcgaaccccgtcacggcggtctggagcctctgggcttctgcctacagaccttctcagtcactaccctggctgccccttccttagaagaaacgtgtcagcagttggcccgggagactctggaggagctggactggtgtctggagcagctggagaccatgcagacctatcgctctgtcagcgagatggcctcgcacaaggtgtgcaggtggtgggcagaacccctgggcggggcaggcgggggcggggccagtgggtagagccaaccgctggatgggaccagtgggcgcggcctgcggatggagccagccattaggttgttcctgtgggcggagatagctactgggtgtggctgattagggcagggccaatccctgggcgggggctggtggagctgggccctatggatggagccaaccactaggttaggcctgtagccgaggccaactattgggcgtggctcatgagggtggggccaatctctgggtagggtctatggtatggggtcagtccctgggtggggccaacccctgggcggcagcttcaaggcttgaagctcctgtagattatgactttccccagggctggaggagcctggtgtgtgttgtggggtggggtgtgtctgtctggttgtacatgtgtcaataggtgaccgtttccgttggggggttttatgcttttatggtctgcgggggtgtatctgcggctataggtctgcgtagccgctggtttattggctacgcatttgcagcgctggggtgttgggaatagattctgaagagtggcacgccagtgtgtacttgtgtaggtgtataggtttgcacgggtaattatgcagggttataggtgtgtggggctgtgccagaggggtgcgcatgtctgcaggggagagttggaccagatgggaaactgaatgtgtagctctatgtgtttgtgaatgtgtgtgtttgcagggccgtaggggtgactgcaatgctcccatgtacagttgtgcagacggtgcactgcacaactccaggggacaccattcaggaagcaggcagtatgtgtgaatgatgcttcctggagttggagagagtggtaacagcccttgtgggcgggtgcctatcaagaaatgatctgtaggtgggagtgtctttgttggggggtgcttacagcagtgggtggaggcttgtataggaacatagcagtctgagggcgattgtgtccctgagggtggatcaagcatctgaaatgtagctgtgtctttggatatgggtctgaggatgtttctgcaatggtgtgtgtgtgtgtgtgtgtgtgtgtgtgtgtgtgtgtgtgtatttttgcatctgtgagtatatttccttatggatttgtcgggatatgtttgtgtccaagggcagtggatatttgcaatggttggaaagtgtgtctgtgggtgtgtttagtgtgtgtctgtaagtgtggctggctggggaggccaaggcgggcggatcacctgaggtcgggagttcgagcagcctgaccagcatggagaaaccccgtctctactaaacatacaaaattagtcgggtgtgctggagggtgcctgtaatcccaactactctggaggctgaggcgggagaattgcttgaacctggaaggcggaggttgtggtgagccgagatcgtgccattgcactccagcctgggcgacaagagtgaaaactccgtctcaaaaaaaaaaaaagaaatgtggctggtatctcggtgtctgtctataggtgtgggtctggatgtgggtctggatgtgggtctgtgcccttggatggggcgtgtctgaaggcatttgctatatgctcagctgtggacctataagtgtgttggacatcagagttgtgactgtctccgggtgtgtgtgtgtgtgtgtgtgctgtaagtgtacaacagaaagcatttgagtatctgtgtatattcaagtgtcaagtgcctggatgtgtgtgggtgtccctggaaggtgtgtctcagggtgtttgtacatctgtgagtgtaaagtggatgtgtgtttctgtctctgggtgtgtccatggaggggatgggtcctgatggggacagcccacctaggttctggctgaggcccatgggctctgatgcccctttaatacccccccacccccagcaccacctgacatcccatgcagcctgccagtgctgcagtgagcacacacgcacacacacgggtgcacacacagagctccgcagcctcctcctgggacccttgccctgcccccctcccatgggcacggaccccccaccgcctccacccactgccgcgggggggcccgttggggcccagggctggcgggccatgtaaccagggctgctgctgggagcgcggaggggaagggagcccccagccctgctgggccggcccaggcccctccgcggctcccccttccactacccacctgcccggcaccccctccccagtggttgttaaccccgggactccccaagcccagcctctgtgtgcagcagccccaggcgggctaagtctccaagatgcccttggtggatttcttctgcgagacctgctctaagccttggctggtgggctggtgggaccaggtaggagagtgcagggtagggggtgggcgggcatcctggtgagctgggcccccggtgtgggcttgtgtgtgcagctgtgcacgtgtgtggcctggagatgaagccttgtgactgtctctgtgtgtggcccagggctgggcgtggatggcgggcagctgggggtgtgtgactctccctgggggtggactgcgggtccctcactgggtgtgactgtgtcagtgcctggatgtgtgtgtgtgtgtctgcgatggtgtgtgtctgcctgagtataggcttgtttgcctgggtcactgtgtggccctgtctgagatcatctggctctgaccatggtgttgtgtgttgggttgtgtgtctgagcccagagctgcctgatattttggggacatgtgaccccaaatgtcagtgaccgccttattttgcatgccctttgatctgtgtgtctgggctgtgtgacgctgtgtaggactgagagcctgtgattgtgtgtgtggttgtgtgagattttgtgggtccatcttgtgtggatgtgtgtgtctctgtacccagggtctctgggtggcaccgggaggagggagcaccccgtccaagcctgggccatgcaggctcacccctcctgccaagtgtccctcctgcttccctggacagagtctgctcctgcttttggggtgctgtggcagagcttgggggtggggagccaatgccctttctcctctgtgtacaatgtcacagcagaggcctgtgcagagtggcatggggggaccaggaggggcctccaagcccggttttgggtatactctgttcatctgtgcatctgtccacccttctggggttgggggagagtgggctatgatgagaacccccctccccctcccctgggtgatcaaactgggatttcctcagctcaccattctccc

SEQ ID NO: 8142 - DNA, 6000 bp, Homo sapiens; identical to SEQ ID NO: 3315

SEQ ID NO: 8143 - DNA, 6000 bp, Homo sapiens
gggagctgagtatagaaggctccaccaggtggggtggtgacagctcccgccttctctcacggccactgtcatctgaggtgcaccaggatgccatcgaaggcatgcagcccccaggctagggaatgaaggaagggacatagccatgcaagggccctggggcaggaccacacctgctgagggaacagcaaggagcccgtgtggccaagcagcgcggaggggaagggagggggggtggggaggggaagagagcagtggaggggaagacagcggggagggagagtggagaggggacggggccaggctgcacagggccctctgggctgtctggattctattttgagagcggtcagaagcctttgtgtgagggggaacgtcgtccttccctgccgtgtggggaggtgggagtgtctgggaggcgggcgggcactgggctgtgggttcccagggtgagccaagcctcagggagaatcgactgtgtgtttgggggctcggaggctccgcaaggtgcccacagtcctctcccctcaggccggcccgacctcctgccctgcacgccaccttctttcgaagaagccactacagcctccattgccacgactctgtcatccacatccctctccattcctgagcggtccccctcggagacgtcggagcagccgcggtacaggtgggcgaggcatccgcagtgcatgtgggcggggcatccgctgtgcgtgggggcggggcattcactgcatgtgggcggggcatccgctgtgcatgtgggtggagcatcgtatgtacggtggatgtacatacactgcatgtgggtgcgcgggggcggagcatccaatgtgtgggagggaggagcatatgtacaggtgggcagggctgccagggggcaggtaggcaggcgggtaggcaaggcaggtagactgagcaggcgggccactctctttctgggtgtcacgtgtttgctgtatctctgcaggcggcgcacacagtcgtctggacaggatggcaggtgagacccaacccccttccttccctgggtctcaccagctcctcctgcacagctcccagctccgtttcccgccccccagcccctctgctctctgcccattctctcctggggacagatttaagattgtagcactcggccctagcaccgcacacaatcttccagccactttgtttttcttacagccagagccagggcagctctggtctgtggatccttccttatttcttcttctattaagttttttttttaacttaaaacaagatacaagagggaatatcgtgaaatgcgccccctcctgcccacggcctgtcccctccccaggagcaaccactgggactgtgggttttgtctcttggaagatactttctgggaacacagcagacgtgcaccaggcttgtggttcccttttattttgacacaaatgggcacacccgtgcacgccgcccacaccttgctgttgtcactcgactgacggggatctcaggggtgggtgcgcgccgttcctgtcacgcctgcgtgccgtccttccatcccatggactgcacctggctttaagtgcccagccctcggggacatttgcgaggtccctggggtctcactcttgtgaacactggggcagtggcgcggtgttgcttttcttaaccgtgttttaatcgctgccgcctggtgaaagaaaccccttggtgccctgggtgggatgtgaccctccctgcagtctagcgtgccatttggagagacatgttacatggccaggcccggcggccgggacactgagtcacttgtgtcagggcctcggctgccaggtgcaggcactgcctggagggtgggcagggtctgtggcacccacaccggtcggggctgccatttgctcatatgcccccagagcccgctacaccccaggccctgctggcaccacagtcaccaagggacccaggtggacagtccccgggctgggagtgacagccagaaagaacagacccaatcaggaggctcccaactcccctctgggactggccctggagttcactgggcactcctgggggtaggatgggggaagtgaggagggaaaccgaggcacaacctcccattgcctgcaggccgcaggaggagccacccgcggaagaggatctgcagcagattacagtgcaggtggagcctgcgtgcagcgtggagattgtggtccccaaagaggaggacgcagggtgagcacggcctcggcgggaggtcggggcgcccacctgctgcgggcccagaggagccaagagcaccccgaggtttcatcatgaagcagttctttcttactaggttgtattcacagatggtggattttcccataagtttattttttgattgaagggagtggttctcgactagccggggtgatcctagcccccaggggacactgggcgatgcctggggacatttgtgactgttagaactggggggtgctcctggcatggagtgggtggaggccagggacgctgctcagcatcagcctgcagtgcccgggatggccccaccccagagaaggacctggttccagtgtccacagggcccaggcaagagaccctgggctaagggttgtgtaagagcatctctgaacttccaagtatttaactaatttttttttaacctttttagtatttattaatttaattttattttatttttaattttttaaattttttttgtgagacaggatattgctctcttgcccaggctggagagcagtggctcaatcttggctcactgcagcctccgtctcccaggttcaagtgattctcctgcctcagcctcctgagtagctgggactacaggcacccaccaccacgcatggctaatttttgtgtgtgttttcagtaaagacagggtttctcccatcagccagctgggcaggcttggtctcaaactcctgaccttggccaggcacggtggctcatgcctgtaatcccagcactttgggaggctgaggcaggcggatcacgaggtcaggagatcgagaccatcctggctaacatggtgaaaccccatctctactaaaaaatagcaaaaattagccgggcgtggtggtggacacctgtcggcccagctacttaggaggctgaggcaggagaatggcgtgaacccgggaggcagagtttgcagtgagctgagatcgcaccactgcactccatcctaagcgacagagcaagactccacctaaaaaaaaaaaaactgacctcgagtgatctgcccaccttggcctcccaaagtactgggattaattttattgatttttgtattgaagaaaaaggcttaaaagaaatatctgtttttttaaaaaacacaggacacaatagttctggcccttttggggatatggtgtcagctgctgttattattattttctttgagacagaatctcgctctgttgcccaggctggagtgcagtggcacgatttcggctcactgcaacctccacctcctgggttcaagtgattctcttgcctcagcctcccgagtagctgggattacaggcatgcaccaccacgcccggctaatttttttgtatttttagtagagatggggtttcaccatgttgaccaggctggtctcgaactcctgacctcaggtgatcctcccgcctcggcctcccacagtgctaggatgacaggcgtgagccccgtggcggcccctgtatgtttttacttttctgtcatctgtctggtgtgtataatcccatgcttgcactgttaccaaattcttcttgcctttgtaatgatttttgcctgagatgcttttgtatttttgttccaagagagcttttttagcgctcacagcagcgtagacccaaaactaaagccctgggggtttatcttccacccagtgctcctgccactgtcaactctttgccattgccaaaccttgcaccgtgaaatttcaggttttgctgaaaggaactgtacctccgacatggcaggagggcatgtttagcctcattcctgggatgaacacgatgcaccgtgtggccatagccaaggccaaggccgttcctcacctcctctccgtgcctccgtttccgcaaatgcaacacaggggcagtagccgcaccctctccatcccccatgatagactcagtgggttaatcacgggagccagccctggcatgtagtaagtgctcagtgaaaagaacaaagaggctgggctcggaggcttccgtctgtgatccctcctaaaggaggctgaggcaggaggatcgcttgaccccatgagttggagaccagcctgggcaacatagtgagaccccatctctaaaaaaaaaaaaaaaattagttgggtgtagcagtgcacacctatagtctcagctacttgggaggccaaggttggaggatcgcttgagcccgggcggtggaggctgtagtgagccgtgatgacagcactgcacgccagcctggctgatggagccagggcctgtctgaaaaaacaaatcaatgaaagaaggaagaagctctgatcccagcggctaggtgccatctctccccacttgacagatgaggaaactgaggctcagaggaggaacaggccctcccagggtggcacagccggtgagggtgaggccagcacgtgcccacaggtgtgtgtgtctgagctgggagtggcagggccgagctgtcagcgggctggcgggtcactccaggtcactcctggggccagcatgaggggcttcttggggaggtttgttctgatttgcgataaatggcagcgcaggagcgcgcggcctgtggtcagctgcctggcttttcatctccgtgatgaccgtatgaagcccctgcctgggtcctgagtgggggcgcggggagtctccgtgtggggcctgagggtcaagaccctctgtctactcctgtccccagggtggaggcttccccggccggtgcctctgctgctgttgaagtagaaactgccagccaggcctcagacgaggagggcgcacctgccagccaggcctcggacgaggaggacgcgcccgccaccgacatctactttgtaagtgccccgggctcctcctgccgccggctcgtcaaccggactctctctcacacacgctccaccgtgtgcacaccgcatacacacacctgcacacaggcacgtgagtgtgccctgtcgacccacccacatgctctctcaccagccagcactctcacgacacgcccacacgcacccaccagccacgttcacacccaccttctcttcctggtctaaccccatggggtgggaagctcctccaaaccaggcctttctgaggccccagagccacccctgtccccttccccggccttgtgcccacggcaccttctgtgccacccgtctccctggaagtcgtccggagtcctcagactcttggcccctcgggaggccctggcacaggctgaggtcctgtgtccttgacagcctagacgtccagacagggctgtggcggcaggaccttctccctgttgccgtgggcgtggccaggtgggcttatccttgaggagggccgggggaccgggcagtggcaggagggcttcacgctcccacgccgtgggctggggactcgtggctgctactgggcagggcagggtctgcccggccctggggacctgggatccctgctctcccttgccagggtctgggtgaggtggctgccgggcggccagcgaggcctggaatgtccaggcagcgtctccactccccagtggtcccactcagatcaggcagccccaggtcacagggagggccggaggctgcagcccacttcccagatggtttgttctcaccctgcaccccctgggaaggagggctgggcacgggcaccaggccttagggcctgttgtgggggcacctcctcgctgcttcataactaactcccctgctctgtctccagtggcgcctctggggtccccatgcacccacctggccctggagaagggagggacgggccgcgtgcctgtgcccctacccaccgcacgtcgtcacccctt

SEQ ID NO: 8144 - DNA, 6000 bp, Homo sapiens
tggggaggccgaggtgggaggattgcttgagctcaggagtttgagacagggcgataccctgtctctgtgagaaaaaacaaacaaaaaacaaaagaaaaacaacaacaacaaacaaccagatgtgctggtaagtgcctgtggtcccagctacccgggaggctgaggtgggaggatcacctgagccagggaagtcgaagctgcagtgagtcgtgatcgtgccactgcactccagcctgtctcaaaaaaaaaaaaaagctgctaattcatcttcatccccggccaggcccctgcaccagctcctaaggccacctcagtcccagcaaattggcgaggttctaattaagcttccttgggctgtggcagagaggacatcagagtctgtggatcattccagaaccctcgctcttccctgccccctgccagaggcatgaaggctggggaaggagaagcagataaatcaagtgacagctccgtgaaggaagaaaccccatcttgctagaaagatctctctcgcctgccttgaaaaaatgagactgatgcaaatgcggctgcttctctttggtacaaaagcccttaaatattaaagaaatgaatccttgatgtctacaaagaaaggatcaaaaacaaatctttctgaaaggagaaaagcttttatttcgccgtgaactcttctagatctagcctctggcagggatgcctgcggaacagggagcacaggaagataaagctctcagtgatggccattcaatatttgttcatttaggaagcgtctgaagcagctactgcattgggttacaggctggggaaacgtccagcaaagtgaggccacagttcctgccctcaaaagccattaggggacgggtgcagtgtctcatgcctgtaatcccagcactttgtgaggccgaggcaggaggattacttgagctcaggagttcaagaccagtctgggcaacacagcaagaccttgtctctaaaaaataaaataaaagactgggtgcggtggctcatgcctgtaatcccagcactttgggaggccagggtgggtggatcacttgaggtcagcaatttgagaccagcctggccaacatggtgaaaccccatctctactaaaaatagaaaagttagccaggcatggtggtgcacacctgtagtcccagctacttgggaggctgaggcaggagaatcgcttgaacccaggaggtagaggttgcagtgagccgagatggctccactgcaccccagcctgggcgacagagggagactctatctcaaaaataaataaataaaataaaagccggtggtggctgggcatgatggcttatgtctgtaatgccaccactttgggaggcttaggtgggagggtcacttaaggtcaggagtttgagtctagcctgggcaacatagtgagacccccatctctcttaaaaaaaaaaaaaaaaaggccagtggggcattctccaaaactccctggccagtaatcctcaaaactgtcaaggtcagaaaaaacaagacagaaacgtcatagaccagataagtctaaagacatgtgataaccactgagtgtaacgtgggatcctgcattagattctggaacagaaaaagcactcaagtgggaaaactggggaatttgaataaagtctagagtttagttaatagtaatggatgcacggatgttgatttcttagttgtgacaagtgtatcatggttatgtaagatgtaataacagggaagtcaggatgagaggtacacaggagctctctgtattattgttgtaacttttctgtaaacctaaaataattccaaaagtaaaagttgattaggtaggcatggtggcccacacctgtaatttcagcgctttgggagaccaagatgggaagatcgcttgaggtcaggagttcgagactagcttgggaaacatagtgagatcctgtctctacaaaaaaaaaaaaaaaaaaaaaaaaaaaaaaaaaaattagctgggcatgatagtgtacatcggtagtcccagctacttgggaggctaaggtgggaggattgctcgagtctgggaggttgaggctgcagtgagccatgatcacaccaatgtgggacacggcctgggggacagagcaagaccctatctcaaaacaaaaataaaaataaaaaaagtatcagggtgtggtggcacacacctgtggtctcagctactccggaggctgaagcaagagaactgcttgagcctaggaggctgaagatgcagtgagctatgatcatgcccctgcactccagcctggacaactgcttgagaccctgtctcttaaaaaaccaaaaatgttggccaggtgtgatggctcacgcctgtaaacacaatactctgggaggctgaggcaggtggatcccttcaacccaggagttcaagaccagcctgggcaacatggtgaaaccccgtctctacaaaaaatacaaaaattagcctggcgtggtggtgtgcacctgtagtcccagctactcagggagctgaaatgagaggatggcttgagcctgggaggtggaggttgcagtgagcagtgatcgcgccgtgattacaccactgcactccagcctgcgcggcagagtgagaccctgaaggaagtgactcttgtcctcccagcatagtggctgagagtctgataggctggcatccaaatcccagctctgtgaatttgggtaacttgacttttctctgtatctcagttttcccatctgtagaatggagctagtgttagtacctaccatgagatggggctctaaggattgaattttggtaatatttgtaaagcaactaagaagagcgagctctacaagtgttaagtaaaatatgaaattcagaatgggagtagagcttggggagggatggatggacagatgaatgaatggatggatggatagatggatggatgtatataaatggatggttggatgaatgaatacgagtgaatggatgaatgaatgaatgggtaaacagataaatggatgagcagatgaatgaatggatggatagatggatagatggttggttttatgaatgaatggatagatggatgaatgggtggaaaggtgaatgaatggatggatgaatgaatatgtggattcacaatcactttctatcctgacccctccccgacccacaaggctcttccaggcaaaaccccagttctcaggctgagggaggccccaggcggttcccaggcttccagcatggcgcgggtgaactaatatttttttttttttcttttgagacagggtctcgctctgtcacccaggttggagtgcagtggcgtgatctcggctcactgcaacctctgcctcccaggctcaggcgatcctcccacctcagccttctgagtagctgggaccacaggctcgtgccaccatgcctggctaaattattttgtatttttggtagagacagggtcttaccatattgcccaggctggtcccgaactcctaagctcaagccatctgcctgccttggcctcccgaagtgctgggaatgcaagcatgagccacagcgcctggctgatatcttctttaaggcctgtcaagcttatcactcaggggatatttgcccaatacctcaaggtttgacaagagcaggctgctattatctcaagctttccaaagggacgtggccccctgtcacggctcagacatagcagacaggcacattctccatcattcatcacggccctcctgccattctcgcagtcagagagaagccacagcctctgcctagcctactgggcacctgtctgcagcctaatctcaggtgatccttccctaggacgaacaacagaagcaagctccgtggcagaaaggagaaattcacggtagacctgtgaaggtgtttgctctctgtcccactggttcatcagcatcctcattcaacaaacataccttgtgccaggttctgaggatcacggatgaattgtttgcacagcaaacaaaactccccgctcccctgtggtttcctttcccagggtagaggcaggcctggagccagcattcccacccgtgaggccctcctaatggcgactgtgatcagggcttggaggaggacaggagaggtgccgcaagccagtgtagactgtgtaaccagatggcctgtgttcgaattccagctacatcacttacaggcagtgatgctttggcaaagagcttttttttttttttttttgagagcagagtcatgctatgtggcccaggctggagtgcaatggcgggatctcagctcactgcaaccttcgcctccagggttcaagcgagtctcctgcctcagcctcctgagtagctgggatcatagtagcacaccagcacacctggctaatttttttgtatttttagtagagacggagtttcaccatgttgctcgggctggattcgaactcctgaccttgtgatccgcctgccttggcctcccgaagtgctggggttacaggtgtgagccacagcacccggaattttatataatttttttttttagacaggatctcgctttgttgcccaggctagagtgcagtggcaccatctcagctcactgcaacctctgcctcctaggttcaagtgattctcttgcctcagcctcctgagtagtggggattacaggctctcgccaccatgcccagctaattttttgtatttttagtagagatggggtttcaccatgttggccaggctggtctcgaactcctgacctagagtgatctgcctgacatgacctcccaaagtgctgggattacaggcataagccactgggcccggtctggtcttaaactcttgagctcacctcggcctcccaaagtgccaggattacagatgcgagccactgtaaaccacagacatgcaccaccacacccggctatttatttatttattttgagacaaagttttgctcttgttgcccaggctggagtgcaatggtgcaatctcagctcactgcgatcttggcttacagcaacctccacctcccgggtgacttgagaggagggtaacgcgtggcagggaccaccaagactgcttttggaagagacctgaacgcttgagccccggggatggggaagagttagcctggccctaagaaggggagagtgcggggattggcagcaggcccggcccgtgcaaaggcctggagatgagaataagcatcctgtgacctgggaagggaaagacaattagagaggatgggccagagagaacacagcagtgtgcgcctacatcctggttcagtgcctgtaaggatggagaaggaccttggctcccctgctgccaggttatagcaaggagatattctggaaaaggaagccagctgggccgcgtggggactaggatggagcaagtgtcccctctcatccctcactctcctctctccctcgttggactttctttgcctcatgatcccacagcctcaaccccaactccatgagactttgccagatcctttttattgtgtcaagactcacaccgtttgacctcaggaagttaccaaattggccttttgagtgttatgaagataataatagcagggcagcgtgtgatgactcaggccagtaatcccagtactttgggaggctgagatgggaggatcccttgaggccaggaatccgaggctgcagtgaaccgtgagcgtgctgctgcaccagcctgggcaacatagtgagactccacctctacaaaaaaaaaatttttttttaattaaccaggtgcagtggtgcatgcctgtaatcctagcactttgggaggctgaggctggaggattgcttgaggccaggagttcaagagcagtctgggcagcacagtaagatcctgtctctacaaaaatattttaaaaaattaaccaggtgcagtggtgcatgcctgtaatcccagcattttgggagtctgaggctggaggaactgtctgaggccacgagttcaaacacagcttgggcaattatagcaagactcccatctctacaaaaaataaaaaattagctgggcatagtg

SEQ ID NO: 8145 - DNA, 6000 bp, Homo sapiens
ctcgaactcctgacctcaagtgatccacctgctttggccttccatagtgctgggattacaggcctgagccaccgcatctggccaacctgcggatatttgggggaagagttccaggtggacagaactgaaagtgcaaagggcctgaggcaccagcatgcttgctgtgtccagaaacagctagaccagtgtggctggagctgagggcaggaaggtgactgggcgttatctagcaggactgtgtgggccacgcgaggactttgacgtttcctctgagtgaggtaagagctattagggctctgagtagaggaagatcatgatctgaatcgagttctaacaggctcccacagggtcagatgttaccatttattaaatatttactgagtgccagacactattctgttcaatatggtttgatctcatttcattctcacatggaccctgtagggaatatcattccatttcacagaaaagaaactgaggctcacagagtttaagacactgacccatggccgcacagcaataatcttcagcgcctgggtgccaaggtaaagtaagccagcctctccctcccccaagcatttcagacaaggatcggtggctgcagagcgcacccgtcttcgggaacggcgtctgtgtccctgtctgtctgtttctatttccacacgtccctgtctgtctccacgcgcctctgcctgtgcgtcccccatctgtgcccaagccgccgtctctctgcgcccggcccccgcacatcggagctatttcgggtttaaggcttaaaagcccaacagctcggaggagacgcttcctccggcccccggctcggaccacgcgccgcacgcggccagctctgggagctcccagttttttctgcgggatccccgagccggggaagcccccgcgggaggaagggtgggggctggggcgacccgggcccggaggctctcggccccccagtggccaaccccggcattgacgccgtcaggagcccagccgtgcgtcagctgtcgccctggcaacgggggcgacgtcaccacattggtggtgcgtcagtccgctgacgtcacgccccaggagaggcaataggcaagtggcgggggcgggttctaggcccgaccggcagggggagccctggggcactgatggcagatgcgtttggcttggtcttgtaggaggccctggccctgccgacatggccaccgcagtcccaacggcgcgctaggttggcgagatgaagaggagtcgcagtgccctgtccgtggcagggaccggggacgaggtgcgagaggaggggcttgggctaggggcggggcttcgccccttgggggagactagcgccctctagtgaccacggctatttcctgaacgtggcttcactacctccaagctgtgaggagtttggtcccctcgtgcctcagtttacccccttgattccattttttctcctgctgccctaagaggctctcagccggcccagggacagcaggcaaaggcttctcaaatgaggagaggattttggcgaggaggtgggagggggcgctaggggtggtgaggtcttgagagtctcagatgtgagggatgggaggggggcattgacattaagaccaagaggggccctcttagacgtggaggttgggaagagaccctaaaaaggtgatgtgttagagaggtctcacacttgagacagaatgtctagatgtgacagaccccaaggctggggcatcgagaggggaccccacaaaaattatggctgagaaggggcactctcagacctaagggatggcagggcaccctctgtgtgaggggtcagcgagtggctcacacgtgaaggggagcctataccgccattaactactcccttagacagctaggtaggggtgttcttggggagaggggctcagagcttcccagccaggccacgcccctattccactttgtccctccccagaggtcgagggagacccccgaatccgaccgtgccaacatgctgggggccgacctgcgtcgccctcgccgccgcctctcgtccggtcctggcctgggctgggcccagcctgagccctcggaccctggggtccctctgccgccacggcccaccaccctgccgctgctgatcccaccgcggatttccatcaccagggccgagaacgacaggtaggtaggagagggagcagagtgggaggtgggttggggaggcacagtgccaactgggctaggtccagccaccagcccttcccgatctccatgctccctgccgtttgcaaaactagctgcaacttgtcctgtggcgggctgtgacacccctaccccaaggcacccttcgcaggctctaggaaccccttatttcattttccagctgcctgagtcagcaaggggcaggactgaggaaaggggtgtcatgtctccagcccccaagatgctcccatattcacagagctggggcaggttgatcaggcggctgtgcaccggctttcatgtccccgcctgggaggatcaggtttcttctccgccttgaaggggatggtggagtcttggaaggggtctggactagtatttttctttctcctggggagatgtgagaaatatctgcgagctctgggttcacacagcacctcctgctgattctcatctggggaccttccaggtacccaaccagtttcccagagtactcaacccccctcttggctcaagaatgagctggaaagtcagacagctgagctggtcctggcttctggccggcccctgcccccatgccctcctctggtcaccgctttcggcagttccaatccacccccacccccatctactcaattggagggttccagggtctctgtttccgtcatggtccaatggttcatttccagatagggagagcaagtgactgtctctcgcccctggagctgcttaattatacctctccacgcccatcccactagcctcaggtccagatcagtttatcccccagctcaggccaccgctcctcgtttcctccttcttctgcaaccccagctgtgtcctgacacccccacccacctcacattacgcactcccacccgcttccagatctctaaccaacgttacagcataccccgccaagaatttggcccagcccaggactctcaaatatgatctggggagaactcacagcccctgcaaattccctagaagccgttttgagtgtgtaatggggggggtgttcctgagagaagtggggaacacagttttggcccttggaatacccggcggctgctgatgggggggccggtttttgctcggcgttcgcccacgccgggagccccctctggcggggagaaaagtggctgtgggggttgaagaccggcagtcttttttttttttttttttttttttcaaataaggagaagggcgcggggggagggcggtggcaaacggcatcgcgtgccctggggagcccgtgacagggggcgcacgggggcaggggtctggtccccgggtcccgcagcagagcagtttcgcgttcgagctcttatcggcgtggggggggggggcggtgggacacgcgggcgcgtgcactccccccgcccagcagccatccttgggggggttgagggggatgggggcgcactcggatcccgctcgctctctgcttgctcgctcggcgcggcgctgggggaggcgggagcgtgagtcacggcgactcccgatttaggtgccggaaggggggctctgctggcgggggccgcagggaggaggctcgcctgtttactcgcctgaaaagggcacgggggtgcgctccgcggctacctgggaccttcctcagtttacctctggcagaagcgctttagaagaggcagcgatgtatagagcggtgggccggcagctgcggtatccgccacagggtgtcttcctggagccacaagggaaccaatgggacacaccccagaaacaccccagaggccccaggccgaccacacacatacactcacgcacacgcacacactaacatacatagacgtcctccgacactacagtcagacgacagaggccgaatcgcgtgcacaactccgcaagcacacaccgaccacaaacgcatccaagcgcttgagaacacattcacagtccccaggccacctgaaaaaagaccacgtagggatgcacatcctccaaataggtagcacatgtgcgcacacatccttcacccacagacacacacagttatacacacagccaaatccagagaaacgggcagacaacagcagccaaccacgtgcgcacacacacttccagccgacactgaaaacacagacaaccctcggaagaggccacgtgcgcgcacatcccgccccgggcccgcaccatcactatcctccgacgcacagacaggagatcccacacactctgccgccgcccgctgcaggtaccgcgccggtggcactaggaccactcctcaaaaactgccccccgccaggggtagcggcgaggacacgccaacaccggactccgccctcgccatgatggaccgactgactgacactctggcaaccagtccggtgtctgcttccagatcggattaaccgtttaactccttcgtgcctgtgcgcgccgcggccaagcagggtgctttgaagacagacgagttccagcgccccctcccagcccggagcggggatctgcgtgggcgggaagggcccccctccttaggtagctgccccccgctggcccggacggaggaggaggggggcggcgctgacagccgcggcgggcggggggcggggaggggcgggacggggcggaggagccggggctggcgccgagcgggccgcggaacgcggagcgcggagcgcggagagcgccgccgggcactgagcagagctccaggcgccgaaaggaagctgcagagcccggcccgggggcgattggcccgcagcgcccccgggtctgtccccggggcgccatggccctaccgcggccgggcgcacccgcggggccctgggctcgctggcttgcgcgcagctgagcggggtgtaggttggaagggccagggccccctggggcgcaagtgggggccggcgccatggaacccccgaccgtcccctcggaaaggagcctgtctctgtcactgcccgggccccgggagggccaggccaccctgaagcctcccccgcagcacctgtggcggcagcctcggacccccatccgtatccagcagcgcggctactccgacagcgcggagcgcgccgagcgggagcggcagccgcaccggcccatagagcgcgccgatgccatggacaccagcgaccggcccggcctgcgcacgacccgcatgtcctggccctcgtccttccatggcactggcaccggcagcggcggcgcgggcggaggcagcagcaggcggtaagactccccgcggcggatgcgcgcggaacggatgggcgcgcagggaggaggcaactcgagctgccggccgcagggggcgctaggatgcgggtggggtcggtttggctggcgggggcggagggaattcggctgcgggggcgtctgggacctggcccctggttgtgcgctctacgggaggcttcctgctgaagcccatcctggggtccatttagggggcgccacgctgcgcgtggtgttaacgaggtctgggttggggaagggggctgcacacttaggggtctgtattcttggtgacagtgcagaacagctgctaagctgggaaccacttggagggaccttcctgggggcactatactgagggctagattcgcagtgtttggggtactcttggagcactccataagggggtgcctgctaggaccaggatctttacttcagggtggggtgctctcagggtccttctaggggatggaggactctattgcggggatgttagtggactcctcctgcagcagctggggtcagaaatccagagggtgcctcttgggggagcactgttttgggagccttgcgttagattggagttcccctctcagggcaagagtgttagcgttaagtagctgttca

SEQ ID NO: 8146 - DNA, 6000 bp, Homo sapiens
aggaggtccccctgggacgccacatgggccccacgtagctgtgagatcctcagggcctgctgttgtcattatgaccaataagcaaggggcccagagagcctaagagacctgcccagcaccgcacagccagaacggggcgcagacccaaagcaggagtgtcccctcgagacaaagcctccgccgaggccgccgtgactccccgcccatcagcaaacctctccgagcacctctgtgtgccaggcactgtggagtgaccccaagaggtggagaccacttccccggctgctctaggcagctccgtcccacggagccagcgggaagccagccaccgcgaagccgtgccccggagatcgtccaggagctgcccagaggggcctgctgggaggaggagcactggagagacccagcggccctgctggccaccccaccataggcagggagcagttcgcagaggccgcctacggaggggggtgcttggactttgaaaaacacctgacttgaaggggcagacgtggggagggtggtctcggcagcaggcacagcagaagcggaagtgtgggggccagaagggaggcagggcagccattgaaagcaccccaaggcctgagtgctgaagaggctgtgcccttggttctggtcttcctggggtcacccggttctgggtcccagctgctactgccccccacttcccctgtctgcccagctgctggctgagggtgtccctctctgtccccccaactcctgcaggacaaggaagccacctgtcctgccctttcttttttttcattttttgagacggagtcttgctctgtcgcccaggctggagtgcaatggcatgatctcagctcactgcaacctccaccccccaggtacaagcaattatcctgcctcagcctcctgagtagctgagattacaggcgcctgccaccatgcctggctaattttgagttttttgtttgtttgttttttgagacagagtctcgttctgtcgcccaggctggagtgcagtggcacaatctcggctcgctgcaagttccgcctcccgggttcacgccattctcctgcctcagcctcccgagtagctgggactacaggcgcccgccatcatgcctggctaatttttttgtatttttagtagagacgaggtttcaccgtgttcaccaggatggtctcaatctcctgacctcgtgatctgcccgcctcagcctcccaaagtgctgggattacaggcgtaagccaccgcgcccagccttgtttgttttttttgagatggagtctcactctgtcacccaggctggaatgcagtggctcaatttcagctcactgcaacctctggcctgggttcaagcgattcttctgcctcagcctcccgagttgctgggattacaggctcctgccaccatgccccaataattttttgtatttttagtaagagatggggttttaccatgttggccaggctggtctcgaactcctgacctcaggtatctgcccacctcggcctcccaaagttctgggattacaggcgtgagccaccacgcccggccttaatctttgtatttttagtagagatagggtttcgccatattggccaggctggtcttgaactcctgacctcaagtgatccacctgccttggcctcccaaagtgctgggatgacaggcgtgagctcctgcacctggcctgtatccccgtttctaatgctgtagcagaaggatactgtcatccctgcccacgtgctgtgtgtgcccgggatgcccctcccagagagcggctctgaggtggctgctgccaccctcctccctgcgggccagttctttcagggctcaggtggggaccctgttttggccccacattttcaagtccccatgggatccatcagtgcagccaccaaatcagtactgagcacccacataggctccccatgccgggctctcaagggacgttgggtggacctgacctgccattcccacgtcagggattccaggctgcatttgctaccctggaggaacaggcaaggcctgcgctggggtcctggcccctcagtgcaggagtcagtcctccgcgatgcggcctcgcagggcaggagtgcgctgccctcggtgcccagggcccgggaacaggggtcttgtggaagctgtaggatcgggcagggtggagtgagcacagaggtgggccctttagagggagcatggaggcagagcccgaggcagggagaggcagtgctcctgcaggtgaggtctgggctcacctggagcacaagggaggcccctgctggcccaggctgggcaactgggagctggcagaggcatgggttggcctgggcagcaggtgggcagcgtcatcctgactggaaggacgagcagtgggtcttggggtgatggactgggttgtgactgtggcgagtttaggggccgagggccgccaggtggacgtggccaggcaggtgtgtattcaggcctggcacttcaggccgaggccaggcctggtggaaattcgcaggtcatctgtgccgggaggggcgttgaaggctgggttggtgacagaggcccgagagagaggaggacacaacaaggaagacagggcggccaggctggagccctgagaaagcagagcagcctaggggcaggagaagcagggggagcttgagggggtgggggctcctcaggaggcgggacggaggtgttggaggaacgcaccctccctccctccccagatcccacccagacctgggacccctcacgcaggcacagctgggaagagctgtccgtgtccctgcacacggccctgcctgtgcctagccctgaacttggccctcactctgccctgctgctcaggaaggcgtctcctggctcttgcagggtgggtggtccgagcctcagtctctcctagcacgtctgtgctggcagaggggactggccctgcccgcaggcagccatatattcaggtcccaaaaggcttctgggttgggaagtaggtccggcaccccgacctcccaggacccccatagagagcttccaggagcctgtgcgctggtgcccgtggcacaggcaggattgggggctgtggtggggccgggctgtggaggaggaggaggaggaggaacactcggtgctccaggtcgcgacccccacccgcttccgccggctctgtcacctgctatctcaggccctgcctcgactgaactaactgctttctgccgcccgccgtgccccgccccgccaagctgagctgaggccccaggcccgtccaggttgggagcaagtccaccgggtcagagagggcagctgggctgagccacccctcgtcttccatgggggattcgcctcttttatgttctcctgtctcttccttcctccctctgcctctcttgcacctcctcgcaccctgctcttccgcgccctcctgcacgcgcgcccacctgccagcccaccgatgagaggagctgggtgtactccccgctccactatagcgcccaggcccccccggcctccgacggcgagagcgacacagtaagtgcagcccaggtgcacccgccggtcccgtgggctccaaggttctactgagcgtggtccccagctactgggataggcagggactgaggcccggggcgggagggcacaggtggcccagagctccaccctgggctctctggctctgaggtggccgtgggctaagtgtctcagggcctgtgttggcccaaggaagccagtccctggcagggggcctggggtgggccctcgccccgcccaccttcacctgtcctcttgctcttgcagtaatttctatgcagcccccgacccagagccgagctccacttctgctccggctgcccccgaaggcgctgcccaccccgctgaggcccagagctcgggagatgcccgcctcgccgccccaccggacctcgtcctccccctgcacggatgccgacggccgggcccctccccgacaagcctcccagggccccggcaccccggtcggcagcctgcccctgtgagacccaccctcccgagcggccaatcgcatttgagtccttatttggcacagagacggaagcacgtgtgtgccgttttaggaaaagaacaaaaaagacacaaacaaaccaaccagagggagaagagcccctgcccactgcactctttggttctctgctgtgcctgcctgtgtcctgaggaagaagccaggctgttcgcggtggcctctggggacctgagccccgggggccccatcggcctgcagaggggacggctggggtcccgagcaactctgcctccatccacgtgggaagcggaccctcctgccctcagcttgggtttgggggcctcagtgcaggacatctggcctgaacatcgactgtggggacagccctcgccctgccaagcactgcggccactcagcagctatgttcccgccgcagtggggccctgacgcccacctcccaggtgcccctcgagcaaaaacctctggcgcctccaatccagacccaccacagctggagggccaggcctcctcttccccaggctgccacccacgctggcggagctcagggctggggacttgtccttctcttccaacgtaggccactcagcaactggcatggagggcccaggcaacggagacgttttctccatggcaggacagagcgggaggccgggccttgggccacaggagaccagctcagggcggaaggtcaggctccccgccccctccacgtggagacatggcctagggggccaggcccggctccacaggagtctccttcaggactggtgtggatgtccgccgcctctttcttgtttaagtgatgtgatgtctccgaggaggggagagaagactttgtttccgactcatcaccctccaagagggcagcgctcccagtggtgggactcagcccagactgccctggggcagcttcctgggcccgctgcgctcagagggtgctggttggaggccagagctcggcagagtcacccaccctgcccttccccaggacccctgagaggggcttattggtgatggctgtgggaatcccccacttccaagatgtgcccaggatgtgaggagctggagtggaagctgcacctttgggaagaattcctctccagacctggcagagcctggtgtggggtctgagacggccggagaacctcccaggcagggctctgtgttttgtctgttacaacctccgtatgacgccacgccacccgctgttcacgtcccgtcggcctcctgcacagcccacacgctgcgcccggaaggcccctgctgtggagaagccggacccatccccgaggtccccagcgaggacacacactccacgagagcagcccctccactctgcccaggagaggggccgaccctcctcgggaaccggccagccgcgtggctcccagcatccatcaggacaagcccacgtggggtcctccctgcgtgctcagagggtctgtccagccctgggaagcgaccttggcctcagttcacagcctggtgctcatctgctggcaccgggcatccacccatcagcccccgccctgtccctccgaaggacacccagcaggcaccccccggggaggcaggggcagaggtcagaaggggtgtctgggacctggatggccagcagggacaggggcattgtcatctcaaaggcccaacccccagaggccacaccagtcctcccagggagtcctcgagtcgccctgcccagagccctggcaccagagacgccaagagcctgtggggtgactcggagcagcaggtgtggccccgggcgggcggcaccgcgtccagggcagcctccctccgctgagtgacacgggacaccagtgcccggccgacgcgcctttgcaggagaaatgtgcaaacctctgtggataccatttcatttccattcttgtgttgtctccaaggcccttttggagatatacttggtgttggttgtgttttttggttccttttcagagaactgtaaaccgaggctgacgtgctccactgactgtgccg

SEQ ID NO: 8147 - DNA, 6000 bp, Homo sapiens
ttctacttgctgttctctctgcctggaaccccttccccagacatccaaatggctcctccctcacttccttcaggtcttgaacaaagacttcaggttttgaacaaacgacgcctacgtgtgcaagcccaagccagtcaccccacaaccctcacgtccccccacatccttttttttttttttgagacagagtttcactcttttgcccaggctggagtaaagtggtgtgatctcggctcactgcaacctcggctcgctgcccccaccccgccaggttcaagcgattctcctgcctcaggctcccaagtagctgggattataggcgcacatcaccatgcccggctaatttttgtatttttagtagagacggggttttaccatgttggctaagctggtctggaactcctgacctcaggtgatccacctgcctccacttcccaaagtgctaggattacaggtgtgagccaccgcgtctggcctgttttttttaagagatggggtctcactctgtcacccaggctggagtgcagtggcacagccatagctcattgcagcctcaacttcctgtacccaagcaatcctcctgcctcagccttgtgagtagctgggaccacaggtgcatgccactacatccagctaatttttttttttttttaatttttagtatagatgaggtcttgttatgttgcccagggtggccttaaactcctgaccttcagtgatccgcccccttcagcctcttgaaattctgggattacaggcgtgagccaccattcctgggtccctccagacattgatcaggatttgtaatgatagaaatgtcccctgccttctccttttcttctgtctcactcgtccctcaagttcatctcaagagcccattctcttggatacctcctcagagaccctcagcctgagggaagaccccctgttactccctgcactacttcttcaaagcactcactgcagcatgtggttctagaagtatcactggcattaagtggttgatgtccgtctctcctagtagctccatggacaaccaccagatgttttcttcattccttctcttccttgatcctatcccagaccctatgcctgggacagaagagactctcatggatatcttctttttttttttttttttttttctttgagacggagtcttgctctgtcgcccaggctggagcgcagtggcgcagtctcagctcactgcaacctccgcctcccaagttcaagccattctcctgcctcagcctcccatgtagctgagattacaggtgcccgccaccatacttggctaatttttgtatttttagtagagatggggctttgccatgttggccaggctgttctcaaaactcctgacctcaggtgatccacctgcctcaggggtgtcttctaatcagtttggaagtttatgatttgtgtctagagttccctggtacttatttgcatttctaagcctctgataagtcctgcagtaacaaaacttgtttcacccagtgacacacatttatttgaccacagagcatccttttcccagcacacctggtaagattaccagtgttggaaggagtatggcttgggaaacaaagccataattggtcactggattatctgagcattttgtctgccatcactttgcctgggtggctccaggtgaggtgggggcacagcagggttgcacttaacatttggtggccctgatggccgggcacggtggctcacgcctgtaatgccagcactttgggaggctgagacgggtggatcacctgaggtgagatccttttttttttgtgagacagggtctcactctgttacccaggctggagtggaggccaggtgttggagacaggcggaggttgcagtgagcccagatcgcgccactgctctccagcctgggtgacagggcaagactgtgtctcaaaaacaaacaacaacaaaaaacaaaccaaaaaaaaaaaaaaacattaagtggccctgagatagctccagagccgatatgtcactgtgggctggggaagcagagaggaggtccaggtttgggggttatttgagtggatctctgttctaatggcagtcacagagacagtgttgtgtgcgtgcaaatctgtgtgagagaatgaattctggtcttggagaagatttgagtcctccaattccttgccgtgttccttaagccctccgcacctcagtcttgccatccgtgaaatgaggctccttaaggagggcctgagatcacacacaacaggcactggcatatgcccggagcccagcaaagggcatctgtggtttccttgggcccccttcctgtcccagtgagggcgaggcgagaccctcactgggattccggtctctgacccccacctctttgcagactctcttccagaacccagaagagggctggcagctgtacacctcagcccaggcccctgacgggaaatgcatctgcacggccgtgatcccagcgcagagtacctgctctcgagatggcaggagtcgggagctgcggcaactgatggagaaggtgagaaccttccaggtaccctgggggcagctgggaaaatctcccagttctcaccccgccctccagccccatccaggtcagccagtggccatatccagctatgcaaattattcagagctggctgataatccagctcctctccaggcaggtcctttttttttttttttccttttaacacagggtctcactctgttacccaggctggaatgcagtgacatgatcagctcactgcagcctcaaactcctaggttcaagcaatccccactcctcagcctctgagtagctgggactacagacatgcaccaccatgccctaatttttatattttttgtggagacggggtctccctatgttgcccaggctggtctcaatctcctgggctcaagtgatcctcctgcctcagcctcccaaagtgttgggattacaggtgtgagccaccatgcccagatggatactttatccaatatctgttcaatgtattttttttttttttctccttgagacagtctcactctgtcgcccaggctggagtgcaggtgcagtggcgcgatctcagctcaccgcaacctccacctcccaggttcaagcaattctcctgcctcagcctcccgagtagctgggattacaggcgtgtgccaccacgcccagctaatttttttatttttagcagagatggggtttcaccatattagtcatgctggtcttgaactcctgactgcaggtgatttgcctgtcttggcctcccaaagtgcggggattacaggcgtgagccactgcgccctgcctgttcaatgcttttttgggagagaagccaagcacttactgggattggggtggggggaaggaaggaagactggaggggcagcatctgagtctcctgtgtgtgagctctggtccaccaggcatgtcccacccagctttgcagttcaccagactcacctactaagaaggagttctgtgccccttggggagggtctaaccctccacctcaagaggctcctataaaagtttccttctacctctgatcatggtcaagagaaaatagtcccctgggccgggcgtggtagctcacgcctgtaatcccagcactttgggaggctgaggcatgtgtatcacttgaggtcaggagtttgagatcagcctctaccaaaaatacaaaaattagccgggcgtggtggtgtgtgcctgtagtcccacctactcgggaggctgaggcaggagaactgcttgaacccgggaggtggaggttgcagtgagctgagatggcaccactgcactccagcctgggcaagacagagcaagactccatctcaaataaataaataaataaataaataaaacttacaaattgttgatttctggaatttcccacttaatatttttggactgtggttggcctcaggtagctgaaacgtgaaactgtggagaagggaagagtatgtaaaaatgttttgtggcgttcagggtgggtattaggctgctgagtttctgggagtttccaagtgtcatgtgaataattgtacaggaaagtctgtatttcaacaagcatccagtggtaactctgactgagtttaccttagccaggcagagtccactttagtcaggtgaagctggtgggaatctaccttagccaggtgagagtctaccttagccaggtaaaggtctaccttagccaggtgagggtctaccttagccaggtgagggtctaccttagccaggtgttcatcttagccaagtgagagtctaccttaacaaggtgggagtctaccttagccaggtgttcaccttagccagctggagtctaccttagccaggtgagagtctacttaagccagagatggagttcaccttaacaaggtggctaccttagccagatgttcaccttagtcagatgggagtctaccttagccagggggagttcaacttatctaggtggagttcaccgtagccaggtggaggtgggagctgggtgctctcaggttgggtcaggagaggccagggcaagggaagtttattttactcattcagccaaaaaatacttattgggcctctactccaggccagtgctgggcactggaggttaagctgtggacaagctagacgcagcctctgcctctgagggtcccacctgaaggaggcagatggataagaatgttctacatagtcacagctgggaaggaaatgaccaggcaagaggagagtgagtgagcggctaccggacagggtggtcagggaaggatgctttgagtgggggacgctggagctgaaccctgaaggatgagaaggagccagccatgggaacttgggggaacagcactccaggtagagagaccagcaagtgcaaagaccctgcagaaggaaggagcttagagtctgtgagaacaaagagagaggaagtgggttgggcggggggggtgggcaggaccagccagcacaggatctgtggaggaggaaggtgatctaatctctgttttgaaagttccttctgtctgctgtgtagagaattgactacaggggatgaaggtggaactgggagactagggaggaggtgagaggtggtggtaggtggaccagatgggagccagtgggtagtagggagggagcgatggatggatggattgggcacgcaattgggaggctgctggtaagctcaggggaggagaaggtggcctcgtcggtgtggtgtttgtacagcctctgttcctgccagctcttgtctgtggcatctctgggttgggatttggggaaggaggtctggtcccttcagttgtccccattcctaggtccagaacgtctcccagtccatggaggtccttgagttgcggacgtatcgcgacctccagtatgtacgcggcatggagaccctcatgcggagcctggatgcgcggctccgggcagctgatgggtccctctcggccaagagcttccaggtgggtcctcctgtgtccagaccagaggtcaaacaaatgactgggatttggtatccattagttcctacaatggagtcatgtctgggaagaatctagggtccaatatgagccacatgtcaagggccaggtgtgcatcaaagacaaagggtgaagttatgagtcagaggttggagtcatgtctgggtcaaaggccaggggtcaggcttggccatggttccatcttgatgcacaggagctgaaggacaggatgacggaactgttgcccctgagctcggtcctggagcagtacaaggcagacacgcggaccattgtacgcttgcgggaggaggtgaggaatctctccggcagtctggcggccattcaggaggagatgggtgcctacgggtatgaggacctgcagcaacgggtgatggccctggaggcccggctccacgcctgcgcccagaagctgggtatgccttggcccttgaccctgacccctgatctctgactgccacacccaactccagtatcacctgtttgtgcctagaagctggacacagtttt

SEQ ID NO: 8148 - DNA, 6000 bp, Homo sapiens
ggcagtggaaaaaaaggagggagcgaggtgacaggcagctcatgtaagggctcatagaccattaggccatgatcaaggttggctttaggcctcagtttacatctggcttcctaggacgggacaagcatcattgggctggaaggaaactcatccataaagggcttgtgtagcctcatggctaaaattcctgtctctgaagccagacagctgggtccataatccagctctgatctttctagattgggagaccctagccaagtcactcctctctgggccttggcttccccgtctctgaaatgggcctagtaaaaaccgtattcccaagggctgatctgacgaactggcaaaacaattcagggaagctaagggcattgaaaccttggtcggtgaacaaaaatgcatttctgggacaggtatagtggctcatgcccaacacactttgggaggctgagagggaggcggatcacttgagcctgggaggtggaggttgcagtgagccaatatcatgtcacttgcactgcagtctgggtgacagagtgagaccctgtcaaaaaaaaaaaaaaaaaaagaatatcacctggtgggtgtctggtgggtactttgtgaggattaaatgagatcataagaccaagtgtggtggctcacgcctgtaatcccagcactttgggaggccaaggcgggcagatcacttgagtccaggagctcaagaccagcctgggcaacataggaaaaccccatctctagaaaaagtacaaaaaattagtcaggcatggtggcgcacatgctactcagctacttagctgctcaggaagctgaggttgaaggatcacttgaccgcaggaagttgagactgcagtgagctatgatcgtgccactgtactccagcctcgatgacagagtgagatcctgtctcgagagagagagagagagagagagagagagagagagatattgagagagagagagagagagagatcatagctagaggcactggatgcacaggaagctttctaaagggttagttgctatcatcaccatcatcgtcattatcatcatcatctataccctctagctagtatagtgatttgcatattataagccttcagtaaatatttgtcaaatactgataataactgtagctcatattgagtgcttactaggttcagacacttttctgagctttttatgtgtccatccatggggtgagtggtagtattatacccattttacaactggggaaactgaggctcaatgaaatgaagtgactagcccgagatcaaatggctaagaagtgccagaggccacacgcaagcccaggcttcctcactctgggccccatggcatcagagccaacactagagaaggaaggatatttcacagaggtggactcgaaaatagagattcactgttgggcgcagtggctcacacgggtggatcacttgaggccaggaattcgagaccaacctggccaacatggtgaaaccccatttctactaaaaatacaagaaaaatttgccaggtattgtggcacatgcctgtaatcccagctacttgggaggctgaggcacgagaatcctttgaacctagcaagcagaggttgcggtgagccaagatcgtgccactgcactccagtctgggtgacagtgagagactgatgaaaaagaaagaaagaaagagagaaagggggaaagggaggaaggagaaaggaaaggaaaggaaaggaaggaagaaatgaaggaaggaaggaaggaaaataaggaaaggaaggagaaaaggaaaagaaagaaagagagggacggaggggaaaggaaaggaaaggaaagaaggaaggaaggaagaaagaaagaaagaaagaaagagaggaaggaaagaaagaaaagaaaatagagattcaccctcttttctcttttttttcgtgagacagggtctcactgtctcaagatggtttagtggcaccttcataactcactgcaacctcaacctcttggctcaggtgatcttcccacctcagcctccaaagtagctgggaccacaggctcatcccactatgccctgctaatttttgtcatcttttgtagagatgggatctcgccatgtcacctgggctggtctcgaactcctgggctcaagtgatccgcccaccttcacctcccaaagtgctgggattacaggcatgagccaccacacctgccttctaggggtgtcttaagagttgtaagacacatctcagaagctgtgggtggcattctaggttgtccccaaggactgtggggtgcatcttgggattctgttctagggtgtgagactgtcttaggagctggagaggaatctagttgtgtccctggggtctattggggcaccccagattttgctggcatctccatggttactagggcatcccctgagtctgaaggcattcccgaggttgtcttggggtctcagcacttgtgggggcatctcagagatgctgtagaaccattcagggattaagggacatctgagggactgtggaggtgttcctggggtctgtggagaactctaggatttggtgggaacctatattcggtctatgaaaatggctctgtgggtgtgggggattctgggggtactgagggagggtctatgcatgatgggatgatgagagttggggatgatggggagctctggaggaattttgggacatctgaggaactgtggtgggggttctgggatctgaagggttttccctgggctctcagagcaccactggcagggagtttgtgggagtgcccccagagatttgggggcatccctggcatttgtggatgcaccctgggattctcagggcactcctggggcttgtggcatgtcccagaaacagtgagaatactgctaggattatgggggcatctggagagctatgagagtgccctagggtttatgagggtgtctcagaacacctctaagttgtgctgagaagccccgggatttgggggggtacccctggacttcttgtgtggggttgtctcagggacaatgagggtgctccttgggattctgagagactgtggggtggctcctggggcttgtggggcctgtcaacaccacggggagtttgcaggagtgtccccacagatttgggggtgtccctggtgtttgtggggacgcgtccggcgattgtgaggacattagagccaacgcgggcggctttggggtctgcgggagagtccccaccagagccgtgcgggcgccccagacccgccccgccctgggggcggctccagcgcgaagccggaagggccgaggcgacagggcggggtggggcccgcgggcccggggctgggcaggcggcctgcgtgggcctggcggggtgggcggcgcagctccccagcgcccgccgaggcggggccgccccgcggccatggcgcggccgcgcggcctaggccgcatcccggagctgcaactggtggccttcccggtggcggtggcggctgaggacgaggcgttcctgcccgagcccctggccccgcgcgcgccccgccgcccgcgttcgccgccctcctcgcccgtcttcttcgccagcccgtccccaactttccgcagacgccttcggcttctccgcagctgccaggatttgggccgccaggcttgggctggggctgggtaagtgcagcgctggtggccgtgggttcaagtcgcccctggccacctggcgcactccagggtctagggttcgtggctcactctctccagcctcactttcctcttctgtcacatagcagcgatcaaaatcatccctgaccgccagggttgccctggagacctctgatagggcatgcagtagacgtttaataaatgttgcatccttcccacttcctgtgcaaacctgaagctgcggtcacgctttggaggagtgagggcgacctgccatccaggtcatgtgttcatcctggggtatgtgttcagttctgtcagcctcagtctactggcctgtgaaatggggccagtcatgccttctgtgggtggccttgcggtgaggcttggtgtcactcctagtaccgggccacagagggcaaatggaagttccctttctggccagacggggtgggctgcgggggcttgaagtctgggagtgacaggccccgaggccacatccagtctggctttctaatgtccttatatcctggaggcagaagttggcagcccggagttgggcactggctggccctgggggcttctccgggtcctcagcctccccctcttccacctactttccacgtgcaattgaggcacagactgaaggagggcacggcggggcaggaccgggcccagcgactggccccaggaacgaaatggggcggggacagaagaggaagaggggccagggcctttgggagccccgcgtggggtccgcagggtgtgtgtagggaaatcgttgcttctctccgggtctctctctctgcgtcctgcgtctctgtctccacttctgtctcttctgtctctgttttgtttctccttcccaccgctgagctgcaccttcccctcccctgggtttatgtcacccggccccacactcgagtcccgtttccccgggggcgcacggcgatcagcgatcagagacctcgagcgggcccagctcgacgtcagggcggggaggggggaaaggcggggccggaggcggtggcaggagggcgggcccggagccgggaaaccggagccccggggcaccccagaggcctaggagggaggagacgggggggggggggggaagtgtgcgtccgactccgcaggacccctgcagggggaggcagacagagcgcccgtgcgctcccctcccccgtgcagacccgggaacgctcgaccgcccggggctgtccctgggggggtcaccagaggcgtggaggcggtgccggcagtggaggccgcagacaccttgggcctggccagcagcgcgcgccacaccgccctgccgccgtccccatgcgcgccccgacgacggcgcttggctcccatgcgctccggtgcagcgccccgggcccggccccggccccctgccctggcactgccccccacgggccccgagtccctgacccacttccccttcagcgatgaggacacccgtcggcaccctccgggcagatctgtcaggtgggtggcccgtggccagtcagtcctctcttttaatactgaagggcactggctgtgctgggggggtgggggtgctgagtctacctgggtgagtcccctaagtggcttccaggatctggctggggccccaccccctttcctggctctaaaggcctggggtgctgctgagggcttcttgaaggtggcagccctcaaagtgggtgctgggtccattcctgcctatccaaggtaggacccgtcaccctctttgtgtccttaaacctgagcttctggcattcactttggctgcaaatatgggtgtccagcgtcacctgggctccactcccaggccactggcctagaaccagatccctaagtccctgcctggctcagtgtctccagccttaccttccccaccccctctcatgctggagctgccaggctgaaaaccaagctgggttgggggtggggaggggagattctgggtctcatggagggtgtttagaataggctggactgagctggggctgtgagtggcctttaagttctcagaattctcaggggtttctagccttgttcttgctttcctgctccatggtctctaacacagacacacacacagggccgcacacagggcaatccgggtcacctggtgtttaccgtactaggtatgggtctcctggctgcaccaagaggaccctgcagttgactcatggccacacacaggtgacacacagaccacagcaaccctggcccagccctcgcacatcctcgtctacactgcgttcctccacagtgggggacactgtattttggtgagacacattctcacaaaaatacacacccagggcccacacatgttcctgtatgctgtactcccacctgcaccagata

SEQ ID NO: 8149 - DNA, 6000 bp, Homo sapiens
gctaaccatcatctgagccttcggcaagtcataatctttttcctggtggagggtcctgcctcaatgttgatggcttctgactgatgagggtggtggttgctgaaggttggggtggttgtggcaatttttaaaaataggagaacaggtcgggcggtggtggctcatgcctgtaatcccaacactttgggaggccgaggcaggtggatcacttgaggtcaggagttcaagaccagcctggccaacatggtacaaccccgtctctactaaatatacaaaaattagcctagcgtggtggtgggcacctgtaatcccagctacttgagaggctgaagcaggagaatctcttgaacccaggaggcagaggttgcagtgagctgagatggcaccattgcactctagcctgagtgacagagcaagactcagtctcaaaataaataaataaataagataataataataatacttgaaagtcaaatgtactccttgatcagtgggctgcagaatggacgctgtgttagcaggcatgaaaacatctccttgtacatctccatcagagctcttgggtgaccagttgcattgacaatgagcagtcatattttgaaatgaaacttttttctgcacaggaagtctcaactgttggcttaaaatattcagtaaacagatgtgctgtcacccaggctttgttgttctatttatagctcagaggccaagtacacttaacatcattctaaaggtccccaggattttcagaatagtaaatgagaattggtttcaaccgaaagccaccagctgcattagcccttaacaagagtcaggctgtcctttgaagccagtcattgacttcacttctctctagggtgaaagtcctagttggcatctacttccaatagaagactattttgttgggcaggcgccgtggttcacgcctataatcctaggaattagaaaccagacggggcaacatggtgaaaccccgtctctataaaaatacaaaaaattaggtaggcgtggtggcacgcacctgtaatcccagctactccggaggctgaggcatgagaatcgcttgacctgggaggcggaggttgcagtaagctgcaatcttgccattgcactccagtctgagcaacaggctcttcccatccccctgactctgactcagaaaaaaaaaaaaaaaaaatagaccaggagctgtggctcacgcttgtaatcccagcacttcggggggctgaggtgggcggatcatgaggtcaggagatcgagaccatcctggctaacacagtgaaaccctatctttactaaaaatacaaaaaaaaaaaaaaattagccgggcatggtggcaggtgcctgtagtcccagctacttgggaggctgaggcaggagaatggcgtgaacccaggaggtggagcttgcagtgagccaagatcgcgccactgcactccagcctgggcaacagagcgacactccatctcaaaaaaaaaaaaaaagactattttgtctacactgaacaatttgttgttgattgtagccaccttcatcaataattttagctagatttcttctgggtaacttgctgcagcttctttctctctctttttttttttattaaaacatgtttactttttaggccaggcatggtggcccatgcttgtaatcccagcactttgggaggtcgaggtgggaggtttgcttgagcccaggagttccagaccagcctaggcaacatggtgaaactctatcactacaaaaaatacaaaaattaaggccaggcatggtggctcacgcctgtaattctagcactttgggaggccaaggcaggtggatcatgaggtcaggaatttgagatcagcctgaccaacatagtgaaaccccgtctctattaaaaatacaaaaaattagccaggcgtggtggcaggtgcctgtaatcccagctactcaggaggctgaggcaggagaatcacttgaacccgggaggcagaggttgcagtgagccgagattgtgccattgcacttcagctcgggcgacagtgcaagattctgtctcaaaaaaacaaacaaaacaacaaacaaacaaaaacccaaaaaacaaaaattagctgggcatggtggtgtgtgcctgtaatcccagctactcaggaggctgagatgggaggactgctttagcccaggaggtcgaggctgagggccacaatgaatgggtaccatttcttgctctgtttgctggagaatacaggttacaatcagagtggtgagtgctttaatgggggtagaaaaacctgcagtgggggcccagaacatggactggggcagtctggctgaaaaatggaggtgacctttaagctatctttttttttttttgagatggagtctcgctctgtcacccaggtcacccaggctgcagtgcagtagcatgatctcagctcactgcaagctctgcctcccgggttcacgccattctcctgcctcagcctcccgagcagctgggactacaggcgcccgcccccgggcccggctaattttttgtatttttactagaggtggggtttcaccgtgttagccaggatggtctcgatctcctgacctcgtgatccgcctgtctcggcctcccaaagtgctgggattacaggcgtgagccaccgtgcctggcctaagctatctttatacattcatccatttgttcaacaaatgtctgttgagggcccaccaggtgctaaaggctaggttgaagaaatgatgtttacattagtttccattaatttacattgaactgaagtgctagctaaggcaataaggcaagaaaaagaaataagaaccagactgagcatagtggttcatgcccagcatgaacatgggttcatgtaatcccagcactttgggaggctgaggtgtgaggagcactttagtccaggagtttgagaccagcctgggcaacatggcaagaccccatctctacaaaacaacaaaaacaaaaattagccaggcatgatggcgcgtgcctgtagtaccagctgctactctggaggctgaggtgggaggatagcctgagcctgggaggtcgaggctgcagtgagctgtgcaatggtgccactgcactccagcctgggcaacagagtgagaccctgtctcaaataaataaataaataaataaatattaaaaaaaataaagaaatgagaactaggctgggtgtgatggctcacacctgtaattccagcactttgagtttgagctttagtttgagctcaggagtttgagaccagcctgggtaacatagtgagaccccagtctctatttaaaaagtagaaacaaaagaaccaaagtaggggataaaccagctagtacacagtagaactgttaggaacattacactatcaggctctcaataataacctgacattgaacaggttattaaaagcctattatgttccggattctgttcaggacgctcaggagatagtaaagaataatactacattattgttaacataataattaaacaaagttttcgtgccctcctgcagctaatattccagtgtgaggagacacagacaataaatgtaataaacaaattacatagtgtggtatgaggggggaagagcgggaaaagggggaccagaagtcctaggaggttgtattataattttaagtgggggtggggtaagaaagaaagaaatgcctgaaaggatgagatataagcaaagacctaaaagaggtaagggacctgcggattttttttttttttttttttgagatggagtctcgatctgttgcccaggctggagtgcagtggcccgatctcggctcactgcaacctccacctcccaggctcaagccagtctcctgcctcaccctcccaagtaggtggaactacaggcgcctgccaccacgcacggctgatttttgtatttttagtagaaatggggtttcaccatgttggccaggctggtctcgaactcctgacctcaagtgatccacctgctttggccttccatagtgctgggattacaggcctgagccaccgcatctggccaacctgcggatatttgggggaagagttccaggtggacagaactgaaagtgcaaagggcctgaggcaccagcatgcttgctgtgtccagaaacagctagaccagtgtggctggagctgagggcaggaaggtgactgggcgttatctagcaggactgtgtgggccacgcgaggactttgacgtttcctctgagtgaggtaagagctattagggctctgagtagaggaagatcatgatctgaatcgagttctaacaggctcccacagggtcagatgttaccatttattaaatatttactgagtgccagacactattctgttcaatatggtttgatctcatttcattctcacatggaccctgtagggaatatcattccatttcacagaaaagaaactgaggctcacagagtttaagacactgacccatggccgcacagcaataatcttcagcgcctgggtgccaaggtaaagtaagccagcctctccctcccccaagcatttcagacaaggatcggtggctgcagagcgcacccgtcttcgggaacggcgtctgtgtccctgtctgtctgtttctatttccacacgtccctgtctgtctccacgcgcctctgcctgtgcgtcccccatctgtgcccaagccgccgtctctctgcgcccggcccccgcacatcggagctatttcgggtttaaggcttaaaagcccaacagctcggaggagacgcttcctccggcccccggctcggaccacgcgccgcacgcggccagctctgggagctcccagttttttctgcgggatccccgagccggggaagcccccgcgggaggaagggtgggggctggggcgacccgggcccggaggctctcggccccccagtggccaaccccggcattgacgccgtcaggagcccagccgtgcgtcagctgtcgccctggcaacgggggcgacgtcaccacattggtggtgcgtcagtccgctgacgtcacgccccaggagaggcaataggcaagtggcgggggcgggttctaggcccgaccggcagggggagccctggggcactgatggcagatgcgtttggcttggtcttgtaggaggccctggccctgccgacatggccaccgcagtcccaacggcgcgctaggttggcgagatgaagaggagtcgcagtgccctgtccgtggcagggaccggggacgaggtgcgagaggaggggcttgggctaggggcggggcttcgccccttgggggagactagcgccctctagtgaccacggctatttcctgaacgtggcttcactacctccaagctgtgaggagtttggtcccctcgtgcctcagtttacccccttgattccattttttctcctgctgccctaagaggctctcagccggcccagggacagcaggcaaaggcttctcaaatgaggagaggattttggcgaggaggtgggagggggcgctaggggtggtgaggtcttgagagtctcagatgtgagggatgggaggggggcattgacattaagaccaagaggggccctcttagacgtggaggttgggaagagaccctaaaaaggtgatgtgttagagaggtctcacacttgagacagaatgtctagatgtgacagaccccaaggctggggcatcgagaggggaccccacaaaaattatggctgagaaggggcactctcagacctaagggatggcagggcaccctctgtgtgaggggtcagcgagtggctcacacgtgaaggggagcctataccgccattaactactcccttagacagctaggtaggggtgttcttggggagaggggctcagagcttcccagccaggccacgcccctattccactttgtccctccccagaggtcgagggagacccccgaatccgaccgtgccaacatgctgggggccgacctgcgtcgccctcgccgccgcctctcgtccggtcctggcctgggctgggcccagcctgagcc

SEQ ID NO: 8150 - DNA, 6000 bp, Homo sapiens
ttatagtcttgagccaccatgcccagcctacaaatattttttatttaagtaggcagcacacacaaaactgcacaaatcagtcacgtgcagctcagtgaaaaggtacaaaatgaacaaaacttaaaaagtgagcacacccatgccactgtcacccagatggagatgcttccagaatgtatccctttaccctcaaagcgactactcctttgacttctaaaggtgatcagtgttgctcattttttaatgttattatttacttatttaattttttaaaagaagagattgggtctcactctgtcgcccgggctggagcacagatcatgtagctcactgcaagcctcgaattcctgggctcaagccatcctcctgtcttggcctccagagtagctgggaatcaggatacctgggactacaggtgtgcaccatttttttttaaactttatataacaggaattatacaccatgttctgttctgtgtctgtcttcttgggttcagcatggagtttgtaaaattcatccatgcacctgtgtgtagctccatattgtcctttcttattgctgcataaaattccatgttctacagtgtatttatccattacggtattttggaaatttccaacttttagcaagtatgaatagtgctgcacattctagggcatatatcctcatttctcctgggtgtatacccaggagtgacattgttgggtcataggatactcaaatggccatgttaatagaaatgaccaaaaagtttttctttttatgtgtttgttgtcgttgtttgttttttgagacttgactgtctcccacactggagtgcatgatcttggctcattgcagcctcaaactcctgggctcacacaatcctcccactttggcctccccagtagctgggactataggcatgcaccaccatgctcaactaatttatttatttcctgaccttttcttttcttttttcttttctttctttctctttcttttctttctctctttcttctcttttctttctctctttctttccctcccccctccctccctccctccctccctcccttccttccttccttccttttgtagaggcagggtctcactatgttgcccaggctgctcttgaactcctgggctcaagcagtcctcctgcctctgcccaccaaaatactaggattacagatgtgagccactgcacccagccaacggttttccaaagtggttgtaccaaattcccctctgtccaacagaatacaagagtcagaaatgggttcagatccacgttagtgaccttgggaaagtttttaagtctccctcaccctcagtgtttgcatctgttccacggggctgctgtgaagactcagtgggagatttaccctggcaggagctccatcagtgagatgtcactctttcctgaaaaactctggggtcttcacagatctatgcaggtaatgctcctgctctaaaactgaataatcttctcagagaggtccatcagaacaaatgataagttcaactcagctcctctcatatgactggttcttcccatctgaacacatgggctcgcttcttgtttcatattagttgctgttcaccttttatatctgaaacaatgtcaagtacaaaaatcactgatatttggtgagcgccttaaaagcccctccttctccctgaatcccacacaattctatctccttgcaattccaatcactcttggtttaatcatttcatccatatcgtgacaagttagaaaatcttgaaagtgctatggggcaatgtataatagttggtgcattggcacagaacggggactttatataaagacatatcatctttccagagtgttccaaaagaactcgaatattgatatgtgtgtgtggggtggcgaggggggaagggaattaactaggatttaactagctaaggcttgaaagaatatttgcctttttcatccttttcccattcctctccatttggcctttctgcgtatacaagctccatgaaaattcaatggtttcttggtacattgaatttgcaagacagtttgatgacatcttataagcttgaagatatgaataccttgtggacccagacattccacacctaaggctattcctagagacatgcattcttatctgcaccaaaggtacctgaggcagtaatgtttaatagccccaactggaaaaaaaacagatacccatcaacaagatgatggataaacaaattgtggcatattctcttgatgaaatactatacagcagtgaaagtgaatgaatcacagccatgtgtgacaacaaacaggtgaatttttctaaaattcgaaacagattaggatgtatgaatcttgttttttttgtttgtttgtttttgttttgttttgttttgtttgacagagtctcactttgttgcccaggctggagggcagtggtttgatcttggctcactgcaacatcctggactcaagggatcttcccatctcagcctcctaagtagctgggactaggttcacatcaccatgcctggttaatttttattttaaaaaaggtttttggagagacagggtcttgctatattgcccaggcttgtctcaaacccctggcctcaagcaatcctcatgctctgcctcccaaagtgctgggattacaggcgcagacaccgtgccctgccagatgaatcttaaagacataatgttgaaccgaagaaacaagaaactgtagaatatatactatatgattattccatttatataaaagcccaaaagaagcaaagtaaaattgtattggttaggaacgcataataaggtagtcaaactttttttaaaaaagcaagatatgaataccataaagtcaggtagcgattattgctggaataaggggctgtgtaagcgtgttggcaaagggggttctgcagaggtggtgatgttccatttctagccctagacttgatttcatgagtgttcatttcagaccaatttcttaactccgtacctttatgttttatgcatttttctttgtgcttattgaatttcaccacacaaaaagcagaatgggaagtaatcaaagtggttctggagagacgtgagtatcaagcaaactataccacccagaacccctatccagccaactaggacctggttaattatttcctcctgggagttcagacttgtcacctctggggtctccaaggtagaataaacctttaattccaacttgcaggagtccttgtgatttgaaacgttcacagaagtaaccccaaaccactctctccactttcaaaaatggtcttttgctaaacagagcaaatttgtttagagactgacgaatcgcacctctagacacaaatccccttctcttttctgtcttttaagtttttttcctgcctccatcctgccttctccttgcaagatgctggggagcgtccggctgtctgcaaccgaaatggaacggggtggaaaacaggctttcctcccaggggaggaggaagcaccccaattcccccctccctgcctcccaaccatgcgacgctcccctctctcccccacaaactccgctgagcccggtacccccgcgcctccacgagcctccacgattggtcgcgggccctcatgtgtcgacactctgggtgggtccttctactgttaaactcatcaattgctccccttttccgtttgctggccagtggttcagacctttgcgcccatttttttttcctctttaccttcttctacccgcaaccctccacaccagtcttattttagcaaaacctagagaaggaggaggtggagggatttggagggtggagaggcattgccgcatccaggggcagctattgagtggctaagcggagggcgcatacctctctctctctctcttttccccctgttgggaattttcaggatttcactgctgcaatttaaccccaagatgaggcaccattgagcgaaacgctgtgcgcacatacacactcacacttcctccgggagcagaagaggcagccgttggtgattcaggaagaaaaaaaatttttttttttttttttaaacctggaccctgcggtgtgaagactccttaggaaccctctggagcgtcttactccccttccctcctctttcccttccctttcatcttctttgtttttattttattttatttttggagctacagatctttcagcatttttaaggtctaggaactccagcaaaacagaagggcacttaattttttttttttttttttttgccctccccacccagacctgggtttcgtctttctttatttttaaatatatatatatttttttattttttattttttatttttttttaatgggccgagcgcactccttttgcaagatgccagcctgacccggacctcggaggaatttgaagcttccactgcgtcccggggggggcgtcctttgcaaaccgttcgcgtcttaaagggggtgtgcgttgggtggattttttttttttaactgtctctttttttttttttccggagtgggtggactggggattgcctggattccttcctcggttattttttgcctcgcttctctctcccctcccccctcctccccgggcccccgcgccccgcccccgcaccctcctcccgcccctccttctccggggtcagccaggaagatgtcccgagctgctatccccggctcggcccgggcagccgccttctgagcccccgacccgaggcgccgagccgccgccgcccgatgggctgggccgtggagcgtctccgcagtcgtagctccagccgccgcgctcccagccccggcagcctcagcatcagcggcggcggcggcggcggcggcgtcttccgcatcgttcgccgcagcgtaacccggagccctttgctctttgcagaatggcccgcttcggagacgagatgccggcccgctacgggggaggaggctccggggcagccgccggggtggtcgtgggcagcggaggcgggcgaggagccgggggcagccggcagggcgggcagcccggggcgcaaaggatgtacaagcagtcaatggcgcagagagcgcggaccatggcactctacaaccccatccccgtccgacagaactgcctcacggttaaccggtctctcttcctcttcagcgaagacaacgtggtgagaaaatacgccaaaaagatcaccgaatggccatatccttttgcccgaaccccagcagcagctgcgcctccccctcctccctccgcctcccctcttccaggctgggagagagacccgggggttgatgggaggtggggaggaggggggtcttccaggggctgggagagggggcaccgggaggagtgtgaaagaatctctccaccccgagctgggttgagctaccctggaggcttgggaatgggtttgtggggggctggggggtgggcagcggagagtggatccttcccaaggaccgactctagaatgagatctggggcctggggtcgtgcaggagccttggtgggggctttcgagccaagtccggagggtttggagttctacggagtgagcttggagcgggctcgggcctgggcgcttctggccagggcaggggaactatgggggccttggttgggttttcttggccgtcgctcactggagtccacgcaggggaagctggacagcctctccactactgctttccccaaggtggggggccgccgcacttttagggcagggcgcttgggggctcccagggctaagagcaagagggagtccatgtggccttcacactgagaagccagcactggccgaagtgagtaccccagggtgggccgctgttcctatctggagaggatagtgatgggctggggggcgcttatgtttccctcatgtgtgcaggtcccattgcctttaaccgctgattggggaacctcatcatctttgggggtgtcgagaaagagatcccacttgctttatctgggcccctggcctgggaagacctgatctggacactttcagtaagaaagacagggcaacagcaaatgaggtg

SEQ ID NO: 8151 - DNA, 6000 bp, Homo sapiens
ccaggggcctctctcttgtgtctctggcttctcccgttttccttcgcgggaggtctctatgtccacattactgccccttgtctccgaggtccttttgcttgtctctgtaggctgctcccttgtctccatgggcctttctttcttatccctgggcttttcctgtccttgtccttgtggggtttgtgggcctcagcccacttctctggacagtcttgacggctgtctctcttctcttcatttctcttcatctctgtagccctctcccctcatctcagtggccttctccctgggtcttcttgcctctcatctctgtgggctcctgtgcccagggctgcctgggcagggcggtggcatggtgtggtagagggggtggctcgggggtgggccttccatccaatgcagctccttcttctcatcagcattctcctcgcggggggcccccagccccaaccaatacaggctccccctcccccgactcacctccctactctctctttgcctgcctccctcccttcctcctgcccgccctcctccctgcctccctccctccctcttctctctctcctgaaccaccccactgcgctccaggacccagcgcaggcggcaggcgggcaggcaggcggcggcctcggaggggagactgagcggtggcggcagccagcggcagggaggcaggcccagccggggactggagccggggactggagccggctcctcacaggggaccaggagtgtgtcgccaggccctcccactgaggcccagcaccgggagcccctgggacaccccaccctcctccgcctttctcttccacctgctcctctccatcctcctctccctcctccctatctctccacctcatttgcccccttcttggcctctccgggtctcccagctctccatcctccccagctctccactcccgggctctccccgcccccagcatgcttttcccgtgggggctgagggcttgaggactccgggcccttgcctcaaccagggcagggcccaggctccaggggggagggggaaagggggcggccccctcccccagcaggccctcccctcccccacttctcctgatggccggcttccttttctccacccagtcctcgccccctgtggcccccccaggccggcccggctaggggagggggcgggggccctttcctgggccagcttccccctcccccggctttgcctgtgccccccccttccgttttcaccttcctctcctcctttcctccctccttcccctccatttgctccttccccctctcctctctccccttctctcctccattttctcctttccccttcctcccctccccggcccgccctctcctcttccacctgtccttcctccctgctcctgtggagccaccgttttggattagttgggagccaccaccggcggcgggggagggggccctgtggactgccctctccccccgcccagccccaccaccacccagcgccagagcacctcccgctgtcggtcttcgggcctcgagggagcccagccctccgtcccaccaggatccgtgagtgtctgcagggcagggattgggctgggttctgggtcctggaaggctgggctctggtgccgcctggcaggggggcaccacattctccccgttctccggactggcaagtaccctcccccactaggggcctgctctgcgccctccatctcctcagcgtccattcacctcgacctcttctcacctcttcttctgggtacatagctcactgccgcccctggccctctagctttctggggtcctacggggctgattgctcttacttgggctctcacttaccccgggcccctggcatgtccgtgcccctgctgtctccaagcctccgtcctggtcccagactggctctttctgttcctctgagcctcatcctctgcctgcggtgggccttggccctgtccccaccccgtccagtctctatctcctggatatgtctttccgcttttgagcccccatttcctgtgtctcttgggcccctctctgactctgcccaacttctctctttgctgttagcccaggttgctctcggcatgtctctgtttagatccctctctctgtcagaactcctccaccctggcttccctctttccaagtctccctcggcaggtctctttccatttctctttctattctgtgcctccgctcacctgtcctcctccctctctctgcctctgagcttggaggctgtcttccctctgtcacttttccacctctttcccccagatccactctgggtgcccggctcctcagtccctccctcctcagctgctgccccacctctccgtggtccatgctgacttttcctggctggtctggctctttccactcccattctctctcccgacttctgtgttacctcgcgtggcctttctgctcccattcctctccatgtctgggggctttcaggccccaggatctcctgctcccccacacggcattcctgagtgtcttggggtggctatgcctctgtgtgggtctggcctctcctgcaggtgcttgccctgtccctgcctgtgcccctctagtgcactcactccatctccccacctcagtttccctccctgactccccctttctctctcccaggtgcttttcccccttgccccttcctcttctatgggcctgtcgtgcagctccgacatactgtctctctttccgactggccctctctctttgtagagtttggccatttctttccttctcccaagtcttgtacctgctgctgtttctttatctccctttgccttctccctcaccctgtgtgccttcgctggccctccttgcctctcacctttgctgatgtctctcctatgcccactgttgctcagctctctgctgggttttgacttttatctggctttgcccagtctctggggctgagtcctggacctgcctgacaccctacctgccctgtctctgtctcctttgctgtctcacttctaggctgtgtctgtctcttgctctctcacttagcctcagttcctacgtcttgggctgtctttctgtgtgtatctctgtgtccacctgctgcccctcaaccctgtctttctctgtctgctcccacctttggctgccacctgtgggtccctgtccttctgtcccatctctccctcggtctttctgtcctttgtcctctgctccctgatttgccccaggagtccctggtgtctcaggatgacccactccactcctgcctctctcctagctccgcccttcacactcctcccactctgagcgctcctccgggtctcccagcatcccttgtgcctccatccttgacaagccttcaccttaatccacattatagtttgcagtccccagcctgtccagcataccctcccacctagcactctcttcttctcagaggcctagaaggcagtgacttgctcaagatcacgcagtgagtcaggggcagagctgggactgatccccagcctaggttttgcaggccacttgagatggtgagaaggacttgtgcctctatccttccctcgaagttctcattccacagtttcaccagctcaagctgtccttccatggggactgagtggggtccggtgtccaggcccacttcacagcattctgtgccccccacagtaaccctactccatggaaacccaagcatcccttcccgtggggcacagccctcagccaggggaagtggagctgtgcatctggccaaactccttgcccagtggttgccctgcagaaagctggggtgcctagaggaatccctgactccttaggggtggagagttgtgaagagcaaagatgcaccatctccccctttacttcttctccccagtagggtggggggcagtggtatggcacccacttctggcaggcagctccactccctgccttactcactcctcccttccagctcttcctgcttgtatccgagtcggttcctatcttttctccatcctctgtctccctcttcctgtgtctcgcctgtgccttggtttccccacctccagcctgcccctctttcctccgctccctgctctgtcctttctttatcttgcctcctcatcctcctgtctcttccctctttctccctcctagtcctctccctgcctccctgtaactctcctcttttctctccatttctacccccattttcctattgtcttgtctttctcttcccttgtatttctatctattttgacctttctctctttctgagtctctctgtctttcccttctctaagcctctctttcactttctctgtttcctcccttctctctctttgctttttttttttttcccccttttactgctctgggtccattcatctatggggttctgtgtgtgcctctctctctttttctccatctctccatctctcccgaagtttcctaactcccagatactctctcctccagacctcggatgtccaggcctctctccccatgggattgtgggaactggggatgttaggaaagtggcaagtgaggcctgggatggggttgcctagcaaccaccgcatcctctccagccggtttctgttgcctagtaacggctgcctgcccagagacaggggcgggactgggtggggggtggcacttcctggtttcctatttgggtggggctggtcccaggaattcactcctacctgagaacctcgcacgcctccctcctgttttggtagctgtgcccatcctctctcttgcagcctgtcctactcagcgcctgagcactgtgacctccaccctggtagtgcccctctgagctgagcttcccttcttgcaatgccctcagtattgccagcttctaaacagagcagggctctgcagagctgtgaactgcttgccaacaatgtccccaaggcttctgtgaccaccccatccagcaggcctccaaggggttccatcccaccacatagtaatctccccttggtctggggggtctccctgcaggtggcgagtgggggccgcggcagctgcgtccccatgaggaggggaggaagatgccggctgagctgctgctgctgctgattgttgccttcgccagccccagctgccaggtgctctcatcactgcgcatgggtgaggccctcccgcaccctgcccctgcatcctcaggccctggggctcctctggggacccaggcatgccagtccgtcagggtccaggtctcagctctcttcagcagcaaggaatcccagcctccagttcctccttcccccaggacccaggagtccagacccctagctcccaccaacctcagatccaggtgtctagacccctggtccgtatacccacctcaccctagagccctggagtctaagaccacagccccctccttcctcaggactcaggagtctggtccccaacccatgtgtcccctcagctgcaatcctggatgatcagacagtgtgtggccgcggtgagcgtctggccttggccttggcccgggagcagatcaacgggatcatcgaggtcccagccaaggcccgagtggaagtagacatctttgagctgcagcgggacagccagtacgagaccacggacaccagtgagcggggccatgggggcgtggggtgaggcagggcaggtcggtggccctcagtccatccctctgcccctggcctctggcctggccttgtcctcttctagctccatcctcccccttctttgtgtttgtctctgccttcttcccagacatggctgctgctgggcctgggggttggagaggagggagagcataagccccagttctgctctggaggagcacggggcggcgttgaaaagataagccctatcatcccagctggctggggatgcttgttagcccccagagcttaataacaagccccaggcatggagggcaggaggcttgggcgagggtcagcaaaggcattctggagaaggctagtctgaaactgagctctgaaaggtgaacaggatgtagaaagagtggcgtggctccaagcacggccggccacatcacagggg

SEQ ID NO: 8152 - DNA, 6000 bp, Homo sapiens
gtctctagacttccatattgtgagatatagatatctgtatatcatatacatctgtatacactatacatctgtatactatgccatatactatactacatatctgcatatactatatatagagtgtgggtgtatgtctctgtgtaataacataatatacatacatttttaactggcggggaacacagagatacaaagaagaaaataaaagcagaaatgaagaaaaaaggagaaaggagaaaagcatgcacttggagactaagaccaggagatagaaacagagaagcaagacaaggcgcagtggctcacacttgtaattccagcaccttaggaggacgaggcaggaggatggcttgagaccaggagttcgcgaccagcctggcaacatagtgggaactgattttatgaccaaaaaaatgttttttaattaaaaagagagagagagaagaaagaaagaaagaaaagaaaaaagaaagagagagagaaagaagaaagaaagaaaaagagaaagaaagaaaaaacaaggacaatgatatacagagagaaaaatgaagactgagagcaaagaagagactgagattgatggaatcacgaggtctccctcctttagcctggaaactccacaagagcaagaattttgtccatttttgttcattacatatcgccaactccttgagcagtgcctggcactcagtaggtgttttgctctatgttggcaagaaaccaggctggacagggagagtgtctgcagttgcctaagtgaacactaggtgacagtatttataagccctggagcttccaggctccaaggtcccagagatggcggtggaggatttgccgccactgacctctgactttcaggatctcttcctcggggctcagccctgcctttccctgcacaagccttgggcgatgaatgacctttccgcctgagacaccctcttcactctccttcaccagcctgcccagttaaacaactctttgtccctggccccttcctgctgggccccgaggcacctgggttctttccaggcccggagatggggctgcgacagaggtggtgcagctgggacaaggccaaggaaaaatcctggagactctggaatcagttcttccagtgtatgagacccagcccctcctccctcagacccaggggtccagaccccagcacctcctccctcagaccagcagtccaggccccagccctcctccctcagactcaggagtccagaccccagatcctcctccttcagacccaggagtccaggcctcagcccctcctccctcagacctaggagtccagatccagcccctcctctctcagaccagcagtctagaccccagcccccctcctccctcagaaccaggagtccagaccccctgcccctcctctctcagaccagcagtccagaccccatcccctccttcctcagacccaggagtccagaccccagcccctcctccctcagaccccctcctccctcagaaccaggagtccagacccccagcttcttcctcctggacccttcctcttaggcattttgaggtcctctactattccctctccctctcttttacacaaacccctctctccctccactccccattctaggattgagaccaagggtgagtcacaagaagccctgaggccctgagtcacctcgccctccccccttggcccctccctgggctggaggcagctggctgaggagtgaagcagtttcctaggactgacccctgcatcccaggactgcagtttgaaggcaggtgcccttcccactgtaaccccatcactgccacccaggcatgtccatgcccatcctttgctgtttttctctttcagtcatggcctatttggagacaaaatttctctgtgctctaacttccgtgtcttgattgtgttttccggtttctctgcacctgtgggtctctttgattttttttaatacatgcccccaccatccctggctgaatgcctcgaggtctctctgattatctctctctccctctgtgtcagtctctgtctccgtttttcacaagtgcctgaactggggcacagatgccatggcatggccgcagctggagcgctatttagtggcttctgacccttgggtggccacagtctctggatcactggccctcaacccctgagtgggactggggtagaaccggaaggaaccaggctgtccgtagatgtgccagtgaacagcagagagaaactgaggcagagacaagcatagagaggcccggagagagagagagagacccaagaggagaccaggaggcagggagagagtgaaacagagacggagagaaacaccgattcagcaagagacagacaaaaacagagggccctagagacggagagatggagacagagtgagacacgatgacagagacacaggcaatgatgaacacagagagagacatgacagagagacagtgacggggaaagaaggaaacagaggagcagagagggacacgaagatggagaaagggacagagcgatgagagagacacagagaggctaagagaggcagagacagagagacagagtgaagagagacagagagagacaaaggtaccaggagagaagaacagagacagagataaagacaaacctggccaggcacggtggcttacgcctgtaatcccagaactttgggaggccgaggcgggtggatcacctgaggtcagaagttcacgaccagcctggccaacatggtgaaacctcgtctctactaaaaatacgaaaattagctgggtgtggtggtgcacacctgtaatatcagctactcgggaggttgaggtaggagaattgcttgaacctgggaggtggaggttgcagtgagccgagatcgtgccactgcactccagccatgggagacagagcaagactctatctcaaaaaaaaaaaaaaaaaaaaaaaagacaaacgcggaggtttccagatcaggagagactgagacaggaagcaagtcccaaagaaccagagaaagagccggagagggaggagagagacgcagcgagccgggcggccagtgggcaggggtgcccaggctgcaggctcaggagtgcccggcggctgcactttccccaagtggacgcatgtgtggtgtctgggcgcgcccgggtgtgtctccagccctctcccgccaagtctcgccgagtgggtaattgtgtgtgccgaggggcggagcccccgcaagggttgtgtttttgccactgggcgtgtccatgtgtatggtttggtgtctctgggtgtgtttgtgtgggctgccttggtgtgcagtcagacatgtctgtgcgtgtctcgcttccctggggctggtgggtccagggtcccacacgacctaggacacaaggagggggagggttgtgtccgcaggttccttgcagaggggtgtgcatgaggccaagggcagtgtcaccagttcagtgcatgatgctgggaggtgatgtgcgtcaccaggtcagtgcatgcctgtgtgtctccacaggagggtttgatctgtgtcggagcgtatggtgtacagatccatgagtggctcgtgctgcgacacatggagatgtcctatgttgtgtgttgctctgagagtcaccgtgcacattccacactggcatttgctgtatctcacgtcagggtccatgtccctgttgggggcctcttccttctcagcccccagcacccaccctgagtgccaaccaccccaagtgtcttgtgtttgtgtagctgtgtgttatgttgtgtcagaggatacacccccctcccccgatgctggtgttgtgtgggtggcggtagacctcagtgtcagtagtatcagtgagtggtgacatctggtgttttatgggacatgtggtcgtttgtggaaggttgggtgtgttggaaaacattgtgtttatgtgttttgcgttactgtgtgctggtgtattactccgcgtatgttgttgtgtggccacgcatgttggaatataacgtgttgggttgtgtggaggtattgtatgtcatgtttgggtgtggctcatggctcagaggtgatggtgtatgttgcgtttgtttttttgtttttgcttgttttagagataggatcttgctatgttgcccaggctggtctcaaacccctgggctccagcaatcctcccacctcaacctcccaaactgctgggattacaggcatgagccactgcacccagccgtatgttgcatttgggcactggggtctatgaaggtccaaccccatccccttcccccagggcatcatcctggatgttgtcctgtgtggccagaatataccagaatcatcttgcttcaggcatgtgcttcttgggtttctccgtgtgtcgctgtaccttgtaggtctctgcatgcatccactcagcttgtcctctgaccatacatttgaatcgcaccacacatcagagcatgctgaatcagtgcgtgttttgaatcatcactgcgagcacttgtgttcgagtcaacaggcgccacaatgtatgtgcaattctctagctctgggtgattgggggctactataggtatgtccctaaatgttgtgtgtctacacgtattgggtttcgttccaagggtgtgtagtgtttaggaaactgggactgcacagtgtttgtgtcggtgtgtggtgtgtggcatcagggcgtcactactttaatatatattgtgtgtttgtgtaacacctggtgtatgttgtgtttgtgtggccacagttgtgcatcgtcctatttgtggtgtttgggtgtggctctttgtgtcagagaaagttgtgacaactttgagtgtaatatttgtgcctgtgtgtggacggtgtttgggtggctgtgtgtgccacgggatactgcctgcttgctaagtgctggtgtgtgtcacaccatgtgtgtggtgtctgggtgtggctgtgggtttcagagcttgctgggagttgtgagtcactctgtgtaggttgtgttgtgtgccctggtgtgttagtctccgtcttgggctgtggagtgtccttcggtgtctgggtgtggtgagtagaggtgtgtgtcacaaagtacagaccattgtgtgtgacaaagcccatcgtgtgtctgtgtgtgtctttatccacgtggatggacgtctctttcttgctctgccccaagacacaccctagcccctccttattctcaaaagggggagctggggagcctccccctaccctggggcctcccctgcccctccccgccctgcctggccgtcaccactccccagagggcacagggctctgctgtgcctcagagcaaaagtcccagagccagcagagcaggctgacgacctgcaagccacagtggctgccctgtgcgtgctgcgaggtgggggaccctgggcaggaagctggctgagccccaagaccccgggggccatgggcggggatctggtgcttggcctgggggccttgagacgccgaaagcgcttgctggagcaggagaagtctctggccggctgggcactggtgctggcaggaactggcattggactcatggtgctgcatgcagagatgctgtggttcggggggtgctcggtgagtggggcatggtggctgggagctgggactcctaggtctgagggaggaggggctgggggtcaggactcttgggtctgagggagggggggctgggggtcaggactcctgggtctgagggaggaggggctgagggtcaggactcctgggtctgagggaggagggactggggacttggactcctgggtctgagggaggagggactgagggcctggactcctgggtctgagggaggaggggctgggggtcaggactcctgggtctgagggaggaggggctggggtctggactcctgggtctgagggaggaggggctgggggtcaggactcctggatctgagggaggagaggttgggggcctagactcttgggtctgagggaggaggggctttggctgggactcctgggtgctcccaggagacagttgctggggtccttctctgcaa

SEQ ID NO: 8153 - DNA, 6000 bp, Homo sapiens
cagaagcccagaaccttccagaaagctgctcccgactgacagtcctacctaacgatccagaaaatccgtgtgatttagcgggcgtggtaatgaccgcagtccagccagccgccagcgctgagttcatgcttttaggctaatttgtgttcttgtcccctctatggggctctgagtcctctcggctggcagcctggccacactgcatcagggcagctgggccctcacctggcactgacatctgcctcggctgctccgagccctgagaaccactccagggtcccttccccctgggcgcacggccagcttgttccttttccatcatgaaccactcactctgctgacctgcaaggctgggtcctgcctgcggggagcacgcggatttggggtgaggcagctggggggtcccttggggttggctgatctccctgggtctgtacctactgttcccctggagccattcccacgacccctgcccccctccgcatcaccacccaaaggctcccaaatttccctcccagcaccaatcaggacccccaaccaccaactcaagggtatcggcacaaccctgtggctggtgccagggcggggtgagggtgcgcagagccgtagagggacagctgcctggggctcccagggcccggactcggctccagccgctgcaagagcccaaggtgagccaggcacgaacatccaggtcacttcgcagctgcctgcaccacgcggccgtccggggctgaggtcggctgccctctccgcaggctgcagaacagggttagagttcaccgtggggcagggcccgaaaatcgcccggtggcctcagacaggcgacacctggccgggtcggactcgacgttcttgtctccagaaaggggtcgtcccccggcgggtcggctgggagctgggcgggggcggcaggagctcacgcctcattccctgcgtttccctccatgtgcccctgcacgctgggtccttggacacaagccccctcggtgcctctccacgcccgctcccgcaccgtcatcaccctctcggcccagagctcccagacgtgctcaggcaccgcggctccaccctgcgtcgtaattgccggtctgggtgcgatggaaacagtggtgacgtcatcgttcagaccccccgcccccggaggccccacagattctcagagggacggcgccgggactggggaggccaaggcgttgacgagcggggacgccggtgtgcacaggtgacctggcggctggcggggcttgactgtgcagaccacagtgaggtgcgcttgcgggcgccgggacagctgccagcaaagctgagagcagaaaacatcatgcgcgaggaggtggggaagccacagccttcccgtgccctggtgcggacataaaatggggcatccactgtgaaaatagtctggcaggttttttgtttgtttttgtttttgtttttgtttttttgagactgagtctcactctttcccccaggctggagtgcagtggcccggtctccgttcactgcaacttctgcctcccgggttcatgccattcccctgcctcagcctcccaagtagctgggattacaggcgcccaccaccacatcaggctaatttttgtatttttagtagagacggggtttcaccatgttggccaggctggtctcgagctcctgacctcaggtgatccacccgcctcagcctcccaaagtgctgggattacaggcgtgagccactgcacctggccattctgtcaggttcttaaaaaattaaacagcgttaaggttggacccagcgagtccacttctgggtatatacccaagggaatgaggagcagggtttgggaatgaggagcggggtttgggaatgaggagcggggtttgggaatgaggagcggggttttgaaatgatccacacaccaagctcacaacagctccatccccacagccaaaaagtgggggaaggccaggcgccgtggctcacgcctgtcatcccagcactgttggaggccaaggccggtagaccacctgaggtcaggagaccagcccggccaacatggtgaaaccccatctctactaaagatacaaaaattagccaggtgtcgtggcacgtgcctgtaatcccagctacttgggaggcttaaggcagaattgcttgaacctgggcggtggaggttgcagtgagctgagattgcccccctgcactccagcccaggtgacagagcaagactccgtctcaaaaaaaaaaaaaaaaaaaaaagttggggaaaccaggtgtccatcagcggttggatgggtcaccacaacacgagtcctctgcacagtggaatattattcagccttgtaaaagaacgagaaggctcaatgcagtagctcaccctgtattccagcactgtgggagctgaggcaggataatcgcttgagcacaggagtttaagaccagcctgggcaacatctctacaaaaccccatctcttcaaaaaatataaattttagccaggtgtggtgtgcacctgtggtccccgctacttgggaaatcaaggcaggaggatcgcttgagcccaggaggttgaggctgcagtgagctatgatctcactactgcgctccagtctgggcaacagagcgaggtgcagtctcaaaattaaaaaaataaaataagtgaggctcagacacaggccagagcatggttgcaccttgaggacatcacactcagtgagagacgccagacacaaaaggacacgtcctgtctgattccactcctaggaggtccctagagttgtcagattcacagagacggagaggataggaggcgtcagggctggggaggggacggggagtgagtgtcccctggggacagagtttcagtttgggaagatgagaaagttctggacaggagggtggtaagggctacatagcaaggagtgtgcttaatgtgcctgagctgtgcacctagaaatggccaagatggcaggtttcatgttatgactattttcccacaataaaacattttttaaaagtctcctccacgtggccacttgttccacatggcagctgggagtaggaacgcctactgttgcccgtgtacagatggggaaactgaggcagggcacgagggtgagttcccggagggcagacacagtctctgcccctaggaactcttgctcctcagagggagccgaacccagggagggacggggccccagtggtccctgaggacaccaggacccagcacctctcgcagacccagggaggggaccccttgtcctgcccccggggacacctggccagggggctggagggggtggcctgcgggttcctggaaccgagccatccctccctccgtccctccccagtcgtctcaaaatccaatccattttactggctggcacttggcattttattcatttcatggaggatttttttcctacctctccaacgctggctccaaaaggagatgacgtttggggtgtgtgtgtgtgtgtgtgtgtgtgtgtgtgtgtgtgtgagaaaatcgccggagtgtagatccattaattagagctgaatgttcccaacacagcggctgttctgctgccccgcgggatctggggagacaccgtcgggaggacaggatgaggaatgcctgggcagggaggaggtcctctgctagatggatagacggatgcagccgcccccatctatcaggcgcctgtgggatgccagggccccagaaggcaccccccgaggcccagaggacataggcaggcttggggactggtagacagcggggagctatggaaggctctagagcactggaggaggggcatgtgagcaagcatccttgtctgggccgttgctcaagccacaagcaattatagagtgcctactgtgtgccagcaaccaaaccagacccaccccaaccctcccagagctgagttgaagagatggtcactaaataagaaggaaatgaacaaaaagatggtaggccgttatggaaatgtgtggaggttgggggtgggtagcagcaggactgaaatggggcagggagtggtgctttctgcattttctcagtggcaagcagggaacgtttttcagggcagggcatttgggactgggttttgaagggtgaagaggagttctgtggcccaagttgcctgcccactgctggagggcagatctactctataggtttccatcagacatgcctgtctcagtttccccagggtgcactggatgttagaacacacccctgggctggcctggttagaaactgacagctccctggatgtgcgagacaagcaagacccttcctgggcctcaacttccctgcctgagcaatggtcgacattggtggaaggggtcagggatcctggagaggaacggggtgggcgtccgggccaattttattttcttattttattttattttttttgagacggagcatcgctctgtcgcccaggctggagtgcagtggcacgatctcggctcactacaacctccgccttccaggttcaagcgattctcctgcctcagcctcccgagtagctgggattacaggctcccgccaccacgcccggctaatttttgtatttttagtagagacgggctttcaccatgttggccaggctggtctcgaactcctgacttcgtgatctgcccgcctcggcctcccaaagtgctgggatgacaggtgtgaaccaccgcgcccggcaagtcggggccaattttaaagcgcagtcttttcctggcacctccgttccatctgtggcctgaatcagagcagggatgggcagtggttaggcgtccccggcccccgccaggtgtcaccgccgccggcctcaaacaaccactgggaggcactgtttcccccccatcccgccctgggcagggcacgtcccactccccccgcgcggttgctgggaacccggaggccgcccgggcggagcgcggagggcgcgtcggaacctggccggggccctccacccgcgccgtggtcccggtggttgcgccccgtggcgagcgacgccgacaactttgcgatggagtttgtgcgggcgctgtggctgggcctggcgctggcgctggggccggggtccgcggggggccaccctcagccgtgcggcgtcctggcgcgcctcgggggctccgtgcgcctgggcgccctcctgccccgcgcgcctctcgcccgcgcccgcgcccgcgccgccctggcccgggccgccctggcgccgcggctgccgcacaacctgagcttggagctggtggtcgccgcgccccccgcccgcgaccccgcctcgctgacccgcggcctgtgccaggcgctggtgcctccgggcgtggcggccctgctcgcctttcccgaggctcggcccgagctgctgcagctgcacttcctggcggcggccaccgagacccccgtgctcagcctgctgcggcgggaggcgcgcgcgcccctcggagccccggtacgcgggacgcccggagtcaggacgagggggacccggggcgggagcggggtcgggagccctggggacgtccggagtcaggatgggggtgccgggactacgcagggaagggggatcccgggacgctggacgggccccagggatcagggatggggaagacccgggtgtccccggagcaaggaaaccagaacccagaggaagagacccaggggcagggacctagacgcggggttgagagctccagggacgcccctggaacgcccctgcagaccccttcccagcgccctggtgatggggaccccgccactgtggcctctgccccttccttgcccaggccccttccctccttccccacagacccttccctggtccctgggacctcctggtccccacccggctctgggtggctgggctggaggacaggcggtctccctcctcactctaggggtgcagtttcggggtctgcaggtctggatctccctccttccagcattctccccgtcccctcccagaggcctccaagatcccagagcagcctccatcattccaaccccgactccattcccacccccca

SEQ ID NO: 8154 - DNA, 6000 bp, Homo sapiens
gtcccaaatatcactctaccatgctcactatctggctgtaggaaagggcatttccgatctgtctaagagagaggatttgacactgactcccacctggagctgtgagctctggaattcaggttttcttttccccagagggcaagccagagtcttcttgtctttccccagtgacttgggagggatacctgatgttatttgttccatattcttatcccccagacatgggttctagagctcagaatgctgctgctggaggggggcctccctaccagaactcgccccctaaattaatctgccgcctccaagtatgggacaagaattcaggccatgtgctcaggagcacagaaacgctgacacccacactgttccccatgtggggacgcccagcaagggggtaggaagctaggactgtctcctccacaggaccccagcttcccacaagaggagcccaggttggagagaggtgcagagccatggagttggggactagaaacctctagtgctgggtctcatgacctccgtccaggtttggggctgagaggggagggtcctaccatgtcccacctggttccctcaactccctgccctggctggggtaagtcagaaatctccttgcagtcagagacaagggaaggatccacgtgtatgctcagaagtgagtggggtttggccaggcacagtggctcatgcctgtaatcccagcactttctgaggccaaggccagaggtttgcttgagtccaggagtttgataccagcctgggcaacatagcgacaccccatctcaaaaaagagagacagagggagagagaaaggaaagaaggaaggaaagaaggaagaagagagagaaggaaggaaaagaaggaaggaaggaaagaaagaaagaaagagagagagagagaaagaaagaaagaaagaaagaaagaaagaaagaaagaaagaattgaagttagctgagtgtggtggtgcatctgtaattccagctacttgagaggccgaggtgggaggatcgcttgagcccgggagttccagtctgcagtgagctatgtatgatcacatcactgcactctagcctgggtgacagagtgagaccccatctcaaaaaaataaaaataaagaagtggggctgggcgcggtggctcacgcctgtaatcccagcactttgggaggctgaggcatgcagatcacctgaggtcaggagtttgagaccagcctgtctaacatgctgaaatcccatctctactaaaaatacaaaaattagccaggcatggtggtggacacctgtaatcccagctactcaggaggctgaggcaggagagttgtttgaacctgggaggcggaggttgcagtgagccgagatggtacctttgcactccagccttggcaacagaacgagaccccatctcaaaaaaaaaaaaaaaaaaaaaaagaagtgggttctgggggcacaatcgggtcccgtctctcatccctaaccagactccaaaagacacccccgctcccacagaacccacctaccctctaccctctatccttgcccttgcaggtcttgccccagaagctgcgggcacatccacgcctgaaatgcggcgctcagtcctggtcaggaacccaggccacaaaggcctgagacccgtttatgaagagctcgactctgactccgaggacctagaccccaatcctgaagatctggacccggtttctgaagacccagagcctgatcctgaagacctcaacactgtcccggaagacgtggaccccagctatgaagatctggagcccgtctcggaggatctggaccccgacgccgaagctccgggctcggaaccccaagatcccgaccccatgtcttcgagtttcgacctcgatccagatgtgattggccccgtacccctgattctcgatcctaacagcgacaccctcagccccggcgatccaaaagtggaccccatctcctctggcctcactgccaccccccaggtcttggccaccagccccgcggtgctccccgcccccgccagcccgccccggcccttctcctgcccggattgcgggcgagccttccgccgcagctccgggctgagccagcatcgccgcacgcacagcggcgagaagccgtaccgctgccccgactgcgggaagtccttcagccacggtgccaccctggctcagcaccgtggcatccacactggggcgcggccgtaccagtgcgcggcctgcggcaaggccttcggctggcgctccacgctgctgaaacatcgcagcagccacagcggggagaagccgcaccactgcccggtgtgtggcaaggccttcgggcacggctcgctcctggcacagcacctgcgcacgcacggcggcccgcggccccacaagtgcccggtgtgcgccaagggcttcggccagggctctgcgctgctcaaacacctgcgcacgcacacgggcgagcggccctacccgtgtccgcagtgcggcaaggccttcgggcagagctcggcgctgctgcagcaccagcgcacacacacggccgagcgcccctaccgctgcccccactgcggcaaagccttcgggcagagctccaacttgcaacaccacctgcgcatccacacgggcgagcggccctacgcctgcccgcactgctccaaggccttcggccagagctcagcgctgctccagcacctgcacgtgcattcgggcgagcgtccctatcgctgtcagctctgcgggaaggccttcggccaggcctccagcctcaccaagcacaaacgggtgcatgagggtgcagccgctgctgcagctgccgcggccgctgcagctgcagcagcggccgccggcctgggcctcgggcctggcctaagccctgcatccatgatgaggccggggcaggtctccctcctgggtcctgatgctgtttctgtgctcggctctggcttgggcctcagccctggcaccagctctggccgcaaccctgaccctggctctgggccgggcactctgccggatcccagctccaaacccctccccggctccagatccacccccagccctactcctgtggaatcttctgacccaaaggctgggcacgacgctggtcccgaccttgtgcccagcccagaccttgatcctgtgcccagcccagaccctgatcctgtgcccagccctgatcccaaccctgtgtcctgccctgacccctgttctcccactcgtggcactgtcagcccagccctccctaccggcgagagtccagagtgggtacaggagcaaggggcactgctggggcctgatggctgaaggagacgccggcatcctcgggggcctggggaagttgtgtgttgtgcagtcagtaaaatcctcccactgcctccgggctctgtgtcgtggcttgccttttgtgctttctttctgagcacagccccttgctccggagatgggacattgtggccagggccagccacaatctggagctccagtgtcctggcttccttcttgggcccaccagctagactttccagcttaacccacagtgtctcatcctggtccatcccactagtcaccactctctgttcctctcacttaccccttgctcttcaaagcccatacagtaggtatacaagtggacaaaaaaagttgctcatttatgcaatcaacaaacatctctggattgctggggtctcagcagggaacaagataaatatggcctcgacctgcatggagctcatagatactaaattcagaatacttaaaaaataattacggggtatagtacattctaggagaagcataacaagacttctgatataaatggcaggcagctttctcaatgaaggattttgtaatcccaataatcactaatttaataatcagtactgtttgcccagccttatgcgatagtttttgcattctctcatttaatcctctcaacagccccagtaggtagatgactttgaatatccccattttgcaaatgagaaaattgaggcacatttttttttttttttttagacagtcttgctctgttgcccaggctggagtgcagtggtgtgatcatagctcactgcagcctcgacctcctgggctcaagcgatcctcccaccttagcctcccgagtagctgggattgccggtgcatgccaccgcccactgcgctcagcttggagttgaagggactctggaagatgtagaagtggcattgtcagtgcctagatttaaatcccaattgccctccagggtccaaattcttaaccattacgctccagggcaaaagtatgcaaaggctctggggctatagaaagatgagctttggatggaggtaggagccagatcagagggccctgatagacgagagtggggactctgcctgtcattacagagcaatgggaagccgagggcaggttctcgcaggaaggataggaattattctttgaagatgcttgtggctgctgggtagagagtggagtggagggaggctgagatcggggaggaggttgctgcaaagatccaggccaggaatgttggaagactctgggctgggggccatggggtggggataagtggttctatttgatacataattaggaaatcgtgtttgctgaagatgcgcaggagaagggtaaaaggagtttctgggagaaagaggaagacagcgttgagatagtaggcagggtcatcaccaggcaccaaggaggataaggggtcaagctctggacatggaagtcacaagcctggcaccggattcggggcatggccgggagccagggcagagctcgtcgttgccaaactcagagtcagcccatcccccgccacccagagcgcgtcggcgctaggacctagcgactgccttcgacccagagggcgccggcagaggcacgcatgcgcgctgttccggcaggggttgtcgtggcgcagggggcgggaccagaggcggtcacgtgaggggctctgggctaccgggtcacgtgaccgaggcacagatcagctgatgccggagggtttgaagccgcgccgcgagggagcgaggtcgcagtgacagcggcgggcgatcggacccaggctgccccgccgtacccgcctgcgtcccgcgctcccgccccagcatgacagccccggcgggtccgcgcggctcaggtgagggcgcgggcggcaccgtggggccccgaactcaggcgggcgggctgtgtctcccacctggggcggcggagctcctagtctctttttttctaagctccagcgctgacttttcacggtggagaaaagggcagacggctcctagaacttgggcggcgggtgggcaccagcctctccaattcttcctcctgaacccaggctctgctgggttcccaaactcaggcagggatcgcgccgggccgccagcttctccctctggggcggcgaggttcctgggattcccactgggagcctaggttccgattgctcaacttcgtctggaactcagacagcgggcaccagcttctccaacccgcacgtgagactcccaggcttcccctcctgattccaggggacaaatgctcagcttccctaagctcaagcctggagagctggagggattgcccccaggcgattaactcagttttagctttccaaaccgctggaagcgcagccttcttaaattcgggcttctagccaattctgatgccacccctcctcggggaggctggaggaagaccccttgtgttagcttccccttctggagctagctggggacccctacctgatagatgtcccggtgtcccagctagtagggtctggggtgggttagctgtaatctcagctctgtaagcgggccctgccctctggctttgtcgtaaacagccacagcagcatctcattgcaaagggaggggccgggaacttgtccctctctgcaagggaggttctgacagtgcacacatttatcctgactgctttgctaggcaggaggccaggccctagaaagcagcacggggccaggccctagaaagcacatccccatgggggtgtgacaggg

SEQ ID NO: 8155 - DNA, 6000 bp, Homo sapiens
gctccaccatctggccctctgccctctagcctcctgccctttgcccccacatttcagatccttcacccttattccggccatagaggactgtggctggcctggcctaggtccctgtgaccctggagagcagggggtctagcccagtgatctctgaccatagtgatgcagctcccacttatgacaccttaagctcctgccctatattctctccctgactctggaagctttctagctttaccgcttctattgatccacactctgtctctgccttcctgccccctgaccactgccttctaccctctgccctggctgcagatggaggacctgtatgaagacttccacatcgtgaagctgccgctgttaccccatgaggtgcggggggcagacaaggtcaacaccttctcggccctcctcctggagccctacaagccccccagtgcccagtagcacagctgccagccccaaccgctgccatttcacactcaccctccaccctccccaccccctcggggcagagtttgcacaaagtcccccccataatacagggggagccacttgggcaggaggcagggaggggtccattccccctggtggggctggtggggagctgtagttgccccctacctctcccacctcttgctcttcaataaaatgatcttaaactgctgtattgttgacattgggaggtgagggtaagcacctttatgtacagttgcacaggttgtgcactggacagaagtgtcacatctagaggggcccattcacaacagagacctaatagagatgcatgtttattgtggcaactttggaaggagggtgtcttgggtgagagatacctttgtctcattctgtgtgggttaaggtgtccctgttgggcctgtgaagcctggaatggaagacagaggcattttcccacttccttggaggctcagagcgtgggaactgggaggccccttggccagccccaggctggtggggagcagagcagattaggccggcagtgggcccggcactgcctgctgtttggtttgggaattagtgggcgccctggggagaggccaggcctgccagactggggattaacagtctccaccccccaattcctgcccccatgggatggcatcagcccctcccagcaaagggctgcagcaagggggctggttagtgggcagggtgacagaggactccggctggaggggctcctgaagtctcatcctgactccagagcggtctcaggctgtgggcacacaggcctggaaggcacctagtggacccccttatcccctgcccttcgctcctccctctgccactgcctgggctgctattgttgtccccacttgggagactcaggatggggtatgaccttgagagtttacaagttccaagccagagctggctaggggggacagaaagggggttcctgaggacacacgtgagtcggtgttcaggccgggcgcggtggctcacacctgtaatcccagcactttgggaggccgaggtgggtggatcacttgaggccaggagttcaagaccagcctggccaacatggcgaaacctcgtctctacttaaaatacaaaaattagtcgggcatggtgttggggtgcttgtagtcccagctgctccagaggcttaggtgggagaatcgcttgaaccccggaggcagaggttgcagtgagccaagacagggtaagaccctgtctcaaaaaacaaaagtggtgttcaggtccagtcatggtggctcacgcgtgtaatcccagcactttgggaggccgaggcaggtggatcacgaggtcaggagttggaggccagcctccaactactctctactaaaaagacaaaaattagtcaggcgtggtggtgcccacctataatcccagctacttgcgaggctgaggcaggagaatcacttgaacctgggaggcagaggttgcactgagccgagattgcgccattgcactccagcctgggcaataaagtgagactccgtctcaaaaaaaaagtgttcagacccagagtctgggtgtgccagggtgtgtgtgtaaggggaaccccaccaggagcctagacttgtcactccaactccctggggtgtgcacaagcaggtgtgggcctgttggggtggcatgtgtaaacaaacacgatggtacagccggctccgcgccaaactgccaggatccaaatcccagctgtgctacgaacaagatgagatgtgacatcggagcctcagtttccctacttagatagtaagatgaccaacttagcatgcccgtaaggattccatgagatgaaacacgcaaggcgtttataccagcaccagacaggaaaccgcaagaaatgtttgttatttttcgttgtcacaattagtaagcatatcaaatagcccaggaagcctgcccccagcccctgcgggaattcagcagtcggaagtgtgtggggatgcgggtgagctggggtagggaggatgaaaaggaggagcgggcttcagtgaatgcaaggacacttcctagggagtgagggctgctgatcgagaactgagctcatcagcaccgagcctgccaccgccttgccaggttccgcagctgacggcaccgccccagctgccccctcgcccccatttatgggctgtccggcagctggacagcgaaggcatgggtcacagggtgaccagcccaggcgggttcctaattactccgggcagggtgaacatctgccagtctgggaacacggcgtcccagcctgctgggcttggaacctcgggcggggctatgtagaatgcacgaggggctcctgagcactctaggatgcccatcccagggtttgacccctgaacttctgcccctcccacaccaatctgtgtgttaatgttcttcaggctgggcaatggagggggagtgggtactgtttgtaccaggctgggagtgtcccctttagaggtgtgtctgtgaagaatgaacatctgcccagaatccatgccaaatgcaggacaaggttttgtgtccccaagcttgtgtgttcatggcaatgctgagagtatctgagacctgtgggtgtgggtgtgggcctgccgccgggagggagcgttggaaagggggttgccttcacatattggtgtacaaatgctggtgaatttcaccagcggtgatagctaggggacccttgagggaggggtggctgttgtgtgtgtctttgcaagattggtgaacctcaggccccgctctgagcctgggattgtgtgccaccgcactgaggaaagggtttttgcatttggtgtgtgatcatggctgcatctttgcacagggaagatcgggagtaaaacctccttgcagtggagtatgactgtgtgtgtgaaggcattctgaggtctgggtggggtctggcacttggctggttgtgtgggtgtctttgttacatggcgtgatcatgacggaattcagaccgttgggagagccgtgtgtatgaaagaggagagcctagtatgtcagggtccacctgccttatatatgcgtgatggaggcaggaggggtcgaggtaggtgtgtcttgtgtgaccctggaaggttctgtgacagtgtgtactgctcctctgggtaaccatagttatgtgaggctgtctttttgttttttcaatagagatggggatctccctatgttgcccaggctggtctcgaactcctggctcaagtgatcctcccacctaagcctcccaaagtgctaaaattacaagtgtgagccatcgtgcctggctgaggctgtcttaagagcagctagatttgcttctgggactatgatgtgtgtttctgcgtgcatctctgtgacactgtgtgattacaggtgactgtgaagtgacccagcctcactgagcagtgtgtgtgtttctgggactgggaaaaagaccatccctgcctcctcccccaacctctgggttccagatccctaggacctgccagtgagcgactgggaggggaacagggaggggcgagggaggacaaggcggatttctccccccgtaccaggtaacaaacttgtgggactccaaacaaaattctgaagctacagcctagccgagggaggaggaccaggaaagggaggcacgcccactccccagccccacccaacgccaaagccacccgcccattccatccctgtccctgtgggtccttgcaccggccaccttcaacacaggtgagatgagcccaggcttggggaaatagggggccctgagggaagagggaacctgcgggcaggaatgcatccggagtcctcccggggcggggagtggagggcttggaaggctggaggggaacggagagaggaaaggtcaaggcggatccgggaggaaaagggagtggggggagccagggcaattaagcagaaggtgcacaggctggggcaggggggctaggggacctggaggcttagggacagggcttcagagggagtgcagggagcagaatgggtcaagactgggagctggggaagtggagaagggggagccagaaataggggctgagggagagaatttgggagaggtggagccttgagaacctagaaactcaggtgctggggacttgcggaatggggcatgctacaggtggcctctgggtgaaggggatcgggcagagggtgactcgggagctgactgcagggactcaagggtcttggtggtgggggacggcagttaccagagcccacggccaggagtccagggaaggggacagcctgagatgaaggtcagggaggggcactgggggctggactagactgagtaaagctgggaggagaaggcaactcaggcaagggtcaggactgaaggggtggcgggccggaacatgggtggaatccctgtgctcagttatccccgcacctctccacccacacccgcagcccccacccgggccacccactctcccttggccacacctgccgggtgccacgatgaccgtcacctacacagcccgagtggcgaacgcccgcttcggtggcttctcccagctgctgctactgtggcgtgggagcatctacaaactcctgtggcgagagctgctctgcttccttgggttctacatggcgctgagtgctgcctaccggtgaggctgccctgaggtgctcatgttctagcggagggggggcagctattatatatatataatatataaaaattataaaaatatagagatatataagtatatatatctatgttttttaaactgagatggagtctcactctgtcacccaggctggagtgcagtggcataatcttctcttacttccacctctgcctcccgggttcaagcgattctcctgcctcagcctcccgagtagctgggattatgggtgccagccaccatgcctggctaatttttttgtatttttagtagagatggggtttcaccgtgttgaccaggctggtctcaaacttctgacctcaagtgatcctcctgcctcggcctcccaaagtgctgggattacaggtgtgacccatagcacccggctgggggcagctattataaaagaagccagggtgaggggcacagcaagagagatctgaagctggggatggagtcacccttgtgacctgtgacccctcatctctatcccgcagctttgtgctgaccgaagggcagaagcgctacttcgagaagcttgtgatttattgtgaccagtatgccagcctcatccctgtctccttcgtgcttggtgcggtccaaccccaagtcccccgttcccatgtccctgagaaacccatatccattcatgccttttgaggagcccccattcctgcccctctgagatcccccccctcaaatccaaccccgacagcactgcccacccatttttggatccatatcatgaagatgccagatgtggctctacactctgagacctggggtgtcacctggggtcacagtgccccctgaggtgcccccaggagagctccatctcacacacaggacttattcctggtcaccctggggattctcaccagtgtctgttgtgtta

SEQ ID NO: 8156 - DNA, 6000 bp, Homo sapiens
ctgggtacagctgaagttaacataaaaactaaccaacatatgttggacactagcttagtttggaggtcccccaagaaccaaccctgagacaatgactgtaggaaacgtgggatatctgggagagacctttggtgagggttagggaaaggagaggaaggtaaggccccctgcatcctgcagggggcaccaacgagcagagtcccccacgtgggaggagacaggcagtggcaccactgggtgccaggccttggccaaacaggtggcagcagcccctcactgagccctggggacagcccctatgagatattgatcgtctttgtatataagaaaactaaggctgggcacagtggctcacgcctgtaatcccaacactttgggaggcccaggtgggtggatcacctgaggtcgggagttcgagaccggcctgaccaacatggagaaaccccgtctctactaaaaatacaaaattagccaggcgtggtggtgcatgcctgtaatcccagctactcgggagcctgaggcaggagaatcgcttgaacccgggaggcggaggttgcagtgagccgagttcatgccactgtactccagcctgggcgacagagagagattccatctaaaaaaaaaagccgggcgtggtggcgggcgtctgtgatcccagctactctggaggctgaggcaggagagtcgcttgaacccgggaggcagagtgagccgaggccacaccatcgcactccagcctgggcaaggagagcaaaactctgtctcaaaaaaaaaaaaaaaaaaaggaaaagagaaagaaaactaagtcacctgcctgtgtcacatagccgggaagcacccagagccgccaggaaggcagcaggggtagttttggggcccagaattggggctgaagatgtcagccaggaaatgaatggaatagcccatatagctccccacaaatggaggcctgggtttgaatcccacctctgactcttctgagaccttagacaaggttctgaatgatctaagcctcagtttctccggtaaaataggactaaaaaccgcgcccaaccccaggctatctggagaatcaaggagatggtacctgggaagggtacgtggggaagggcttggcccacatgaccatattagggtctttctggctggggatgagagaaggtcggggaccaatggtaatcgatccgagggaagaagccgacgggagggccagccagacacgactgggcacacagggcctcggacgccaggcaaaggagtggggcttcaccccaggacgatggggagccccggtggggttatgagcagggcagagagccgatcagagcggcgcgtggcaggctcttccgggcgcctgcagagggacaactggtggacaagagtgaggatgaaactcaggacaggagctgagagggtggtcgtcagccctcgggcacaaagacaaggtgatgacgtttgttccctgttacagaaaggcccttactcccttcggctcctagccccggccccggccccggccccgcccccacccccgcccccgcggaatcccaggctcgcgcgtgcgcactggcagcagggaatccccagctccgccgcagagagcgggagggggcgtgagaggggagttccgtgcgcgcccagccggccccgcgtgcgttgccaggacgaccgggcggggccgcggggccgccggtcgctcactgcgcctgcgcgggggtgctcgccatttgcgccggggctttcccgtcgcgcgccagcagaagaggggatgccgcgcccagcgcgcatgcgtcggccccacccgacaccccccgccccccgcccccaacccacccaccctgagggccggggaatcctcacccgccgcagtgcgcatgggggcggggcggggaaaccggttcaaaccggagtggggtttgccgaggaggtggcgggggagggagcgagagcggggtcttcccgaggttcccactccggcccccgccgttgccttagcaaccgggcgcgcgggccgcagtgcgcgggcggcggcggcctcggggaagccgggtggctctgcgcctgcgcggggctccgcgcctgcagccggggttccccctcgagcaccggggggacggcgggggagtagaggatgggcgcgggggagcgggtgctggggaggaagagaccgtgggggaagagacggcgcgggaggaaagaaggggaggaggggtgggtgccgaggagggggcggtgggggaaaacgcaatgggtagggactgtagggaggggtgcagggagaggcgagcctggggatgcgcgccagggagggggtgacgggggagagcgtagagggagggggacgacaaaggcggagggggatgggagggggagcttagggagtagagaagggatatggacaaggagaggggtacactgggccagtgggggcgatgggagggggagctgggggacaccttaggcacctgcagtctcccgcccagcagattggtctgcgagggtgggggttgctgtgccagaaagtcaggatcttcgagtccgagcttaaggtttccagatttagaaaaaaaaaataaaaaaacagggcgcccacttaaacttgactttcagataaacgagcaattttttattataagtatgtcccattccgtgtcctctactttatcccgcagccctaatctgggctattgtcgttcccccccaccccccaatttacacaccatctgtccctatccttttcgaaagctgtgcggaccctcgcggaagacgcctttgtctcccgcctgcctagcgccccacagcccggcatgtggggtgtacccccgggccccgtcatcccctcccccagccatctgccgtcctcctggccttgaacaacagcctgaagtcgagtccgggctaggcaggggaaagcgcaaaggtgcagcacgcaccctcggggattttctcagcgctcctcaccccccacgacctccaaaccctccgctatgggcctggccctgccaaggccacatcgccccgcgggtcccagacacccgcaccttctccttctccaggaacctccagggctctgctttcgggcagcctccctcactctctgggcacaaaagcacacaggcacgtagtaggtgctcatgaaaaaaaacatttgagggtgattttagggaggcaagtgcaggtgagggagtgttgcatttctcgacacggacaactgcgtcctcatcccatggggacatataccctctctgggcctttgtcccctccaacaaagcaatttcccttttatccttccctttggtttcaaaaagtgtaagataacaaaacactttgttttgttatcaaaacacaatcaaaggggggaaaggtcagccccccaggggtccctggccctgggctgcccccagcgtctcccccaacacttccccaacttgccacgttcgcttcttttacttattcgccatcggaacggtggaacatttgcgcctccggcctggcttctgctcaaccggccaggagctcggtccctgcggatcattttccccaggggcatattattccggaaacgggctaagcggtcccgggttggggacacgtcggctcctgtgtttttagtttcgctggcctaggtgacccccctgcagaagacggctgtggatctgctgtgccgtgtcttggaggcatttctagggcggctagctgggcaaagggtggtgctgtccctttatttggagctaggtagctcctggggtggtgctgggtcgggagcggccctctcctcccatcagctaggaccaagttgcacctggcccctcattcccaggggcggagagaggagaagatgaaagagcaagcaagttcacaccagggcttgagggcagtgagaacagtaaaccagggcgacgtgcccagagaaggggcgactctagggaagaggcgaccttggatggagccctgaagagccctgtgggaacagggggtgaggagagccagggaagggcgatcccggcccaagaaaccgcagatgcaaaggctctgaggctgaaccggttagggggagaagctgggcgtgtccagaatgtggtgggcggtccagggagaccgcggagggattggaacaaagggtgggcgttgtggggggcagaccgcgtcggcctgtgaggagtcagggtgctcctcttggttcaagaagagaagggaggtggggggagggcggtcatgcgggacagggacgtgacctgtcacacgggtgaggactgaagtctgtggctgcgtcagggagaaggactgtggcggggacaggaggagccgcgggagtggggaggattttcgggctccactgggcgattgtggggtccacggggcgtgggggaatcccctgatcatgggtgtccttgtcacttctgcagcctgactctccttcactgtgtctgactaaagcatgggtcgcagccttccccaacaggggcgggaagtcccccccggggagggtgttgggtggcaccccttgtcctcggctcctgcgaacccaccggctctctgcctccacagtgcagacccgaaggcctcctcccctttgttctttttccctccacacggtcacggtcacaccggcggctccctctgagcgcatctcacacacaatgggggtggggggtgcgctcccagtttcccctcctctcagtatcggcgtccccgagccccgcccgcgccacggaatcccggcctccagaccccgcccgggaagctcgttacctttccagagaggctccccgccggggggctggggaggggggagggctatttttagaatgaatggaagaaaagagaggaaaaaaaacaaaaaacaaaaaccagaatggaggtttgtagaagcctccctgcttccaagaggaacccccctccctgtcccctgcctgaaggtggctgaaggtccccaccaaggctgaaggtgggtgggggttcagagacggggcggagcaggggacttcgaggaggaacacggtggtctgagctggagccacgctttctgttggagggggcagctgaaggagaacagcaagacatatccggcggccctacggactcggagagctggagggaccccggaggtgggcacttgtccgttcgctgaagggaaactgaggctcagaaaggggcttggcagggccgaggtcacggaaagggcttgcccctggacttctccctcccatcccctaccgagccagaccccgcgagccacattgttctaaggtggcagagtgaccttcacaactctgccacccaagcccgggccagtcaggctcaagaggttcctaatcgcgcaggttggggggagggtgtcaccagcccaacaatgaaatagagaagttttctgtggtttggttctggccacccaggctcccccttcctagctgggaccttccagcccggtcaacgtcgccagctgcccgaagcctctgggtcccccgatcctccccagtggcgtggtggggaggctttaattgtctgccttcctctctccctgactctcttctttcccggagctgagagagcggccccccagagtgaggggagcagccctgttccgtgctgctgggacactgggccctggccaggggcttccgctctccgggcctcagtttccccgtctgtaagatgagcaccttgggccagaggcggcagagggtcctcccatctctttgaccgtcttctaagatttgctgtcacgcccctgggtggaggggggagagtgggctttggcgagagacctggagggggattccatccctgctttagaggagacgccttgcgggggggagggccccggctgtggccgcgacggactgcctccctcggcctgcggggtccgcgccccctccccgggcggcggggcggggcccaggtcggcggggagggggtcggctctgcggcggcgcgcgcacaccctcccggctcacacgcccttgcccggccgtgcacttgtcttcgcgctcgggcagg

SEQ ID NO: 8157 - DNA, 6000 bp, Homo sapiens
ctctgctgcctctgagaagttaaactgggtgcagcatggctgtgctcttttcaccaagggaccctggggtggggcagtatggcctctagaccgtcctcagtttctcaatggcaaggtgggggtgggcgacatcaccccccagcctccagcgttcacccccgaccctgctcacctcctccccgcagatgaagttctcgctggagaagctgcaccaaggcatcacagtctcagaccctccctttgacacccagccccggcccgatgacagcttttcctgaggaccccggccacgcagctgttcccccacatggacagatggacacacagagcctcggcggccactgctggcacggtgtgagcgccaggcatctcccacccgcccctcccgacggcccaaccaggggctgtgcagacgtggggaccacggaaccgagatgcactttagaccagggagctggcccggcctctggcaggccccccactaacttattttgcccggctgaggttgtggggggcgcctcctggggtgcacgattccctcagctctgggtttaatgtattatatttatttggggccgacagtgccccaataaagggtcagaagtggctgtggctgtgcctgtggggccctgggagtgggtgggagcctcctgttgcactcagatcctgccatggtggggaggggacctctgtctgtgttctggggccatagtcactgaaacgatctggaattcccgcagcatcttacacaagctttacatcatctgaggtcaacgcaggaactccggggacagaccgtggtagctggagttcaaatcctgcttcctagcagtggtgtaaatgcagcaggtcagccccctggagctccagtgagctttcctgtgcaatgggtagaatggcagtagctgtctctcagggttgttagaaggcagtggttctcaaacttgagctgcattcgaatctcctggagagcttgatgaaaaacagactgtgggcccctccctccaaatttctggttcagtaggtctggggcagggctgggattctgcctttataacgagttcccaggagttgctcatggtgccatcccagacgacactttggttttttgtttgtttgttttaagttagggtctctgtcgcccaggctggagtgcagtggcacaaacatggctcacagcagcttcgacctcctgtgctcaagccatcctcccacctcagccttctgagtagcttggactacaggtgtaagccaccacgcccggctaattttttatttctttttggagatgggatctcactgtgttgcccaggccagtcttgaactcctggcctcaagcgatcctcccgcctcagcttcccaaagtgttgagatttcaggcgtgagccaccacgcccagccccagaccacactttgagaaccactattataggttcaaggagttcataaatgtggctacttataacagggcccggcacagatggaatggagtaagtattcaataaatgttacacttattgcataaaaatagagggaaaaaagtaactcgcgtagtgagtaccaagtacgtacgtacccagctctgtgccaagatctgatgttcattttattctcacagtgattccatgaggtggagacaaagatgtacacgcccgaggctacccagcagggaggcagactccaggcctgacccctggggtctccacatttacatgcaaggtcctaaccccctcaggaccccaccacagcccattcaggctgacgttggttggattcctgttttacagatgaggaaatgagcttggaggcaaagtccctggtccagaaagaacccaggtccacctcacgcaaaccttgtcctggttccagagggagtatgtggggtagagacacctttggcatgtcacacccccggctataagaatcatcctaactgatggcttggagcaggggactggaggagggtttggagagtggatcaggagtggcataggaggcagagccagcctctcctatcctctagttgtgtgatcatggcaaggtacccatgctgagcctcagtcttctatatctgtaatatgggtgtaataataataccacctataggaaaaattaaatgagctaatgttagtaaagtgcttagaatgcttagaacagcaccaagcccatacatagtaggtgctcactgaacatagcttatagggccgtgaggtgcctcctgtccagtgctgaggcctgtcctcactgtgccttcacctaccatcccccaccagtggaagggcccggaacagcaagagggttattctctgcaggggaatttcacagctcagaaggtgctggcgtaaaagtctagaccacagaggtgtcggatgtccctggctccctgcccctctgccatggtcctgccccacaccctggctcctcttgcctggcagggctgggccagggggattctgagaccttaccccacccggaattggaggctaggatctgggtagtgacccttcagccgagagtctcactcccaccctggtcctgacagcccagaactcccatctccattctctcaatttggcagaacctactggtaggacaggccactcaccactgctggggcaggattccacatccatcctaggccagctacatgactctgggcaggggcacggccctctcccagcctcagtttcttcatctgtaaaatggggataatagaacttgctgaaggtttggggcagtagaagtgggttctgcaaatcccaaggacttagtgaacattggcattcatttatttgtttgacaaatattgattgagtacctacaatgtgccaggaacagttcaaggtgcaagagacacaagacaatatcctcacctgggagattttttttttttttttttttttttttttttacatggagtctcactctgtcaccaggctggagtgcagtggtgtgatctcggctcattgccacctctgcctcccgggttcaagcgattctcctgcctcagcctcctgagtagctgggactacaggcatgtgcccccacgcccagctaatttttgtatttttagtagagatggggtttcaccatgttggccaggatggtctcgatctcttgacctcgtgatccgcccacctcggcctcccagaatgctggaattacaagcgtgagccactgcgcccggcctttttttttgagacggagtttcgctcttgttgcccaggctggagtgcagtgatgcgatcttggctcactgcaacctctgcctcccgggttcaagcgattcttcctcagcctcccaagtaactgggattacaggtgcccaccaccactcccagctaattttttttgtattgttagtagagacggggtttcaccatgctcgtcaggctggtctcgaactcctgtcctcaggtgatctgccccccttggcctcccaaagtgctgggatagcggggggcggctcacatctgtaatcccagcatggtcaacatggtgaaaccctgtctctactaaaaaataaaaaaattagccaggcatgatggtgcacacctgtactcccagctacttgggaggttgcggcaggataatcgcttgaacccgggaggcggaggttgcagtgagacgagatcagccactgcactccagcctgggcaacagagccagaccctatctcaaaaaaaaaaaaaaaaaaaaaaaaaaaaaaagaacataatgtcaggtagtgaggctgctgtggaaaacactcaacaagaggtaaagagtaaaggaggtcaggttaggagcggggaaggcagtttaccctgaagggacacagaagacctgacgaaggtgacattggagccatggaggcccacggagaggggcggggcagggggggagagccggggcagaggggagagctggggccaaggccctgaggcaggaacgggttccctgtgttgggaacagcaggagggcctgaacagccagagtggagtgggaggaaagaggggtagaaggtgacatcagggacataaatgggtgcaggggatcacgaaggggtcctcctcctgaaacagcacctccagattcccggggctgcttctctccagggtgccccgcctgcttgggtgaggtccggattgtagctgtagtcctagcctgacggccccccaccctcctctaatgcctacttggggtccctgcacattgacccccaggcctggatatcagggctcaggggagataacttggaggttcgccctctggaactcctgaggatgacctccatcatttgaagtcggaaacccggcccccaaactgcgctctaagtcctcctgtgactctgggggtgacctttccagactccctgggaaggtgggggggggggggtggtcctcagagccccagcggggtcggagacacacagaccaccctccccgttcccagaagtcgcggtccctgcgccacccggagaggccggtgcagcgggcgcctcccgggccgctgcggcaaaggctgggcggccgcgccttccccccgcggtgattcatcccgccccctccctctcctccctcgtccctccctaggccgccgccgccgccgccgccgccgccgctgcagtgcgcaggagaccgcggtccgcgcccgagcgcgcccgagccggagcgggaccggggtcggtgcacctagcggatgtgcccggctgcgcgcgccagcgcagcagcccgagcagcggccgccgcccgcgcggcggggatgcccggacgccgggccccggggctgggcccccggcggtaaccggagcgggggggccgcgccccccctcctcccccctcgccggtcccagagccgcagctgctgcgcccgcgcgctcccggggacattctaaccgccgccaggtcccgccgcctctcgccccgctattaataccggcggcccgggaggggggcgcagcacgcgccgcgcagccatggggaggctgctggccttagtggtcggcgcggcactgggtgagtgcgcggggggcgcgcgcggccggggggcaccgcgggggcactggcggggcggcgggagtggcgctcgggacacggggcagccgcgcgagggccacccccggcccatccccgggccccgccaagtcagcttcagaagttgtgcgcgcgggagccgggcttggggagggcagtggaggtgagggtgggctccagcgggtgggggccgggctggcacagcctggcggctgcaggcgcccagccgggggcgaggaaacgcggagtcagctgctcccggagccccgcaggctgcaatgtgacacccacagccgcgggaggggggtggggggaaggcggcgcccggagactgggacgggaaagacggagggacagggagagatgaagacgggaggaagggggcgagagacagagaaggactcggagcgcaccggagtggtccgctgggatgctggggacatgggggtcaagggggagacggagacagagagaggggtattggagagagagagagagagagagagttaagagactgagcgcgatggagaaagggaaacttgagaaaggcagaaggagatggagagaagagagagggagatgcgggtgcccgtgaacaccgggagagaatcttgcatggagtttgaaaagggatagacgtagaaaggtggaaagagattaggagaggtctccttctgagcccagagagtggacaaaaagtggagggaccttcagagagacccctgagagggacaaagataggagggactgagacagaggccctcagggagtctgaaagggaccgcaggggaggcggatggatgagaagtcctgaggatcaggaaacaaggacagcacagggctgcagcagaagagacacagcgttagctacagagtgctgggaggcagaaaggaggtgccaggtaagagtgtgaaggaattctaagactggaattcagtgggctgcaaaagccctggggcaggagagagctcaggaaagctttga

SEQ ID NO: 8158 - DNA, 6000 bp, Homo sapiens
cctgccacctcagcaatggcttccaggtgggaatgggggtcttttagtccagacttttccagagatgctggaaacacagcttgtcctgctgtttaaatgtttgcaattattaatttttgcaatgctttgtaaaaactaaaggtacaatagttgggttccaccctgggaccgccagtttgcaatccttctcttagggactgagtcaggctggggggggggggcgggctgcagggctcccacttgaaccagaagtccctgtcccagatgtctagctccaaatgtgttccctgccctttcctgcttccctgtagttcctgcccgcacccaggacccccagccatctgcccaagccctccccacccccaccacgccgcccccactccccacatgatggggaagctggccaagacattcattcctccacaccccctgcccccatcagcagctccaccctcagcacccccacctcagctcctcctgcaaggcctccgtggatggggggtggcggtggagaaagcctttcttttataattgttttaaacctacttttatttttatttttgtagagacaagatctctctatattgcccaggctggtcttgaactcctggactcaaaggatcctccagcctcggccccccagagtgctgggattacaggcgtgagccatggtgcccagcctggtaattaacagatacttcgtgaccacccactatgcaccaggccctgttctataattcagatgaaaatccctgagaggagctgacgtgctagcaggggaggcagatagcaccacaaaaaaaaaaaaaaaaaagcaaacagaagtcaaaaggtcatagagaggtcagggggtaggtgcgatggtggtcggggaaagccacttgaacctcatggctttgagctgtccagatgcgggagaaaagagagccaggcaagggaataggcattgcaagggctcttggccagaaacatgcctggagtgatccaggaacggcaaggaggcccaggtggccggagcagagtgagtgacaacaggggttagggggaaccctgaacctcccctgagtttccctagtctgtaagatgggggtctccaaccggtggccccagggccttatccaaccactggatatttttcattctgtctacaaagtgttaagaaaacgaagttaccaacatttaaaaatcagggccgggtgcagtggcttgcacctataatccctgcgcttcgggaagccaaggtgggaggatcacttgagacccagagttcaagaccaggttgggcaacatagcgagacccccgtctctaaaaaaattaaaaaattagccaggtgtggtgacgtgcatttgtagtcccagctacaggggaggctgaggtgggagaatcacttaagcccaggagttggaggctgcagtgagccatgattggaccactacactccagcttgggcaacagagcaagaactcaccttaaaaaaaaaaaatccggaaggccgggctcggtggctcatgcctgtaatcccagcattttgggaggctgaggcaggcggatcacttgaggtcaggagttggaaaccagcctggccagcacggtgaaaccccgtctgtactaaatatacaaaaattagccgggcgtggtggcacacacctgtaatcccacctactcgagaggctgaggcacgagaattgcttgaacctggaaggcagaggttgcagtgagctgagatcgtgccactgcacttcagcctgggcgacaagagcaaaattccatctcaaaaaaaaaacaaaacaaaacaggagatttcatcataaaaatctccatttctagcttctgtgggtgagtgatgacgtcagagcagcacagaggcaggtgtcagggagcctgtggactcttggccactgtgtcacctcacatggctcctggaagccaggcggacagtgatacgtccacagccacaccatccccatggtggtgggacagggttacctgccagtgcccactcttctcccacaggtgctgagaccacagcgctgttccacaaagccccaggaagccacattaccctgtccaccggcctctctagccccatcttgcccaggaagtgggaccttggcgtatcgctgtgaccacacctcccagccggtcagcctggccgctcaggctctacctgcaaaggcaaggccccacccaaccagcacccctctcatggctgggggtgcctccaggctgccctctctagggccaggagcctgcagaaacgctcccagccttgaataaagagcaacgaaattattgaaacaaaatcaataaaagtttgaatcagggatggtataacatgctctggctttgattctgtgctttaattcagcgttcctgaaaaacttatgatgtcagaaactatctgtaggtttggtttttttcattttgcaagaattcccaggatatggagaaatcacagccactcacagccttaacaggttctttgggcccaaatgattccaaaagcaaaacgagagaaactttttcaaatatgtttattatgtatattatatacaatatattaataaaacatattacctacatgcatttaaaacataactgaagtcagattggcccagaagactcactccaaatgagacctaatccccaatagggtgcaagtgactgcacaaactctactcctcacagcccttcctaagactcagtgtgctcatcacactagggtctcagagtccttctgaccataaacccaagccccagcgccagcccaacacacacttggacgcagcatgttcacgtccagcctaggaagaatttatggttgacctggattgggtaaaaaccgtaaacgtctgtacctcagaatgtaagatcatggtgtttaaaactacagaacattcagaggttgtcagaagtctctaattgctggtcccccaggttgaaaccagcccttaggttgaaattttgacctgcaaatttttttttaaatctgaaccaaattttttaaattaaacccctttaaggtagtacattttcaagatgcaaaattcaaaaaatataagagggcacgtgataatgagtgagtctcacttccaccccaccctccagcctcccagtttccctctccagaagccatgggtatggatgccaatctccaaaaatattttattcattacaagtatatacatatgcattattttaccgctcacaaatggtagcacactgcacggtttcccaataccttgttttttttccccttagcaagctgtctgggaaatacttctgtatctaaccacgggcaggggtgttcctccaagatttttagacaacagttctccagttcaccccgttccggtgaagggcagagcaccccccgcccttcccagccaccctgtacacgcccctactcgctctcggatgcctgcagttcccaggcttcccagcagagggagacaccattccactcccaagaccaccaaggggtcgtcccagacacaagcttcaagggtctagggaagagacgctatccgcccagacacaaagaccccccttagctatactgagttggcctccgggcctccccttcctgtttctatctcctcctggacctgttgcttagagccctaccccgaggtccccccgcccggcttccttatgggaactggccccgccttaagagtggtaggagggagccttacccttgtctaggacctgggcttgacaacttgccccagggaaccacatagagaaggggtgtagcgctgggcgaacattgccctccccgatccctcagcgatgacaagtggggggtccttctctctgcccccagcaggccagtttccggaagagccttgacccaaacccccttttcctgtcctgtgctccacactcccagcagctgcttctccctggccaggccctgcagccctcctccccgcccccacggtggtgttggggtcgcctggagtccagctggtgtccagggcagagctacccctttcctggccctacccctccccgtgaccccaatcctccgccaaccgctcaaaggatccttgttctccatccagcccccagacaaaagtccctctgtctaagaaggcggaattgaggggagggggcacccccaactgggaccatgggggagcctgcacagaccccatccggaaggaatgcctggaggaggaggagcaggagacaggggaggaaagggggagggaggcttgtacagtgctgggggccttatgtggactaggaggcagccgcccccaccagcacccactctgtagacccaggcgtctggctcccagcacccacggaaagagcctggctaggaaactgcagcctggtgcctggcagacagttctcattctccccagggcagggagcaggttatgaccaggactaaggtcccagagtccccaccctgacccctccctgctgttccagccgctccctcatatccacccctgccccatctcctgactttggtcacgctagcatcttctgctgatcctgaaattgtaccagcggcaagatgtggcctggaaggggactttaagttctccacaactgccagcaatccttccaccaggcaaaacacatcatctaaggaaaagaagtgaggtcggaacaccaacgcatcatctcactgcatggccctggaggctctgccgtttaaagaccccagaaccttccccattcaaggtcctctcctgggcacaggagattggagaaagctcctcccttaattccaggggccgagttccagcccatccaattctccgtctcacctgaggctgctgtggtcctggtgaccccagggagcaacctgccgcccatggctggggagggggtgaagctgtctctttaagagcaggaatggagcccctgggcctcagggcatctgacttgttttctacctgcccaggtttgcttagggcgtggcagcttcggataaacgcaggactccgcctggcagcccgatttctcccggaacctctgctcagcctggtgaaccacacaggtgagcagctggggccccttcctccaagccctccttgtctctgcccctaaattaggaagtatctacctgccccctgaccctgccccatagaagcttttatgttaaagcgcctaaaatcttgtgaaatgcttttctggagccaggagataaacggaagtcccttcccctaatgtccctttccccaccattctcctctcagggacttgttgaaccagctgaggtgagggcaggactgataagtgtggttggggtgtctgaaagactagtgtctgcatggattagggatatctgggttggggatagctgggtggaggagagggggtgcctgggtaggtaggggtatctaagtggaccaggggtgcgtagatggactggggacatctgggtggatgaggaatgctgggtggactcggggtgtccagacattgagggatctgggtggataaggagtgctgggtggactcggggtgtccagacattgagggatctggattctggagacctccaggaaaaaaggatggagctgctgggggaagctttaaatggggagttgcttgggagatttcaggagcacacagcgggcaggatctttctacccacccctgaacatgagaccattctcccatggtatggaggaatagaggggatagcagagggcaggtgggggaaacagtcctcaggccggccttgggacctcatggccaggaaggatgagagcaggtagacagagcatcagctgcagggctgccttcctctctaacctgctcaccaaccacatcagttcgggagcagcccacagcctcttcagacaacagcctgaatggggaacgtgagggcagacccagctcccggctccctgcagcctccggaagcatgggactggacgttgttttgcagaggctggggcgaggaggataccatctgtcagtcttggctggatgacatcatgggaagggggtatagtggggccttg

SEQ ID NO: 8159 - DNA, 6000 bp, Homo sapiens
gtacagacgtgtgcatacacccccacacacgtgcatcaatgcccacctgacatctgtgtgagcatacactcccacacatgtgcataaacgcacactcccttgagctggttgtcggcccagccaggccccactcacagcaggtgcagagacggaattctcaggaagctgccggccttcagctgggtgactcccgtcctgacgagtgagctggggatgtgggcagtggtaggtgagagggacaccacagcaatactccagttgcaaaccagaaccttctgccatccgggagaccccagcgtgccaccctgaccctggatgtgtctcccctgcatgccagaggaggcaggcatttgccctcctggcttgacaaggaccctgacagcactcaaccctcctcctgggccccaaatgctgtccctgccctctggggtttccttctgctccttcccagatgccagcacccctcttcaaggcatcccgacaggctttgctgcccatctcctgagatcctgatgggcccctgtttccctggagacccggcaccacatcccaacctctggggtcccaggacttccgtccccaccttcgggcatgcagaaggctggacactcacagtgacagcagggtcggagagaagctgacgggcaggtccggggagccctcacacagggcgctgtctttagagcaggagcagcgcaggggacactttccctttgggggtctccaggccaccaccacccccgccccagccagcagcagcagcagaatgcctgcccctcccatgcccccacccccactctgaggcacccgcttctcccggcccacccagctcagcccaggccactacgtctcctcctccaccaggccgccctccatccgcctgctggcacgctcggccctggcttctctctcctcttctccgtctttctttcagtcggccttcctccctgttcgtatgtctttggtgtctaattttctgtttctctttctccctgtctttctgtctctgtatttttgactctgtgtgttagtctgtttctatttctgtctttgtctctctttctgcctgtttctttttttctgtgttgctgtcagtctttcaggctttaggtagctgtctatctgttggtctctatgtgtgtgagtgtatgtgagtgtgtgtgtgtcctgctgcctggtgtcttgatttcttgtctcctgccccccccacccccccttccagctccctgcctgtagtttctttgcctcctcccacctcccttctccccgaaggtttgggaaaggggttcgctggacacccggcacacccggcagagtaggatgggaaggaggagggggtcagaggccatgagaaggtcggccttgggggaagggactggacagccccacaggagggggaggggccaccaagggctggagccgccccaccactcccgccagccccctccccagattccccactcaaccctattgggggagcaggaggacgatgtcaccagggtggggaccagatggctctgcattctggagcagggtgggaggagaggccctgggggggctggggacatcccgtcctggccactctctgccagccccctcccctggctacaggagggtgtgttgggcgctgtcagtggggccagatcacgtccagctgctccctctggtggtcatactcggcaggacctctgcccggccccaagcccttagcctccctcccctaccctgaaattaaccctctagtggccaacacccactgggggacagcaccaacccgaggacatgatgatgatgaagatgatgatgatggtgaagatgatgatgatgatgccaccccttcttcagcgtctactctgagcctggccttgtcctaaaagctcatctattaactcattctgatcttgccaaagccctctgaagttagtgctgtcatcatcaccactttacagctggaggaagtggagacagaggtcagggaacctgaactctaggttacccagctgagggcacagccgggattcaaacccaggcatccggctccaggttattttgcattctttctttggagatcagagttcatggatagatggataattggttgttttaatctggactaaattttagtcatttggatagattctgtccactaaataagaaacataagtaaatgacacttgttagctaagatgaaatagtagtaatgtttatactcactcagccttcacagccaccctgtgagatgggcagtactgctatccctgctttacagatggggaaactgaggcacagggaagttatgtgattagtttcctggctctagtcagctctaaacctaacccctaggctgtaccacctcatcgcctggggacgagactcatcctgtgattgaggaatgcatgcagcctctcttgacactgacgcccacgcccagaagcctcgttggaggataagggggcttaacagcttggaggtcatgcagatctgggttccaggcccagtcctgtgtggcctcagttttcccatctgtcaaacggggacaatcgtggcacccgcttcccagttgtggagaggactcaggtgatggaggcaactcatccttttggggttcagcacaaggtgggcatcccacagtggtcggcaagcttgggggtgggctccggatccagctcctagaggagcagaccccagcagcttgtggtttgagccatgcccgtcagctctcagtttccttcactgactattgggtatgataaacagggtccctgaaagtgaagttggagagctgagtgccaggggcacagagggatctgaacccactctcatagggtgcccagcccagcagtccagttcacaaggaggaggatgacaaggacaataataataggccaggcacggtggctcatttctgtaatcccacattttggcaggctgaagtgggaggatcgcttggggccaggagttcaagacaagcctgggcaacatagagaaaccccgactgtacaaaaaattaaaaaattagccaggcatggtgtcgcacgcccatagtcccagctactcaggaagctgaggtgggagaatcacttgagcccatgaggttgaggctacagtgagctatgattgtgccattgcacttcagcctgggtgacagagcaagacccggtctcaaacaaacaaacaaaaaatgaagttaatcataagacaatgtcaagttcagagacctctgagccctgtccaggattatacacgtgatcttagtgatttttccattttggagcatgtgaaaatgaggcacagagctgctcaagttcacacaaccaggagtgcagtgcctgggccattccaggtttccctgtcaccaggacctgtaaacctggcctgcccatggggacgccaggtgtgttgtccccgacaagagctcaggggaaggaaagtgtggggttaaatacatatctgtggttttggaatgtgtgaacatgcaagtgtgtcagcctgcgcatctgtcaccgtggccaaccatgtgcctgtttgctcaagcatagggtgtgaaccagtgtgtgtgtttctgcttttgtgggtatgtgtgagagcggcgggttgtccttgatggtgtttctgcttgtgtatctgtgcccatggaaatctgtctgtgtgtacacaagcttgttggccttcctatctttgggaccatgtaggagtgctggctgcatgtctgtacctttggggtttttttgttttgtttttgtttttgagacagagtctcgctctgttgcccaggctagagtgcagtggcatgatctcagctcactgcaagctctgcctcccgggctcaagtgactctcctgcctcagcctccggagtagccgtgattacaggcgcacgccaccacacccagctaatttttgtatatttttttagtagagacgagctctcgtcgggttggccaggctggtgttgaactcctggcctcaagtgatcctcccgccttggcctcccaaagtgctgggagtacaggtgtgagccaccgtacctggccatgtttggccatgcatcttagaatgcatttatgtgcggtgtgcacatacttgtgtgtttctgtatggccatttgtgggtgggtcttcacataaacatgcatttttgtggccagtttgtgagtgtagatggtgatgtggctatgtctttgactgtatctctgtgtggccatccatctacatgagcgtgcgtgggtctgtgtagacataaatgtgcttgttctggtattttgtgactggcataaaaggtgttggctgtgtgtccgggtctttgggtttctctatcagtgtgtcattctgtgtgtgtctgcttctatggatgtacatacatacatggttttgtctggttttgtacctgtatatctgggtctttgggattgtgtgtgggtgtgtgtgtgtggtgcatttctggggatctcaccacagcagatagcgcacatgcgcgcgcacacacacacacacacacacacctccctcccgtcctctaaaacagccctgttaaggacctcacggagcactgggatcgggggtcagtgggctcctgggcagtcaggctgggtgaccttcggccctggctggacccagttcccagggggcagccgcctcagcccaaaagctcttggaggcgtgtgtgtttgtgtgtgtgtgtgttcacaaccctgtcctccacaatcctcctagcctctccagcctgcctgctggctgcctgctgctgctctctctgaactgagagagttaaccaagcgggccagggcagtctgggctgggggccgccccctggcccccctccagccccagctccagtttcagctgctggttggggagggcatgggtggggtggggctgggaggggaggctgctgggggcggcgcgtccagctctgggccagggggtccaaagtgctcagcccccggggcacagcaggacgtttgggggccttctttcagcaggggacagcccgattggggtgagcgtcccccactccttccctccaggcctcacccctggtctggctgggccgcctattttgggagcaggagtggccagcccgaggcttcccaggcaggccaacccaagagggagggagtgtggttgaggcagtgggttctgcagggtgggatgtgggtgactcctccctgccctgctggtgcgtgtgcaccctggcagggtgtggagttgggacacacacgtgtgtagggctggttgcgtcactgcgtgggggcaccggaggcccagaggaggagtattggatgcctgacggtgtttacaccccacgtcctgctccaaccagcagtttggggagaggttgttgttcatgtccattccggccccactgtgtgtgtgtgtgtgtgtgtgtgtgtgtgtgtgtgtgtgtatccctgccccagcatgtgttttctatctctaaggcccactgggctgggcctcatgtcacttgcctgacatccgattgtgaaagatgtcacccagaggcgggcagaggggctgtcttttccttttctcgttgctgcccagggaggagacggggtgacctttcccacaggggcagcctgtggcgatgtggcagctgggcctcaccccggcagggctgtgcgtgaccccctgagtgggggaaggcaggctgttgccatggtggcctgagcgagcagaattcctccagggtgaagtgggagatatttatacccggggtcaggccgcgagcgggcgggcggagagggcagggagctgggatttcgcggggcacagtgaggccgggcatgtaggcaggtgggacttgggcgtgccctgctgtctcctgctctgtgtttgtgtgaggcagcgcctcctctgccctgccagggtaggtctgggaatcgggggcctgctgcgggaggtggaggcccaagggaggccccccggggactgtgtgtctcacccccgtccctgctacgttgtgttgttgtgtgatcccatcgtggaggttgttttgg

SEQ ID NO: 8160 - DNA, 6000 bp, Homo sapiens
ctttgggattgtgtgtgggtgtgtgtgtgtggtgcatttctggggatctcaccacagcagatagcgcacatgcgcgcgcacacacacacacacacacacacctccctcccgtcctctaaaacagccctgttaaggacctcacggagcactgggatcgggggtcagtgggctcctgggcagtcaggctgggtgaccttcggccctggctggacccagttcccagggggcagccgcctcagcccaaaagctcttggaggcgtgtgtgtttgtgtgtgtgtgtgttcacaaccctgtcctccacaatcctcctagcctctccagcctgcctgctggctgcctgctgctgctctctctgaactgagagagttaaccaagcgggccagggcagtctgggctgggggccgccccctggcccccctccagccccagctccagtttcagctgctggttggggagggcatgggtggggtggggctgggaggggaggctgctgggggcggcgcgtccagctctgggccagggggtccaaagtgctcagcccccggggcacagcaggacgtttgggggccttctttcagcaggggacagcccgattggggtgagcgtcccccactccttccctccaggcctcacccctggtctggctgggccgcctattttgggagcaggagtggccagcccgaggcttcccaggcaggccaacccaagagggagggagtgtggttgaggcagtgggttctgcagggtgggatgtgggtgactcctccctgccctgctggtgcgtgtgcaccctggcagggtgtggagttgggacacacacgtgtgtagggctggttgcgtcactgcgtgggggcaccggaggcccagaggaggagtattggatgcctgacggtgtttacaccccacgtcctgctccaaccagcagtttggggagaggttgttgttcatgtccattccggccccactgtgtgtgtgtgtgtgtgtgtgtgtgtgtgtgtgtgtgtgtatccctgccccagcatgtgttttctatctctaaggcccactgggctgggcctcatgtcacttgcctgacatccgattgtgaaagatgtcacccagaggcgggcagaggggctgtcttttccttttctcgttgctgcccagggaggagacggggtgacctttcccacaggggcagcctgtggcgatgtggcagctgggcctcaccccggcagggctgtgcgtgaccccctgagtgggggaaggcaggctgttgccatggtggcctgagcgagcagaattcctccagggtgaagtgggagatatttatacccggggtcaggccgcgagcgggcgggcggagagggcagggagctgggatttcgcggggcacagtgaggccgggcatgtaggcaggtgggacttgggcgtgccctgctgtctcctgctctgtgtttgtgtgaggcagcgcctcctctgccctgccagggtaggtctgggaatcgggggcctgctgcgggaggtggaggcccaagggaggccccccggggactgtgtgtctcacccccgtccctgctacgttgtgttgttgtgtgatcccatcgtggaggttgttttggtgacactgtgtccccacgaagctggggatacccgtttctctagcttggagccaccaagatagaggacaaacacttctgtgattcagtccccagactgtctctgacttaatcccttgggttcaagccctatgtgggagagcaagggcacacactgcctaatccgtggtgtcccccccaggacaatggcgtctcttggccacatcttggttttctgtgtgggtctcctcaccatggccaaggcaggtgagtgcaggggaggctgcccgctacccacctcagccccaggggtggcggtggggaccgaagaaccaagttggagaccccaacctagactaagtcggctggggtaccaagaagtttgggggtctccacgtggggtccagtcacaggctggtatttgggggaggggagaggaagccccagatcaggcaaagatggggtgggatggggctgaatccccgatgggataactgggtcacagacagcctgccgtgagtcagggagctggggcagttaggtgccacctgccccatctgggacagtgcagagggggcagctgggacccagagagtgtgggcagcctgcccagacaccctcagactctaagcccagcaaggcagagcctccagtggtctcctcatgcccctccctgccaggaccccaggaagcattcaacccctgatttctctctctttccagaaagtccaaaggaacacgacccgttcacttacggtgagcggggggtctaattttgagtcctgggggagagcctggctttgctggtcctttgattccccctcgccctcccccagagtcccagtattgatatctctgtcattctccttccctctattttgtccttcctctctgattccacctgtctgcatcttttcctgtctgtgtctatctgtgtcactgtctatgtgatacctctctggttctctttctcttgcctgcgtctgtctcagcatctcgtggcccatcctctgcttcttcccgtcttctctcccccctgtcctcctcctccctgtcccctccctccctttcctatacacccctttcctctccctggtaccccactttcctcctcccatatctgctcccccttaattatcttacttccccccttctgcctgctggtcctttctccctgttccctccttcccaatttacccctctcctattctccctcctgtcttccctgccctcaccttccctgctctgctgctcacagactaccagtccctgcagatcggaggcctcgtcatcgccgggatcctcttcatcctgggcatcctcatcgtgctgagtgagtgcccctagctcccgccctctaccccgcctctccctggccccacctctctctggccccgcctctccctggccccgcctctccctagcccccctctccctggccccgcttctccctggtcccgcccctccctggccccgccccgccccaacccctcccaggccttgccccgcctaccctgccttggttccccggcccccggtctcgcctctagccccgccccgtcccccaagccccgcccctcgcgagggcgagctggagctacagcgccgcttggcgcccgccgggagggagcctcagcttctcctacctctccacgcccacaggcagaagatgccggtgcaagttcaaccagcagcagaggtaagacgcccctccccgccctccttcgcccgctcctgctctggagggcgccgcgggtgaggcggggagtacccctgacccgcagcccgatccccgtcagcgactatgtattaagcacctactatgtgccatggcccaagcctggccctgggaccaagcgaggaaaaaacctcccgcccttcctggccgagctcccagcctagtggaggcggtggccgtgggttccaacagccccacagatagaaaaatcacaaagcgtgataacacaaagtgcaggaaagaagaaacggcggtgaaatgagatcatctcacacgcggcccagtttagcttagagtcttgttcctagctctttgattcctcttcgaataaaatgttaaagcatggacaatgtatgaatatgttagaacaattatagatattatcataagtagtagctaatatttactgggtgtgtaccacgtgttagatacggtttcacttcctctgggagggaggtgctgttattaaccccatttgacagatgaggaaactaaggcacagggaggtaaagtcactttgttcaagatcactcaagtggaagatggggggttctgggtttccaacccaggccatctcatggcagtctgccaagtccccatgactatccctcccccaccaacttcacatccctgcccccaaatccgcggaggtactcactgttaaccagcttagaagccccctgccagcacataagctgctcctgggtgctcctcatttctggcggaccccgagcctgctcttcgtccatatctgggcctagttacaccaatctgggaaaggaggcttgtactggggggttcctagaagggcagcctctccccctttccatcccgaaatccctctgcctctgtcttcccaggactggggaacccgatgaagaggagggaactttccgcagctccatccgccgtgagtctggggagactgcgggtattctggggagagggctggttccaaggaccgcttttcccggccctccctggctgcgtagagggaagggctggatctgaaagcggagggcggggagttgccccgccgcgggccccacctgcccaggagctggggatgcctctccagaatgacccccgatctccgtgttccccccaggtctgtccacccgcaggcggtagaaacacctggagcgatggaatccggccaggtgctgcagctctgacacggcggtgggagggaaggagggaggaaggaaaggcgggagagggagggggccaagtgccagagttgaagggcggcgaggggtggggctggacgtcccccctcgcctctcacccttttcaccctcacaggactcccctggcacctgacatctcccacgctccacctgcgcgcccaccgccccctccgccgccccttccccagccctgcccccgcagactccccctgccgccaagacttccaataaaacgtgcgttcctctcgacagcactttgtcggtctcggtccctcagcgcgaaacgccagcgccactgggccccagcagggggcgccccaccctagaggaaggggcggggacgacggtggtgggcgggggcgggggcgggggtggcctgcacgggggcgggctccccgggcccccattggctgcaggcccccccacgccagggctccccccagctcccccccacatcggtccgtcctgcttccagctgctgcagcgcgccttcgccgccaaagcatccagcagccccctgctccggcccagcatggcgaccccgacccagacccccacaaagggtgagcgtcgtttggggagggggttgcaggggggctccgggatctgagagcctaggagagagggtgtcgggagattcaagcaatggtaaggcaagggagttgggggagggaggtccgctcctcctgtgggcggaagcccctgtaatgcgcccccccgatcgcccctccgggtctctgggacaccccctccccggcaggcgtcctgtgccagacctgcggttggagagtggcagtcccgggagaagggatgctcggacaggtcgctatggcaaccgggtggctggtcccgcaccgtggtggtagcagacggggaagagatgagcttgcagggtgggagcgggtgggtctgcgaccagagacgttctggaagatttcagggtccctggggtgggcaagggaaggggaggaggttcatgtccctcttctttccagtgctgtctcctagggtgtctgtttcctgaaacccttgacagccaggttcagaggaaaggagtgagagctgaaggaagagacagagagaagggatatagcaagagacagacagggagaacctggaagagacagagaccaagagaggcaggagatccagagtcacagatacaaagacccaggaagacaaatagatggactcagagagattcccagtggaggggagaggctgagagcagtagacagagatgcagagagagagagaaaaaaaaatgagagcctgggagatagtgggattgagaccgctatggagagagaagcagagagacggagggagagagacggacccatggggagagaggggagtagaaagagaagaagggagccatgtggggtggggcccaaaccactgcagtgagaccctatgtgtgggaatggggcgatgggaccctccttccagcccacagcaggggtgttttccaatcccagaggtgctgttgggt

SEQ ID NO: 8161 - DNA, 6000 bp, Homo sapiens
ctcccgcctcccaggttcaagtgcttctcctgcctcagcctcccgagtagctgggactacaggcccacaccactgcacctggctaattttcatatttttagaagagacaggatttcaccatgttggccaggctggtcttggactcctgacctcaagtgatctgcctgccttggcctcccaaagtgctgagattacaggctcattacaggcatgagccactgtgcccagctctacataaaaaatttaaaaattagctgggcatggtggtgtgtgcctgtagtctcagctacttgggaggctgagcagggacaatctcttggagcccaagaggtagaggctgcagtgagccatgattgcaccactgcaccccagcctgggtgacagagtgacactacatctcttaaaaaaaaagacaagaatattatgaggcaagaatattaggcaagaataattcctatgaagtaaaataaagaagggaatgagattggaaagtgtggaggagaggatggaaattctgaataggacagccagaggttttgctcacaatcaaataaagcccagacactggtgagggaaggagccacgtggatatttgggggaagagctttcaggctgcaggaacagccagtgcaaaggccttgggataggatcatgctggatatgccccaggaacagtggggaggccactgtggctggagtaggattgatggggagagtgaggtggggtgaggtccaagaaggaaaggaactggatcatatgggactttgagggccctagtgaggaatgtggtttctaccttgagggcaatgggcgggaggagggctctgagcagaggagaaaccagatctgactcaaatgttgatgggtccttgtggctatcagaggtgggagtgcaggcaggccagcaagaccctagagaaggctgctgcagaggccagatgggcgacaatggtggacagaaccagggccagggaggaggtggtagagggagagtattatatatatatccagggtggaaagcgcagggggagagggcaagggaggaaagtagagggtacagagggcaaggggagctaacggtgcccaagcccacaccctacatcctcacatcaaccccctgaaggagtgtccagcacagtccacagcctccctgggcgattctgggttcctggctgggccacccagagccaggactgggctccaggtgcagccaaggtgctgtccctgcctcgatgtcccccattatcttccccagactacaacacggtgcagactgtgggcatgactctggcaaccatcttgttcctgctgggtatcctcatcgtcatcagtaagtgcgacccattcctgggctgcctcagcctccgcttcctctgctggctttcatccatatcctacccgctatgtcctgtcttcttgttctgtctctctctcccaacaggcaagaaggtgaagtgcaggaaggcggactccaggtctgagaggtctggcagcagtgggcaaagagcgggagggggcctcggggtgcctccctagcagatgggcaggatccactgggcctgccatgcgttttccccaaagcctatggttattgaacctctttctacttttctctctcatctctgcctccacagcccaacctgcaaatcctgtaagtctgagcttccctcttcaggtgagggtgagaaactgtgtggttctgggagagttttaggtggggcagggaagggaaccctcagaagggaagtcgcggggatggactggacgcagggggcggagggggggtggtgcctgcagatatcacaggacaattccctaggaagctgaggaaattccgcagatgaaagatgctaaacctggctgggcgcggtggctcatgcctgtaattccaacactttgggaggctgaggcaggcagatcacctgaggtcaggagatcgagatcagcccggccaacatggtgaaacaccgtctctgctaaaaatgcaaaaattagccgggcatggtggtgcgcacctgtaatcccagctactcaggaggctgaggcaagagaatcacctgaacctgggaggtggaggttgcaatgagctgaggttgtgccactccactccagcctgggtgatagagtgagactgtcaaaaaaaaaaaaaaaaaaaaagaggaaggaagaaatgaaggaaggaagggagggagggagggaaaagaaagatgatgctaaaccgtggggaggctgtgggatgtgacatgtcccagagtccacagagattcccagaaacaaatgctcaagcctataaaagccaggacaagctgatttgccaggagaggaagacacaggcctgtgaagagaagggccccatgtgggaggagctctgtcaatcaggagggagagagagggagcactgaggaagacggggagaggctttccagacttgatcgttcagccaggcagatccaggatgaaatagccgaggaagcgggacagagggagggagggaaggtttctgaatagttgcatcaaaataacaaaaagagagatgaatagaatgcagattttagaattcacattggaaaagaacatatgggatgcagggaatgtgaggatggagaagaaagctgggaagaacaggaggggagagagtggagaggacggaggtgttggggagaatgtgggaaggaggagcccaggaaggaaggggaggaggatgggaggaggagggcgtggagggtggaggagggagaatgggtgtaagcatggaaagtgtaaagggagagcgagagggatgcagggcaagcatgtcaacgaaagactgatctctttgaggctgttaattttaattatgtaaaaataacttgacctgtttttagtggaaatgcagcctttctggagacttgtaaaagaacagaaatgggaatttctgtgtctcttataaagttcttataactaaaaaaaaaaaaaaaaaaaaaaaaaatgcgggagggggacacgggttattcaatggttgagaagtatttggtgtggaatttgtttcacgttcctttttttttttttttttttttttttttttgagacagagtcttgctgtgtcctctgttgcccaggctggagtgcagtggcacgatctcagcttattacaacactgcaacctctgcgtcctgggttcaagcgattctcctgcctcagcctcccaaatagctgggactacaggcacacaccaccacacccggctaatttttatatctttagcagagatggtggttcaccattttggccaggctggtctcaaactcctgacctcaaacgatccgccatcctcggcctcccaaagtgcttggattacaggcgtgagccacagcgcttggcctgtttcatgtttatttaatgagttttaaaacatgaacaaggcacttatggatgcgtggggcagcatgggggttggccttgtcacctggggcacagctgaagactttgcacaggtttctggtctatcctaggtgaatgatggtctgcagcgggtggggaatgggggacttcccgttgtatccaaatgttcaggacagggagtgtaggaaaggagtgagggtgtaggaggagattgcaaatgggaagggagatggggactccctttctggcaggcggatagccccaaaagcccaggttgggtctggggtcgccagccccgtagcaggtgtttctctccatgacagcagccaggaggtgtccccaagggaacaagacattagagtgtgggaggcaagacagctcctcagtgttagctctggggtgacagtccctggggtctggcttccatggtgccggggaatggagagccaacgagctgtggggagggaggcagtttccacctttctagtggctcacgcaccccctctctccccagcccctggtggcggcggcgtgtaacaccttcccgaggaaactccgctgccgaccctgcctgagcgcgggagcctgaggaccgggtggaggcggtggggacccagccgcgcgccgggagcgctccccggaatgagccgccccacccaccccaaggctggagccgctgcaccctgctgtccctctccaggccttggcaatgacgatcccccaaagagcccgtctgcaccccagacccagggcctcaggcctccagctcctgggatccgggagtccatcccggcccagcacccccagcatccccgtgtatggcccccctgcacctccttgtctcatccccgaagatccgtccccctggcccctcagtgtccatgtcttgagcttaataaatgtgcatttggttttttcctctgttctgtctgtgtgttctcatctgtggggcacggtgtgggtaggggtgcagaactgaacctggggtagctctcccctgcgtgcccggagtcgccccctcttcattctcctcccccagtgccccgagatgccccccttcaatcccttctccttcctcaacacctccggatttgtcctttcccttcctccagcgaccccagaatagagccctcccgtttctccccctgctctctcagaggcgtccactcaccctagacctgcctgccccatccccgttcccaccctctcccaccactatgccctcacccctgccccccgtcgccctcagcgattccccctcctgctcccaccccgggctctgaagccaggaaacccaagaggaaatgactgagcccgtctgggtccccgcccgctcgcgctcccctggccacaccctccgcctggacgcagcagccaccgccgcgtccctctctccacgaggctgccggcttaggacccccagctccgacgtaagtccctctcgtgcgccacctccatccgctgcccctctgcccacgggccgggctcaggtgggtaggggtttgaccccttccgctcctctccgccccccatccacgcccacatctctctgcctcctctcctgggctacagtgggccgctctgcctcgctcccgcccgcctgcctcagtctccccagctctctgccacccccctcggaccagtgcctcttaggtctctccagcgcgccatccctgcaaggcggcccctgacaccaactcactttttcctctgagcgcgggaggcgttactcactcttcctccttcccctcctcgccgactcccgggctctgggcccctgggggagggaagaggcctcctatctactcctctgccccagtcccctccttgcgtcagtcccagtgagggataagcgcctggcggaaggcgcagggaggtgtttctctgcttcaggagtgcccgccggcccttgcagctgctggaagacccatttatctcatgcttcttgttttctttggggacctgcaggggaaggaagcagggtgacggtttggtatccccacctaagaccctcccctttcccctgaggccagccgtcagcccctggcagggggtcttggaagccagaggtttttgctcagggcagggaaagggctgcaggatccccgggggctgccggaggtcggtctcactgacatcatggctgaccccagcatcgcctggtcccacagatgtcgccctctggtcgcctgtgtcttctcaccatcgttggcctgattctccccaccagaggtaagacccatctctggcctccaccctgccccagagcccccagccaggccagccccacgtgtgctgcggggtgggtggttggcccgtgtgaacgttgtcctgccctgtcaccctcccgctgagccggcaccaggaagtggggatccctatggcggggcgacgttacaccctctttggacacctcagacccgggtggctgcttccagtgagtctggccagggcctgtcctgctgagcatcctccaatttcacctccaagaagaactcactgagtttcatttggcggggagattggtgtcggttttctactcagcagccaggaaacctaggctcccagagtccccaggcattacacagttaggcaaagctgttgagctggggttagtc

SEQ ID NO: 8162 - DNA, 6000 bp, Homo sapiens
tgggaggcctaggcgggcggatcacctgaggtcgggagtttgagaccagcttgaccaacatggagaaaccccgtctataccaccccgggcgtggtggcctgcgcctgtaatcccagctacttgggaggctgaggcaggagaatcgcttgaacccgggaggcggaggttgcggtgacctgagatcgcgccattgcactccagccttggcaacaagaacaaaactaggtctcaaaaaaaaaaaaaaaagaaaaagaagtatcctcttccaggaagcttcactgacacccctaggctgggtcatgtgcctcctcagggctcccacaacatctccatcccaacacagggcctgacacatgggagttgagacaagttaggttgaatgaataaatgaaacacacagcacactcacggagatgaagagacaggaaaagggggccaacagcacaatacaggttcgcttcttaaatgagcggtaggcatggccctctgcgctcccggggggccacgaagctgtcctaagggtgtgggcgacagcaggcgggtactggggagccacggaagggtggggagcagggaagggcggatcgctaactgcaaatgaatgaaagttgcatttctctgcatatcgcacgctatccagtcccaagttgttttcttctaaaggaatttcctaaagaatcgccccccaaggggcctcctacccgaacctggcatcccagcgctgtgcacacctcagggttccagatccttgatctcgtgacctctgacctgcagtgacctcgccaaccgacgcggccgccccgccacgcccccgcccgcccgatctcctccgccggccacgtacgccacttacgcagccggggcgtccccgcagccgccgccgccaagcctgccgggtgcatccttcgccgccgccacctaagccgcggttcggagcgtgcccgcccggctcccgtacccacgccccgccggcgaagagacagccaatggacgtcaggattgagggaaggcctcgcccccacccccccgacccctccagccccccccttcacggaggcctggacgactgggcggtgccttacgtaagaggcggagactgggctactgggctcatgcagtaaagcgagtcaaggcctgagtggcaggagggcgaggccgggaccaatcccaggaggaggcggtgtctgccacgacagaaaatgagtgtctgccccttgccggggctcacgcccctaactccagcactttgggaggccgaggcgggaggattgcttcagcccagggattcgagactagcctgagcaacatagtgaccctcgccccgccccatccctacaattttttttttttttaatttagccaggctcagtggcttaacgcctgtaatctcagcactttggaaggctgaggatcgcttgagcccaggagttcgagaccagcctgggcaacagcgagatctccatcgctacaaaacattttttaaaatgtaaatatcgagcgaaaaggtcgatgggaaatgcagttctctgcagacagccgttcagtttgggtcattgagagcactggagagccagaaaaggctgtggagcaaggaaaagagaaacatttgtgttcctgaggggctaattggagttgtaggggcttatacaatttttgacatcccttaggtattaaagtaaatatttatttattttgagacagggtcttcctctgttttccaggctgcctcggaccccctgagctcaagtgatcctcctgcctcagcctccccagtaactggcaccacaggcatgcaccaccatgcccagctaatttttaaattttttgtcaaaacaggatcttgctatgttgcccaggctggtctcgaattcctgggctcaagccatcctcctgcttcagcctcctaaagcattaggattacagacatgagccacagtgcccggccttaaagtgaatatttagagtgagaaaaggaaacccaacaagttaggtgagaagaaccaggtgtctctcttggaatagatcttaaggcagtttcccagaaattcataaaaatgttctcacattgcaacctggttccctctgtccaccaaaagcattctacaacccccagcaactcacagcacacaggcgcacctgcaagtgaagagccctgcccacctagcgtccttagtctctcctctctctgactctcagtctccccccttctctccctctcagactccccgacttatctcaggaaaacatagtggtggaagttacttctgcgcagcgatagcgcatccggaaggatgtcagcaagtgaccctatcgctgtggcttcctcttcctcctctgagacgttgtctttttggagaccttaagggctgctcctggtttctcagtgatgagtgctggctccactgtggttcctttttgtgagcgaaatgcccgcattcttcttcacctctgatttagcctctgtcccctgggctccaacaccattttctcctcatcctcagccctctcttgctctggttgctccagatacatctcttccataaatgtttttttttttcttattgcttttttgtttgttttttgagatggagtcttgctctgtcgcccaggctggagtgcagtgatgcgatctcggctcactgcaacctttgcctcctgggttcaagtgattctcctgcttcagcctcccgatagctgagattacaggcgtgtgccatcgcacctggctaattttttgtatttttagtagagacagggtttcgccatgttggccaggctggtctcgaactcctgacctcaggtgatccacctgccttggcctcccaaagcactgagattacaggcatgaaacaccgcacccagccttatgtatatatatttaattaataaagcaagtactgccaagtgcagcggatcacgcctgtaatcccagcactttgggaggccaaggcgggcagatcacctgaggtcagtttgagaccatccttgccaacatggcgaaaccctgtctctacttaaaatacaaaaattagctgggtgttgtggcgggcatctataattccagctacttaggaggctgaggcaggagaattgcttgaacccaggaggcagaggttgcagcgagccgagattgtgccattgcactccagcctgggagacagagcgagactcttgtctcaaaaaaaaaaaaaaaaaaaaaaaaaaagcaagttcattagttcattggcttcctgctggcctcatgttcaccccttaccagttgtgtgactactactttttatttttttgaggcagggtctactctatcacccatactggagtgcagtggtgcgaccataactcattgcagtctctaattcctgagctcaaacgatcctcctgcctcagcctcccgagtagctgggactacagacgcatgccaccacacttggctaatttttgtattttttgtcgagatggggttttgccatgttgcccgagctggtctcaaatgactacttcatttttaagcctaaattttctcatctgtttagtgggaattatattgggacggggttgagaattcagtgcaagttcaggtgtccacagggcctggcagaatgtaagccttcgatcactggcacctattgtgttactgattctattatcaggtgcctctgcttctggattgtcaaccccaagttgggctctgcccggtgatctgccagctctttaatagaaccagctgggacatgtctgagctgagccccaagccccactcctctgccagtcggatggggttaggactctgggctgccctccaaaaggctgtcaggaaggcgctgagttctggctggaggcagaagtggagagacttacgggggggcgcagaaagaaaaatttcctcttaaatagaggcgtgtatttgtgattctgcctggcttgtttccattcatccttcatgcttcagctcagctagccccttcctcaggaagctctcttgacctccctaggcaggggtggttgcttcctctggactcccagggccctctagggctccctgattccaggcttgatcattgtacccttgcttccctcatcacagccctgaccactctgggctgtcttttttcttttttttagagatagggtctcactctctcccaggcatagctcactgcagcctcgaactcctgggctcaagcaatcctccgacctcagcctcccgagtagctgggacaacaggcgtgggtcactcttgtgtcagtctcccagttagactgggagccccatgaatgcatggcgcaggatggtctcatcattactgagtctccaggatcatccagcgaggggtcagcagaaagtgggcattgaacaaagctttggtgagtagctgaggatccccactctgtccacacgggcacaggggacacctgactctgtggtgtccgctgttcccactccgaggctcacaacttggcgaatggagcgagaattggatttcagtttgccccttgctccgtcagccgcgcgccctgatgcagtgcacaaccttagctgctgtgcgcgatggggggcgactcctcggcctgcgagcagagaggaaagttcagattcttctaacatagagaaccagccttccaggaggacgagaaggaaggaatgaggggaagagaggactacctccaccctttccatcccgttggtctgctgggtctgggagcactgggctccaccctctccgaacgaacacctggcggttgggcgtgcctcagtttcccggaggcggggcattcctccgtcgccgccccccacctcccctttttcctcttcctcttggggcatctgctgccgcgcctgtagcactcccggaactggaactaggtgccagacggtccggaggcgggggccacgtcagcggggccacccagggctcgcggggtcccggtgggtgccatgcggaggggcgcgcttctggcgggcgccttggccgcgtacgccgcgtacctggtgctgggcgcgctgttggtggcgcggctggaggggccgcacgaagccaggctccgagccgagctggagacgctgcgggcgcagctgcttcagcgcagcccgtgtgtggctgcccccgccctggacgccttcgtggagcgagtgctggcggccggacggctggggcgggtcgtgcttgctaacgcttcggggtccgccaacgcctcggaccccgcctgggacttcgcctctgctctcttcttcgccagcacgctgatcaccaccgtgggtacgtaagcgcctcaccgcaaggcggcgaggacccgggatccccacttcatccttaacccctggggaccccggggccctcacgaatacccttatcccaatcccctctgggcttcggatcccccgaaaagaccccagtgaggacccgggacccaggctcatgatatctgctctgctcggggagcccaagtccgagcccttcctcctaagtaggaaacacccagctcccctcagagtacctttgcagagaccagctgggaccccgttcctcggtcttttttttttttcttttctttttctttttttgagacagggcttactctgtcgcccaggctggagtgcagtggcacgatctcggatcacggcagcctccgcctcccggtttcaagctattctcctgcttcagcctgccgagtagctgggattacaggcacataccaccatgcctggctaatttttgtattttcagtggagacggagtttcaccatgttggccaggctggtcccaaactcctgacttcaggtgatcagcccgcctcgccctcccaaattgctggcattacaggcttgagccactgcactgggactgcattccccggtcttaatcctcttggtgacccgggtctgtccagccccctctaagcctaggactgtcctcagagacctccagcaaggacccaggacacgccaccctccaagggagatccttgccccctctggacccagaactcaaccatgccagga

SEQ ID NO: 8163 - DNA, 6000 bp, Homo sapiens
tgggtgagcctgtactgtgtgcttagtaagggggaactgggcttctacaaggactccaagggcccggcatccgggagcacacacggtggggaaccgctgctcagcctgcacaaggccaccagcgaggtggctagtgactacaagaaaaagaagcatgtcttcaagctccagtgagccccccaatgggcaggagggagggatccaaggctcagcttcaactcccagtgggaccctggcttccctgggggacacttggtgggcaggtgggctgggccccttccccagatctctgaagtcctgtgtcccttcctgcaggacccaggatggcagtgagtttttgctccaggcaaaagatgaggtgagatctggtcctttcctccctctgtgtggacctcagtaatgacctggctgtctggctcctgacccagagtgatggggctgtgagaagggacactcacaggccagagttatcagggctgtaatgggaaagcccacaggcactgagagcccaaaggaggttcctaacccagtggggagtgggaagggcttcagggagggctgcctgcagatcctgatgacaaagtccaacatctttgccgtggtcactcaggtgagactggaatggagggagttcgctttaaaaaggggtgatttggccaggcgcggtggctcacgcttgtaatcccagtactttgggaggccaagacgggcagatcacctgaggtcaggagtttgagaccagcctggccaacatggtgaaaccccgtctctactaaaaaatacaaaaattaactgggcatggtggcaggtgccttaatcccagctacttgggaggcagaggcaggagaatcgtttgaacctggaaggcggaggttgcagtgagctgagatggagccattgcactcaagcctgggggacaacagcgagacttccttcgaaaataaaataaaaataaaaagggtgattcagagggacagtgggggtctaaaaaaaggagtgattcaggttgggcaccatggctcaggcctgtaatcccagcactttgggaggccaaggcaggagactgcttgagcccaggacttcaagatcagcctgggcaacacggaaagatcccatctctatgggtaataataataataaattagccgggagtggtggcacatgcctgtggtcccagctactcaggaggccgagtggaaggatcacctgaaccagggaggtcaaggctacaatgagctgtgattgtactatggcactccaggctgggtgacagagtgagattctgtctcaaaaacaagagggggtgggtgatctaggtagagggaactgcaagtgcagaggaccagaggtgcagtattgcaaagggttaactgctggagggcagagttcatggaagaaggtcccagaaaggttcccaggagataggtgtctcaggacaggatgggccatttggaggagattggattttttacctaagggcactggagagctaggggggattacagtgatgtgtaaaaaagattcctggctgggcgcagtggcttacgcctgtaatcccagcacttcgggaggccgaggcgggtggatcacctgaggtcaggagtttgaggccagcctgaccaacatggagaaaccccatctcttatggtgcatgcctgtaatcccagctactcgggaggctgaggcaggaggattgcttgaacccggaaggcagaggttgcagtgagctgagacagcgccattgcactccagcctgggtaacaagagcaaaactccatctcaaaaacaaaataaacaggccgggcatggtggctcacgcctgtaatcccagcattttgggaggccgaggcgggcagatcacaaggtcaggagatcgagaccatcctggctgacacggtgaaaccccgtctctactaaaaatacaaaaaaattagctgggcatggtggcgggcgcctgtagtcccagctacttgggaggctgaggcagaagaatggcttgaacccgggaggtggagcttgcagtgagctgagattgcgccactgcactccagcctgagcgacagagcgagactccatctcaaaacaaaacaaacaaacaaaacaaaacaaaacaaaacaaaacaaaaaaagattcctttggctacctgggtgggtagcccaggccgcggccagggcagggacccaagtgggagagcgcatggctgggccacacaggcctgtggggagaggaggaagaggagtctgagagaggcaagcataaaggtggtttgaagagatgttgagagtaataactaacacttgttatctcattcaatcttcacaagatgcaatgaagaagtgggctttttttttttttgagacagagtttctctcttgtcacccaggctggagtgccatggcgcaatctcagctcactgcaacctccacttcccgggttcaagcgactctcctgcctcagctacctgggtgactgggattacaggcttgcgccaccatgcccggctaatttatgtatttttagtagagacggggtttctccatgttggtcaggctggtctcaaactcctgacctcaggtgatccacccgcctcagcctcccaaagtgctgggattacaggcatgagccaccacacccggccagaagtaggcctttacccactacatgccttcttttacttatctgcacaatgaagattaaaaatagtttcttggcctggcatggtgcctcacacctgtaattccagcactttgggaggctgaggtgggcagatcatttgaggtcagaagttcaagaccagtgtggccaacgtggcgaaaccccatctctactaaaaatacaaaaagtagccaggcatggtggcacgtgcctgtagtcccagacactcaggagactgaggcacaagaatctcttgaacctgggagatggaggttgcagtgagctgacatcgagccattgcactccagcctgggggacagagcaagactctgtctcaaaaaaaaaaaaaaaaaagtctcttatcatagggttactgtgagaattaaattgctccatgtttaattgatacatgataaactgatacttagcacagggcctagtaaatatcagtgctctagtagtgcctgcccatattattatcattgtttgtgtcatttatctctgtagtaggaagtatatacaatcctattgcataggtttaagggaattaatccactaaagtgtttggaacagagcctggcacatattgctatgtaactgcatcatcatcatcatccctttttaatagatgagaaaactgaatttcagagagggtagtctgatctgaaattcacctattattccagcttctctcttccaaatacggcctctgtgccctgtttcttcccccaggaggagatgaacggctggctggaggctgtagcttcctcggtggcggaacacgcagagatcgcccgctggggccagacactacccactacttcatccacagatgagggcaaccctaagagggaaggcggagatcgcagggccagcgggcgcaggaagtgacttcccacccccaggacctgacacatctcgtctcccctcttttccgcactgtgggcacaaagacactttttcttccgcaggggcgggagcccctagttccaacactgaggacgcgtgacatggtgggcaccggaaaggaggggacttctcctgcaccccaagaagtggtggggagattgctgcccctatagccatatctcggccccttcccactcaccacccccaccccaggtgctgggggtcccttatttttatgcaataactgagcttgatgggggtgggcagggggccagttgagccaagcccccagccccgatctgcagatcctgccccaagaagctggggtggtgggggcagtaattcctgcccccctctctgccctagggatgggcacgggggcgctggtgaggtcccctggaccatccagggtgctagggggcagggaggggacaccccctccccgcctttacctcacttccaatgctgccttgatctctgtctgggaggggggagtgaaggggccctagccccctgcactccgccgcctcagagccatgcggttaattcctgacttagtttatttttgcaaaacgtcgatctcctcctcccccgccccgcatccgcgaaggcttttaatgggaggggcgtcaaagctcaaaactgttttcctctctcctcccccctccagttgtaaatgccacttcatgaggggaggggcgaggggaagcccacccctgcatgcttctggctggagcacctccctggggagtcgggggattgggttgtgggcagtccccatggccgcctggagaagccgctggggcccgggggtgtggggcggtgtggcgggcgcacactgtatgtacctataataaaccctttggctttgacggtctatggtcctttgtttgggttttctgggctgcgcccgggaggattgaaaggagggctgtggtggctgtaggggtgggtgcggggtggggagaggggcacgggggtaccgtggctgcggagaacatccagatgtacccttttatgtggacttaatttcggggtctaaacacacgccccttgacgagaacctagagggatggagaatatttcgttatgcttcgtaataaacttccccaaaggagactccgggtccgccccgtcaagttcaggaaaggcggacccctttaaggaggcggaaaagttaaccgcgatgggcaggcgctctgtccaatcgctagtgactcctggagtctctggcccaatgagcagcctatggaggcggggtccgggtgcacacccggaagtgggtgcgggccagccggctcgcccgggggccatggcagcagcggctactgcagccgagggggtccccagtcgggggcctcccggggaagtcattcatctgaatgtgggaggcaagaggtgagtgtgggagactcctgaggtcccatcctcgggggcgggaagcggggtgggagtatccgcctctcctgggggaatccctgtccatcaagggttgctccgccccccccccctttggaggcgcgagattctggaaaaacgccgggggagggggaaggggagggaaccctggatcctgcgggagggggacgcattcctcacccgctcctcttcatctcttgcgtccgtttaccttccccgcccagattcagtacctctcgccagactctcacctggatcccagactccttcttctccaggtgatcgggagagcgagtttggggcgagggtaggagggatggagagggcgtgggagacctaatatccactcccccggcccgtgacgcctgctcggtgtcccttccctgcagtcttctgagcggacgcatctcgacgctgaaagatgagaccggagcagtgagtcggacaagaactgaaatgggatgggggggaggggttggtaggaagaggggcaggaccccactcagtcctgccttttaccccatccatcctctgcccccctttcccgcagatcttcatcgacagggaccctacagtcttcgcccccatcctcaacttcctgcgcaccaaagagttggatcccaggttggcatggaaaaaggggagggagtccctcactgtcttcagtccctgaggagttctttcacctcctctgaatgtccacgtgagctccattctattagaattctcattcagaaccttgatcacaggccgggcgcgccgggattgctcacgcctgtaatcccaacactttgggaggccgaggtgggaggatcacttgagcccaggatttggagactagcctgggcaacatagcgagaccccttctctaaaaaagcaaacaggcaaaacttcatgagaatcttgatcatgttaaaattttatgtccttcgatttctccctacacacacacacacacacacacacacacacacacacacacacactcaacatttcctccacccatatcatcactc

SEQ ID NO: 8164 - DNA, 6000 bp, Homo sapiens
cccaggagtccaggcccccaacccctcctccctcagatccaggagtccaagcccccagcccctcctccctcagacccaggagtccaggcccccaacccctcctccctcagaccctggagtccaggcccccagcccctcctccctcagacccaggagtccagggccccattccctcctccctcagatccaggagtccaggcccagcccctcctccctcagacccaagagtccaggcccagcccctcctccctcagacccaggagtccaggccccagtcccttcctccctcagacccaaaagtccaggcccccggcccctcctccctcagacccaggagtccagacccccaacccctcctccctcagacccaggagtccaggcctcagtcccttcttccctcagacccaagagtccaggcccccggcccctcctccctcagacccaggagtccaggcccccagcccctcctccctcagacctaggagtctgggacccacacccggctcctctgcctcagtgggggccagagaggtggggtggagcctctaccttcatacacgtgttgtagagtgagatgtagttggtgaagaggtccagatatcgggcagtgaacaccacagcaaacaggacctggctcttccctgaaattcctgtggtccagagacagagaaagagagagagagagagacagagagagagagagagacagacagacagacagacagacagaaggagagaggaagctgggggtgggctgcatgggcaataaactaaggcagggcgcccgggaccagcctggaggcagctctggagtgcagctgtccccggaggcctccccagcccgccccgcctgagcagggccctttcccacggaccacagccagggggcagcccaggcccccgaagctactccagcccgaggctccgtcccagactaggcctcatggctacccctggcccctcagggtcctcccgcagtctggacctgaggtgaggcctagggaggaccttccctgacctcaggccccggatccggtcacctccctcccgttcccttcctggccgccacggtccacgtcaccaactcacagccacctccccgcctgccatggttccctgttcccggtccatgaaccctcgggctgcccagattggggctgggggtggctgaattgggggcctaaagccattcacatgaaactgtatgcacccccgccagtctggggaagggagctgatcccctggagacccagaacctagaagagagatccccagcaagcagtgggggtggaacctgtgcccctagtgcccccaaacccttcctgagtcctgcgacgtcccccaacccccgcccgcaatctctctccttcgccagccctggtgggcctctcaccggcgcacgagcgggacttccagattttgagcagtagcaagatgatggcgaggaggtgggagaggtctcccaggaatcggaagagattcatggctggggaaccctggcagggctgagcgggagggaggcaggctggcgggggggtgccccccgaggctgctggtctgaacgggtagctgggctggggggacggaagagggaccctaggtgcgctccgctccggggaggggactttgggagggggagcaaaggctggagctggcggcggagctggagccgggaagagggaggagagcgagagggggaggagtccgggaggagaggctccgcccccgagggcggggcctggatccccggcgccccctatcgcccacctcctgctttgccgtggcggcgctaaacgcacccccaaagctgccccataggaacttgggagggtcgcagggttcggaaagtgccaaatccagcaccggttcgcccaggcagtctgtgtctctggaagagacgcagtccagtacaccagcctcagcccttgcagggatgtagagactgccctctgagcttgaaaaatcctgcagggacccggaggctcagctgctagcttttgcagctttcaggcactctaactccaatcccccagaagacaagaaagataccccacctacttcctcccctagacccaggactcaaggccccagcccgttcgtcaaacccagaagtctgggtccccagcccctcctccctcagacccaggagtccagacccccagcctctcctccctcagacccagaagtccagacccccagcccctcctccctcagatccaggagtccaggcccagctcctcctcgctcagacccaggagtccaggcccccagcctcctccctcagacccaggagtccaggcccccagcctcctccctcagacccaggactccaggcccccagaccctcctcccccagatccaggagtccaggcccccagcccttcctccctcagacccaggagtccagacccccagcacctcctccctcagacccaggagtccagatccccagcccctcctccctcagacccaggggtccagggccccagcccctcctccctcagacccaggggtccagggccccagcccctcctccctcagacccaggggtccagggccccagcccctcctccctcagacccaggagttcagggccccagcccttttccctcctaggacgctgttccttggaacttagggtcccacccccaccatcttatggatcaaacatcctaaccttaagaatctagatctacagtttctccctttacgacccacagatttaggccctgattctcttctttttcaggaatgtgcacctcaccctgttctcccagaccttgaggatgaaggaaacaggagcctcacccaggaggctcaaggccaaaactctgacccaaactacctcaggagcccctggccctggcttcccccctgctccagagtttctgccctgcccacacacacacaccctcttccaccctcagaggccccggtgtcctgccccacgctctaccccagagccccacgggtggctttataaaagtgccgggcccagccctctagcaggaggggaatgctgggcatctgggtgtgggacccccggggaacagcctgtggtctggactcctgcatctatgaggggacagacgtggcttcccttccggatgatggggtacccacagatgatggaggccagggtccctcaataaaagaaggggtgcaggcgtgttgatttcttcagagggctggaaggacggggtgcccaagggtgacatccacgagtcttgggtccctgagggtggcttgtacgggggagagtcgggatgactgagtccttaaaagagactccgacttggaggcggtccccaaattcctgggtcccagtagagaaggggactcctgggtctgagggaggaggggctggggggtgggactcctgggaccagggtcgagacctggttttcaggcctggccttctggggcaataaaagccacagcttgggtcttagtgtggcgaacactgaagtcagggaaaggcctcctgtttccagagcctcaaggcagggcgggggcagagggcagcaacccccagccctggagtctagctctgaagctggtgtctccataccgggttctgagtccctgcctgcctgtccccagcctgacttcttcctccctttttattttcagcccctcactcccttgtcccaggaggaaggcagaggctggtagctaggggtggggggcggccccctccccaagcctggcaggagaaggggtccccagggaggccaggagggggggctgtgggtctcccggcagtggcagacggggactgaatgttaatcgcatcccgagtgagtgtgtgtgtgcgagaacacagcgagtgtgtgagtccctcccgctccagctcctccaagccgcggccgccgccgccaccctcgcccgcagcctcccgcagcctccctcggccaccggtgcctgctgggggtgttgcctgggtaggtcggcccggcccccaggggtctctcgagcgtctgccatctgcccggtgaggatctgtgtgtccgggtgtctggggctggctggtggagggggggtgtgtctgtaagcgctgcggcggcggagggagggaggggtctgtctgtctgtaccgaccctgagctgcctgcctgggtgtcgtggggctcccgctccttccccccggcccccccaaacccagatggatggtgtgtacctgggttctgtgcctcctgcctgcgtccggccaggcgtctgggcgtccccggctgcctgtgtcctcctgtctgtccaaacagcccctatcagcagtggcagcctggcccccattagaccccccactctgtgtgtgtgtgtctgtgtgtgtgtccctcctcaagctctgggggtgttgagggggaatcccagggaagtgagatcgtgcgtgtgtgcgtgagtgtatgtgtgtttctgcctgtgtttgagagtgggggagtcaagggggggtctagaggtggccaagcgaggaaggggcaagcagttccccaagcaggcaatctcccgctcctcacacgcacacaccagccactagcttcagaggtgacccagacagacagatagacacagacgctggaagggggggtgggggggctgagggcacaaagcgggggtgcgagtgagccagggagaggcgggactggacacatggaaaggggggaggagccggggctgaagcggcagaggggggcaccccgggtgggcggaggggggatccccacggggtcggggcggcaagaggacaccccgacagcctctgcaatgtccggggcccaacttccagagcaacatgtgtagccacgtcctcgcctagtccaggtggccgcaaccttgggggagagacagggcaggacaggaccaaggaagaggaaggagagacggagccagggacagacaggaggtccgggctgccgctgctgccgccaccaccactgccgccgccccggggcctgccccccgacatcggctctctgagccctcctcggaatcttggggtcgctggacgccgggttccggtcctggcccccccgccatccccccaacagaacagggtcatgaaaaggtaaggcggggacaggggatgcagggatggtggtgggaatgtggacccccaaatctaggacagaggaagttggcaagaagcctcgtggagggagggggtttgaacggtgggcaggggtcttgacccccacctagctcccctgtccctcagggactctcctccaccctctctctctccctctctgagcccctttttcctgagtccctacacctcagacctttcacgcccccatttctctgacacttggctccctctccccatccccacatacctgatgccccatatccctgtgcctccatctctctatctcaccttctccctgtacccccctccctgcatcagtccccccatcgcgagccggtcctctccctctctcctctcgctctcccctcccatgtcagagctatgagtctgctattaatacccccgccaaggaccttgagggcatccaggcccccagcacccctcgccccaagctcccaccccttcctcaaggttctggaacacccttccagcctcttccaagcatcaggattcgggtggggagagaccgatgttgtgtgtgtgtgttgggaggtgaggggggaggaaacgggatgccgtctgcagcacaactcgaggttgtggggggagctgttgatcgaagtggccgctcctctcttctctgttggatgctgtggggggcaatgaagacagggacaccctaggaatttctggcaccctcctcctcctccccgcttggggacaggctgtgctatgtacaggatctaagtggggtgactagggaggccagagctcggtgggggggcacccaggatgttgggaaggatagggtttgaaaccaaaaggggatccttaagggaggacaggagccggaacccggactcctgggtccttgggggaagaggggagctggggacctggactcttggttcctg

SEQ ID NO: 8165 - DNA, 6000 bp, Homo sapiens
gtgagaccctgtctctacaaaaaaattttaaaagccagatgtgatggtgcttacccatagtcccaactacttgggaggctgaggtgagaggatcacttgagcccaggaggttgaggctgcagtgagccattatggcatcactgcactccgtcctgggcaacagagcgggaccctgtctcaaaaacaaaaaagtttgaacggtcaatgcagtaagagtctggagcccaggggagaggtcagggctaggggtattggaaacctcgtggctggactgggtctcctagtgaacaaacacagaggcaaggagatccgaggactgagtcttgtggccttctagcatttagagggttaccgagaccaggagcctgaacaccctcccaagggctggtgggaattgcagcctcaactcccaggcatcctggggctctatcctcccacctcagctcccccacccactcccaccccctgtggagagctgtcccagttaccatgctggtttttgcaggttgtgattttcttcccacagaggtttcaaggagctgtagtcccaggcctgggagatctgaggaagcgcacttctggttctctgggatatggggagcgtggggtcagtgccttgatcctcctctcccctcgcttcacatcacccttcccccaccgctcttctgcaggtgtcatggctgggtgaagagcctgtggctggggtgtggtcagagaagggccaggtggaggtgtttgcgctgcggcggcttctgcaggtggtggaggagccccaggccctggcagccttcctccgggatgagcaggcccaaatgaagcccatcttctccttcgctggacacatgggcgagggctttgcccttgactggtccccccgggtgaccggtgagtccctggggtgttcaggagtcccgggaggtcgggggagcagggtctgcaacaaggggccgggcgcttagactccaaggaggggagcgagctgcggccaggtggggcgaggtcatttcctgactcccttccccaggtcgcctgctgaccggtgactgtcaaaagaacatccacctctggacacctacggacggcggctcctggcacgtggaccagcggccattcgtgggccacacacgctctgtggaggacctgcagtggtcaccgactgagaacacggtgagggagggtggggttctggtcgtttagttctgatggattctaggccagggacctagaatcctaggtctgagggaaaagagggctgggagcctgacggaggtttagtttccaggccaagtcatagtaaggggaacagtgaaagagagagtagcccaccgctggcgcttgggcttcactgcgggctggggggcattgggaccactcagactccgcctcccccaggtgtttgcctcctgctcagctgacgcctccatccgcatctgggacatccgggcagcccccagcaaggcctgcatgctcaccacagccaccgcccatgatggggacgtcaatgtcatcagctggagccgccgggagcccttcctgctcagtggcggggatgatggggccctcaagatctgggaccttcggcagttcaaggtattttcccagccggacacctgggggctagagaagcttgctcccagcagcccctgggatttgtaggatttttcctccttgaatagttttacacaaccagagctggagagcccttagaactagactcctgcctcttcagggtacagaggaggaaactgaggctcagcaagaggaagggtggcgggtctccactcttggggtcactcactctaccaggggaacagctgacaagagatggaaggggctggggcagcagagactaggactctcatctgcctgtgggcagaagtacaggtgtctgtacggccagtgctgagagcttcagagagttgtagatttctagatgcaactgagaatcggggcccagcctgctcgttgtaggagaagactgaggcacagaaaggacaggagccgctgtgacatgacagccaagctagaggttgacattgtggagctgggagggtccctgtgcaggagaagttgcagcgtccggcatccctctggacaaagccgcagctttgtgtggctctgccttcccgggctgccatgatgtcatcctttttctcctccagtttgatcgtttctatagcgtcagccctggggaggaggctggagacggattccagcctcccaggcccaccaggtcacacagggcccagcttgttgaccattggaacttcagagcagcctctcctaatgagagagacgccaattgagcggggcctttgctgtagtgaaagtgctgtcattcttagtctttctttgggtcggcttccggggattgtgtttctgcctcctttgaggcctttgtagaatctgctgggagagctctgggagagccatgccctcctttttttctttttttttttttttttctttttttttgcgatggagttttgctcttgtttcccaggctggagtgcagtggcgcaatctcggctcactgcaacctcccgctcctgggttcaagcgattctcctgcctcagcctcctgagtaactgggattacaggcatgtgacaccagcccggctaattttgtatttttagtagagatggggtttcaccatgttgttcaggctggtctccaactcctgacctcgggtgatccacccgccttggcctcccaaggtgctgagattacagtcgtgagccaccgcacccagcccatgccctccttttacaaggaagaaaacaggcaggcagagggaagagcaggggcgggggttttgctacctgagctgggaggggcttctttgcaggtgaatcacagttcccagcaacccctgggctggtcagccttcttagcagccagaattaccctgtgtccctttcctggactctgggcttgtgagggcttaaggggtggggccctggctgaaccctgaggctggagaagggttggggcttctgcctgggtcctccccagagtcaggctgaggcattcagagcccgttcctcccatcctctccctctagtctggttccccagtggccaccttcaagcagcacgtggcccccgtgacctccgtcgagtggcacccccaggacagcggggtctttgcagcctcgggtgcagaccaccagatcacacagtgggacctggcagtggagcgggaccctgaggcgggcgacgtggaggccgaccccggactggccgacctcccgcagcagctgctgttcgtgcaccagggcgagaccgagctgaaggagctgcactggcacccgcagtgcccagggctcctggtcagcacggcgctgtcaggcttcaccatcttccgcaccatcagcgtctgaggcgtcccactggctctgatcttgcttcctgcttggaaactgaagtcgaattgggctcccctggaaggggttcattcaggtctgttgactgagactggccggcctgtgggctgccgtgatggattctgtttgacgtattgttctctagaaggcctggctctgatccagtgacccctctcaccaaagaactcggtttaaccagggctctgtaagaccactcccacccagagacttgtgtggcctggtgtggcctgtgtgtcggattccttcctgtcagctgtgacccatttgacctgtgtccccagaacccagttttttgtttgtttgtttgagacggagtcttggtctgtcgcccaggctggagtgcagtagcacgatcttggctcactgcaacctccgcctcctgggttaaagtgattctctcagctcagtctcccaggtagctgggattacaggcatgtgccaccacaccccgttaatttttgtatttttagtagagacggggtttcaccatgttggccaggctggtctcaaattcttgatctcaagtgatctgtccgccccggcctcccagagtgctgggttgggattacaggcgtgagccaccgcgtccggctcaggacccagttttggctgctggttcccagcaggggactcgggggatatacagtggctgcaccaaattggaggtgtgggttcctccaacacaatttgcttctgcccgttgtcttcctgccagctgggtttggccaggatttctccgtgtgggggctacatgcgaccctctcccctcctccctgactttagaggctggtgctgtgtcgggaggaaggtcagggctcctgagcagcaataaaggaccaggaagaggcctgaggtgtatttgagactctggtcctttggccacagccctatgaggaaacggggtgtggggggagtttgggggtggggaggaatttggcaccagctgcccccaggccgctaggctgggggaggccactgggagtccagtgcaacccaaccttccgcccactgggtgccgccgcgttctgccttctctaagtgtccttccatctggaactcactctggcttagtgaaaggggcctcatccctgacccccaccagcttatgaaggcttcatctcagggaactctggaccccccatttctccctccgtccatctcccctttatcacgtttctttctttcttctctgtgtccccctctttcagagtctcccgtcccccactgccagtctccctgccccctagtcgctgtctcgctcctccgccgctgtctcctgtccagcctgcctgggctgtggcccagccgctctgcctggctggcctccctggctccccctctgcggctctgagctagccccacccccggcccccctccatccagcctctgatccatctgtggactccgaggtcgggtgcccgtcacacggcccctgggaccaaggacagactacagcccctcagcacccacagaggcttcccctcagccctagccgaggagcccccagcggagggcatgggggtgggccgccccaacaggtacgtgcctccatgcaaggcaccgctgagccatcccctcctgctctgctgcgtcgcccccatccacccctgccccagcatccctgtcctcagcttgtccccttcaagaaggccttgtcttcccatcagtgacaggctcagcgccaggagaatccacccccaggttcagtgcctccaactctcaccccatccccattttatgcattttctcactggcttccatcctttcagagaaaccctctcagtctgtctgtctctgtctctgtctctctcccccatctctgtctctcccatctctctctgcctctctctgtcttcacaatttcatctccccatgtcgccatttcttaaaacatttcttttctccttttcgttttcccaattgccctgtccgcctctatcttctctgtccccctccatctaggtctctgtccccccctctctctgggtctctgtccccctctgtctctgagtctctatcctctcaaggtctctgttcccctctctctgggtctctgtcctctctcaaggtctctgtccctttctctctggatcaatgtccctttcctgctgccctctctgggtctctgtccccctctctctcagggtccctgtcctgcttggtccctgtactttttcttggggcaccctctcaacacccctcctcctgcctatctctgcatctctttgtctttctgtagtctctgctttccaacctgctgtccagcccccaccagtaggtggggagtggtggggaacacccctggtttcggaagagtgagagtgttgatttgggagggtgagggtggggcctgggggcggggcttcttggcctcagattagacagtgactttgacacgaagttgaagcaccttaagccctgtatctcctttatatggaaacattaagctgctctcgcaggtcaggtggaggatccctttccctcccgccctgcttttgctaggggaggggggtgccctgagcctgagtcgcagccagcctgggagctgggccatgttggccgcagatggccccctggtgaaggttcccgttg

SEQ ID NO: 8166 - DNA, 6000 bp, Homo sapiens
aattctatagccaattgtgtgcgtgtgtttgtgtgtgtgtgtgtttagaagagcatttaaaaatatctgtcttctgtctctctctcttttttttttttttttttttttgagacagggtcttgctctgttgtccaggctggagtggcacgatcatggttcactgcagccttgacctgctgggctcaagcgatcctcccacatgagcctccggagtagctgggaccacaggcatgcaccaccatgcctggctaattttaaaattttttgtagaaaccgggtctccctttgataccagaccaggctggtatccaactcctggactcaagtgagcctcccacctcactctgcctgccaaagtgctggaattacaggcgagagccaccatacccggctacctcttttttttttttgagacggagtctcgctctatcacccaggctggagtgcagtagtgcgatctcggctcacttcaacctctgcctcctgggttcaagcgattctcctgcctcagccccccgagtagctgggattacaggcacccaccatcacgcctggctaatttttgtacttttagtagagacaaggtttcaccatgttggccaggctgatctcgaactcctgacctcaagtgatctgcccacctgggcctcccaacgtgctgggattacaggtgtgagccactgctcctggccctggctacttctttctgttgagttacttgactggcctctgcacacattgggtttgagaatcatgtagggaaggcttgcactgggaacacctacactcaagggaggtgaaaagcaagagaaagccacaaacaagtcaggcatgaagcagccggggcggggaggaaggccagaggggcaggggtatcctgccaaggagagggtttccagaatgagagcctttcagctgtagccagggccacttgtgatacagtcagatgaaacctgaataagggccgttgtatatggagccaggcaggaaattgatgatttttatcaagaacaatttcaggccaggcacagtgactcacagctgtaatcccagcagtttgagaggccgaggtgggctgatcacttgaggtcaggagtttgagaccagcctggccaatgtggtaaaaccccatctctactaaaaatacaaaaactagccaggtactgtggcacatgcctgtaatcccagctactcaggatgctgaggcacgagagtcgcttgagcccaggtggcagaggttgcagtgagctgagatcgtaccactgcattctagcctgggagacagagcgagactccatctcaaaacaaaacaaaacaaacaaacaaacaaaaaaacaatttatttcagtttctgtggctccaccgaggaaagagtgtaggaggcaagctgtgcagaaggaatggctcctagcactgaatgtcagaattttccacgattttggaaacgttctatgtctacatccaatatggcagtcctggccacagggggctactgggcacttggaatatggccattgtacctgagaaactgaatttttttttgaggtggagtctcgctctgtcgcccaggctggagtgcagtggtgcaatcttggctcactgcaacctccgcctcccgggttcatgccattctcctgcctcagcctcccgagtagctgggactacaggcacccgccaccatgccaagctgatttttgtatttttagtagaaacagggtttcaccatgttggccaggctggtctcaaagtcctgacctcaggtgatccgcccaccttggcctccctaagttctgggattacaggcatgaaccactgcacttgacctgaattttttatttgatttaattttaacttattagaacagaaagagctccatggctacaaagaacccatgcagctatcacattggacagtacaagctccagactattccgtgaagagcttttattttattattattatttttttttttttttgaggcagagtctcattctgttgcccaggctggagtgcagtggcacaatctctgctcatcacaacctccgtctcccaggttcaagtgattctcctgcctcagcctcctgagtagctgggactacaggcgcgtaccaccatgcccggctaatttttgtatttttagtagagataaggtttcactatgttggccaggctggtctcgaactcctgacctcatgatccgcccgccttggcctcccaaagtgctgggattacagtcatgagccaccatgcccggccttatttcttatttttagtgacatggtcttgctctgttgcctagcctgaactgcagtggtgtgatcatggcttattgcagccttgaactcctgagctcaagtgatcctcctgctacagcctcctgagtagctggaaccacaggcgtgcaccaccacacctggctaattaaaacaattttttttgtagggatggggtctcgctctattgcccaggctgttctcaaactcctgggctcaagcagtccttctgccttgacctcccaaagtgcttggattgtgcccagccgtccttgaagttttgctcagaagagcaaactttctgggaagtagctgcaggtgttggaagtagctgcaggggaactaggggattcaaggatggagctgaaatgggtgaacggacaaagtcggtaaactgaggcatgccagggccctggaggtagactcaggaatgaagaagacactttattgtagttctcactgtgccaggacctggcctaagtgtgtttggttcatcccatgtgtggatcagttagccgttcttttagtgtctttacggcttttgccaaatccttgtagcacctctgctatcccttctgtaaaattgctcttaaatctgctcactaggtttgtgtaaatacaggtctcccctgatatctgaactcctggaatctggaacaaagaatttagatacatttttctccttctttcttcctttctctttcttttcttttcttttctctctctctttctttctttctctctttctctttctttctctctctttccctccctccctccctcccttccttccttccttcctttccttcctccctctctgtctctctccctccctccttcctttctttccttagttttttttttttttttttttttttttttttttttgagatggagtttcgctcttgtctcccaggctggagtacaatagtgtgatggctcactgcaacttctgcctcctgggttcaaccaattctcctgcctcagccttctgagtagctgggattacaggcacccgccaccacgaccagctaatttttgtattttttttagtacagacagtgtttcaccatgttggccagtctggtctcaaactcttgacctcagatgatccacccgcctcagcctcccaaagtgctgggattacaggcatgagccactgcgcccggcctcttgcttgcttgcttgcttgcttgcttgcttgcttgcttgcttttctttccttcttttcttttttttgaacagggtctcactctgttgcccaggttggagtgcagtggcgtggtcacagctctctgcatcactgcagccttgatctcccaggctgaagtgatcctcctgcctcagcctcctaagcacatgctgccacacctggctaattttattttattttattttatttatttatttatttttagagacagggtctgactatattgcacagctggtctcgaactcctgggttcaggtgatcctctggccccagcctcccaaagtgctaggattacaggcatgagccatcatacccgaccctacattttcaaatgaatttctcattctccaaacccctgttacttactcaggtgccaatcacctttagaaagcaagagagacttgtgcatttctttaggtgggggaaagttttatatgtggaaactttccaaatggaaacctgttccatttggcacagagaggaagaaacaagccacacagaagccaaagacaatgaaaagcaaacaaaggtgtttccctactcgctagatggctgttgccagctccattttttgagcccgaggcctgcttttcttgttcaaaagagtagcaaagggttaggcattcaaaaatattctagcacccggctgagcctctctccttgacagtcgtcaggagaactgaaaaaggaatgactttctcactgcgttattcaaggttattttaagctccgtgtgaagttcgtgtcgcgttgcctctggctgggactggtatgcgagcctcatttcaggaaacacggcgttctttccctggctcctcatagctccgtggagtaggccgcgctattattgtcttttcattagaggaggaaatttaggctcagagaggtgaagccgctcgcccaaagtcacacagccgcgtcagccccgagcatgcgggctctccctgagttacccgctggatgttctttctcgtgttgaacgtcatgtgtttggatgggggcacagggcacagcaaggatacccccagtggccctctgccttcccacttgaggctcctcaggtgacagtgacctgcttcttcctgctcaggctttctggactcactggcttccttcccgtggggaaaggggaccgtcctcggctccagtctctccccgaggccgtcagagccagggccaggggcagcgtggactctgcctgcctctgtgggtgtggactcagtgtcgacagccccctctacaggagcatgaacacgctgacagggtgctggggtcggggggcagccctgggttcacgctccgccctcgcacccccagagggaccttgtgccagtgtgggcgcccccggaccgcccaccccgcagtggccatggaggatgccttcggggcagccgtggtgaccgtgtgggacagcgatgcacacaccacggagaagcccaccgatgcctacggagagctggacttcacgggggccggccgcaagcacagcaatgtgaggcgggcctctgtgggcggggcccgggcaccagggggctgcatgctcggggctccagagtggagccgggacgcccgccctgaaccctggcccctccgcccatccctgtcttggctctctttgtcccctccgccccacctatcttctctctgagggggtcccgttctctctgcgtctctttgtctctgtctccctctgtctccgtgtccctctctctctgggtctctgtccccctctctctctgggtctctgtccccctctctctctgggtctctgtccccctctctctctgggtctctgtccccctctctctctgggtctctgtccccctctctctctgggtctctgtccccctctctctctgggtctctgtccccctctctctctgggtctctgtccccctctctctctgggtctctgtccccgtctctccgggtctctgtttccccttttctgtgggtcactgtcctcatctctttgggtctgtgtttccgcttttctctgtgtctctgtccccgtctctctgggtctctgtctctgtctctctgggtctctgtctctgtctctctgggcctctgtttccccttttctctgtgtctctgtccccgtctctctgggtctctgtcttcctctctctgggtctgtttccccctctctctgggtctctgtccccatctctctgggtctctgtctgtttctccgggtctccgtccctgtctctccgggtctctgtttccccttttctctgggtctctgtccttgtctctctgggtctctgtccctgtttctccgggtctctgtccccgtctctccgggtctctgtttcccctttactctgggtttctgtccccatctctctgggtctctgtccctctctctctgggtctctgtccctctctctctgggtctctgtccctctctctctgggtctctgtcgccatctctctgggtctctgtcccatgtctctgggtctctgtccctctctctctgggtctctgtccctctctctctgggtctc

SEQ ID NO: 8167 - DNA, 6000 bp, Homo sapiens
attttatgaccaaaaaaatgttttttaattaaaaagagagagagagaagaaagaaagaaagaaaagaaaaaagaaagagagagagaaagaagaaagaaagaaaaagagaaagaaagaaaaaacaaggacaatgatatacagagagaaaaatgaagactgagagcaaagaagagactgagattgatggaatcacgaggtctccctcctttagcctggaaactccacaagagcaagaattttgtccatttttgttcattacatatcgccaactccttgagcagtgcctggcactcagtaggtgttttgctctatgttggcaagaaaccaggctggacagggagagtgtctgcagttgcctaagtgaacactaggtgacagtatttataagccctggagcttccaggctccaaggtcccagagatggcggtggaggatttgccgccactgacctctgactttcaggatctcttcctcggggctcagccctgcctttccctgcacaagccttgggcgatgaatgacctttccgcctgagacaccctcttcactctccttcaccagcctgcccagttaaacaactctttgtccctggccccttcctgctgggccccgaggcacctgggttctttccaggcccggagatggggctgcgacagaggtggtgcagctgggacaaggccaaggaaaaatcctggagactctggaatcagttcttccagtgtatgagacccagcccctcctccctcagacccaggggtccagaccccagcacctcctccctcagaccagcagtccaggccccagccctcctccctcagactcaggagtccagaccccagatcctcctccttcagacccaggagtccaggcctcagcccctcctccctcagacctaggagtccagatccagcccctcctctctcagaccagcagtctagaccccagcccccctcctccctcagaaccaggagtccagaccccctgcccctcctctctcagaccagcagtccagaccccatcccctccttcctcagacccaggagtccagaccccagcccctcctccctcagaccccctcctccctcagaaccaggagtccagacccccagcttcttcctcctggacccttcctcttaggcattttgaggtcctctactattccctctccctctcttttacacaaacccctctctccctccactccccattctaggattgagaccaagggtgagtcacaagaagccctgaggccctgagtcacctcgccctccccccttggcccctccctgggctggaggcagctggctgaggagtgaagcagtttcctaggactgacccctgcatcccaggactgcagtttgaaggcaggtgcccttcccactgtaaccccatcactgccacccaggcatgtccatgcccatcctttgctgtttttctctttcagtcatggcctatttggagacaaaatttctctgtgctctaacttccgtgtcttgattgtgttttccggtttctctgcacctgtgggtctctttgattttttttaatacatgcccccaccatccctggctgaatgcctcgaggtctctctgattatctctctctccctctgtgtcagtctctgtctccgtttttcacaagtgcctgaactggggcacagatgccatggcatggccgcagctggagcgctatttagtggcttctgacccttgggtggccacagtctctggatcactggccctcaacccctgagtgggactggggtagaaccggaaggaaccaggctgtccgtagatgtgccagtgaacagcagagagaaactgaggcagagacaagcatagagaggcccggagagagagagagagacccaagaggagaccaggaggcagggagagagtgaaacagagacggagagaaacaccgattcagcaagagacagacaaaaacagagggccctagagacggagagatggagacagagtgagacacgatgacagagacacaggcaatgatgaacacagagagagacatgacagagagacagtgacggggaaagaaggaaacagaggagcagagagggacacgaagatggagaaagggacagagcgatgagagagacacagagaggctaagagaggcagagacagagagacagagtgaagagagacagagagagacaaaggtaccaggagagaagaacagagacagagataaagacaaacctggccaggcacggtggcttacgcctgtaatcccagaactttgggaggccgaggcgggtggatcacctgaggtcagaagttcacgaccagcctggccaacatggtgaaacctcgtctctactaaaaatacgaaaattagctgggtgtggtggtgcacacctgtaatatcagctactcgggaggttgaggtaggagaattgcttgaacctgggaggtggaggttgcagtgagccgagatcgtgccactgcactccagccatgggagacagagcaagactctatctcaaaaaaaaaaaaaaaaaaaaaaaagacaaacgcggaggtttccagatcaggagagactgagacaggaagcaagtcccaaagaaccagagaaagagccggagagggaggagagagacgcagcgagccgggcggccagtgggcaggggtgcccaggctgcaggctcaggagtgcccggcggctgcactttccccaagtggacgcatgtgtggtgtctgggcgcgcccgggtgtgtctccagccctctcccgccaagtctcgccgagtgggtaattgtgtgtgccgaggggcggagcccccgcaagggttgtgtttttgccactgggcgtgtccatgtgtatggtttggtgtctctgggtgtgtttgtgtgggctgccttggtgtgcagtcagacatgtctgtgcgtgtctcgcttccctggggctggtgggtccagggtcccacacgacctaggacacaaggagggggagggttgtgtccgcaggttccttgcagaggggtgtgcatgaggccaagggcagtgtcaccagttcagtgcatgatgctgggaggtgatgtgcgtcaccaggtcagtgcatgcctgtgtgtctccacaggagggtttgatctgtgtcggagcgtatggtgtacagatccatgagtggctcgtgctgcgacacatggagatgtcctatgttgtgtgttgctctgagagtcaccgtgcacattccacactggcatttgctgtatctcacgtcagggtccatgtccctgttgggggcctcttccttctcagcccccagcacccaccctgagtgccaaccaccccaagtgtcttgtgtttgtgtagctgtgtgttatgttgtgtcagaggatacacccccctcccccgatgctggtgttgtgtgggtggcggtagacctcagtgtcagtagtatcagtgagtggtgacatctggtgttttatgggacatgtggtcgtttgtggaaggttgggtgtgttggaaaacattgtgtttatgtgttttgcgttactgtgtgctggtgtattactccgcgtatgttgttgtgtggccacgcatgttggaatataacgtgttgggttgtgtggaggtattgtatgtcatgtttgggtgtggctcatggctcagaggtgatggtgtatgttgcgtttgtttttttgtttttgcttgttttagagataggatcttgctatgttgcccaggctggtctcaaacccctgggctccagcaatcctcccacctcaacctcccaaactgctgggattacaggcatgagccactgcacccagccgtatgttgcatttgggcactggggtctatgaaggtccaaccccatccccttcccccagggcatcatcctggatgttgtcctgtgtggccagaatataccagaatcatcttgcttcaggcatgtgcttcttgggtttctccgtgtgtcgctgtaccttgtaggtctctgcatgcatccactcagcttgtcctctgaccatacatttgaatcgcaccacacatcagagcatgctgaatcagtgcgtgttttgaatcatcactgcgagcacttgtgttcgagtcaacaggcgccacaatgtatgtgcaattctctagctctgggtgattgggggctactataggtatgtccctaaatgttgtgtgtctacacgtattgggtttcgttccaagggtgtgtagtgtttaggaaactgggactgcacagtgtttgtgtcggtgtgtggtgtgtggcatcagggcgtcactactttaatatatattgtgtgtttgtgtaacacctggtgtatgttgtgtttgtgtggccacagttgtgcatcgtcctatttgtggtgtttgggtgtggctctttgtgtcagagaaagttgtgacaactttgagtgtaatatttgtgcctgtgtgtggacggtgtttgggtggctgtgtgtgccacgggatactgcctgcttgctaagtgctggtgtgtgtcacaccatgtgtgtggtgtctgggtgtggctgtgggtttcagagcttgctgggagttgtgagtcactctgtgtaggttgtgttgtgtgccctggtgtgttagtctccgtcttgggctgtggagtgtccttcggtgtctgggtgtggtgagtagaggtgtgtgtcacaaagtacagaccattgtgtgtgacaaagcccatcgtgtgtctgtgtgtgtctttatccacgtggatggacgtctctttcttgctctgccccaagacacaccctagcccctccttattctcaaaagggggagctggggagcctccccctaccctggggcctcccctgcccctccccgccctgcctggccgtcaccactccccagagggcacagggctctgctgtgcctcagagcaaaagtcccagagccagcagagcaggctgacgacctgcaagccacagtggctgccctgtgcgtgctgcgaggtgggggaccctgggcaggaagctggctgagccccaagaccccgggggccatgggcggggatctggtgcttggcctgggggccttgagacgccgaaagcgcttgctggagcaggagaagtctctggccggctgggcactggtgctggcaggaactggcattggactcatggtgctgcatgcagagatgctgtggttcggggggtgctcggtgagtggggcatggtggctgggagctgggactcctaggtctgagggaggaggggctgggggtcaggactcttgggtctgagggagggggggctgggggtcaggactcctgggtctgagggaggaggggctgagggtcaggactcctgggtctgagggaggagggactggggacttggactcctgggtctgagggaggagggactgagggcctggactcctgggtctgagggaggaggggctgggggtcaggactcctgggtctgagggaggaggggctggggtctggactcctgggtctgagggaggaggggctgggggtcaggactcctggatctgagggaggagaggttgggggcctagactcttgggtctgagggaggaggggctttggctgggactcctgggtgctcccaggagacagttgctggggtccttctctgcaaaaggaagggaatatttgtttcagtgtttcagtctttgaagatgttgccattagacggccagaggtccaggacccctggaggccagagggtggctgatcagacactcaagccccccaagagccaataaggggagaggtagccccaggtttggtgaagggagagtggaggaaagacaaagttcttccagtaggcggcagctctttggtccttgtctaacctctaatgtttacccagtgccttagatgcaaaggacagaaaaaactgccttgggggtggggatgggaaatgggaaacaaacctctcccccgacctgcctccccccaccaaccccaacccagtctccactgttaacaagctcaatttctccccaaatctgcatgctgattagtcagggaa

SEQ ID NO: 8168 - DNA, 6000 bp, Homo sapiens
tctgtgtctcacttttcctgtccctatttacttgtccaggcgttttcaaaagactcagtcttctctgttgttggttgaccaataaataaatatttagcctttttctggagggagatcacaaaacaggacagagctcttcctgaatccttcaggcggattcgccctctcttcctgttctgcggaggacagtcctggggcctttgctgtgtcaaccatgccccgaggcaccccagaagctgcatctgtcgagtctgtgctgtaatcatggccttgaaggtggaaggcaggtctgagatgggaggtgacaggagcaggtctgggccggagcaaccgcaagcgcccgtctccttctctccctccctccctccctccttccctccctccctccctccatcaaaccaggcagagctggggcctggggcaccccagggagacagacctgccacctcagcaatggcttccaggtgggaatgggggtcttttagtccagacttttccagagatgctggaaacacagcttgtcctgctgtttaaatgtttgcaattattaatttttgcaatgctttgtaaaaactaaaggtacaatagttgggttccaccctgggaccgccagtttgcaatccttctcttagggactgagtcaggctggggggggggggcgggctgcagggctcccacttgaaccagaagtccctgtcccagatgtctagctccaaatgtgttccctgccctttcctgcttccctgtagttcctgcccgcacccaggacccccagccatctgcccaagccctccccacccccaccacgccgcccccactccccacatgatggggaagctggccaagacattcattcctccacaccccctgcccccatcagcagctccaccctcagcacccccacctcagctcctcctgcaaggcctccgtggatggggggtggcggtggagaaagcctttcttttataattgttttaaacctacttttatttttatttttgtagagacaagatctctctatattgcccaggctggtcttgaactcctggactcaaaggatcctccagcctcggccccccagagtgctgggattacaggcgtgagccatggtgcccagcctggtaattaacagatacttcgtgaccacccactatgcaccaggccctgttctataattcagatgaaaatccctgagaggagctgacgtgctagcaggggaggcagatagcaccacaaaaaaaaaaaaaaaaaagcaaacagaagtcaaaaggtcatagagaggtcagggggtaggtgcgatggtggtcggggaaagccacttgaacctcatggctttgagctgtccagatgcgggagaaaagagagccaggcaagggaataggcattgcaagggctcttggccagaaacatgcctggagtgatccaggaacggcaaggaggcccaggtggccggagcagagtgagtgacaacaggggttagggggaaccctgaacctcccctgagtttccctagtctgtaagatgggggtctccaaccggtggccccagggccttatccaaccactggatatttttcattctgtctacaaagtgttaagaaaacgaagttaccaacatttaaaaatcagggccgggtgcagtggcttgcacctataatccctgcgcttcgggaagccaaggtgggaggatcacttgagacccagagttcaagaccaggttgggcaacatagcgagacccccgtctctaaaaaaattaaaaaattagccaggtgtggtgacgtgcatttgtagtcccagctacaggggaggctgaggtgggagaatcacttaagcccaggagttggaggctgcagtgagccatgattggaccactacactccagcttgggcaacagagcaagaactcaccttaaaaaaaaaaaatccggaaggccgggctcggtggctcatgcctgtaatcccagcattttgggaggctgaggcaggcggatcacttgaggtcaggagttggaaaccagcctggccagcacggtgaaaccccgtctgtactaaatatacaaaaattagccgggcgtggtggcacacacctgtaatcccacctactcgagaggctgaggcacgagaattgcttgaacctggaaggcagaggttgcagtgagctgagatcgtgccactgcacttcagcctgggcgacaagagcaaaattccatctcaaaaaaaaaacaaaacaaaacaggagatttcatcataaaaatctccatttctagcttctgtgggtgagtgatgacgtcagagcagcacagaggcaggtgtcagggagcctgtggactcttggccactgtgtcacctcacatggctcctggaagccaggcggacagtgatacgtccacagccacaccatccccatggtggtgggacagggttacctgccagtgcccactcttctcccacaggtgctgagaccacagcgctgttccacaaagccccaggaagccacattaccctgtccaccggcctctctagccccatcttgcccaggaagtgggaccttggcgtatcgctgtgaccacacctcccagccggtcagcctggccgctcaggctctacctgcaaaggcaaggccccacccaaccagcacccctctcatggctgggggtgcctccaggctgccctctctagggccaggagcctgcagaaacgctcccagccttgaataaagagcaacgaaattattgaaacaaaatcaataaaagtttgaatcagggatggtataacatgctctggctttgattctgtgctttaattcagcgttcctgaaaaacttatgatgtcagaaactatctgtaggtttggtttttttcattttgcaagaattcccaggatatggagaaatcacagccactcacagccttaacaggttctttgggcccaaatgattccaaaagcaaaacgagagaaactttttcaaatatgtttattatgtatattatatacaatatattaataaaacatattacctacatgcatttaaaacataactgaagtcagattggcccagaagactcactccaaatgagacctaatccccaatagggtgcaagtgactgcacaaactctactcctcacagcccttcctaagactcagtgtgctcatcacactagggtctcagagtccttctgaccataaacccaagccccagcgccagcccaacacacacttggacgcagcatgttcacgtccagcctaggaagaatttatggttgacctggattgggtaaaaaccgtaaacgtctgtacctcagaatgtaagatcatggtgtttaaaactacagaacattcagaggttgtcagaagtctctaattgctggtcccccaggttgaaaccagcccttaggttgaaattttgacctgcaaatttttttttaaatctgaaccaaattttttaaattaaacccctttaaggtagtacattttcaagatgcaaaattcaaaaaatataagagggcacgtgataatgagtgagtctcacttccaccccaccctccagcctcccagtttccctctccagaagccatgggtatggatgccaatctccaaaaatattttattcattacaagtatatacatatgcattattttaccgctcacaaatggtagcacactgcacggtttcccaataccttgttttttttccccttagcaagctgtctgggaaatacttctgtatctaaccacgggcaggggtgttcctccaagatttttagacaacagttctccagttcaccccgttccggtgaagggcagagcaccccccgcccttcccagccaccctgtacacgcccctactcgctctcggatgcctgcagttcccaggcttcccagcagagggagacaccattccactcccaagaccaccaaggggtcgtcccagacacaagcttcaagggtctagggaagagacgctatccgcccagacacaaagaccccccttagctatactgagttggcctccgggcctccccttcctgtttctatctcctcctggacctgttgcttagagccctaccccgaggtccccccgcccggcttccttatgggaactggccccgccttaagagtggtaggagggagccttacccttgtctaggacctgggcttgacaacttgccccagggaaccacatagagaaggggtgtagcgctgggcgaacattgccctccccgatccctcagcgatgacaagtggggggtccttctctctgcccccagcaggccagtttccggaagagccttgacccaaacccccttttcctgtcctgtgctccacactcccagcagctgcttctccctggccaggccctgcagccctcctccccgcccccacggtggtgttggggtcgcctggagtccagctggtgtccagggcagagctacccctttcctggccctacccctccccgtgaccccaatcctccgccaaccgctcaaaggatccttgttctccatccagcccccagacaaaagtccctctgtctaagaaggcggaattgaggggagggggcacccccaactgggaccatgggggagcctgcacagaccccatccggaaggaatgcctggaggaggaggagcaggagacaggggaggaaagggggagggaggcttgtacagtgctgggggccttatgtggactaggaggcagccgcccccaccagcacccactctgtagacccaggcgtctggctcccagcacccacggaaagagcctggctaggaaactgcagcctggtgcctggcagacagttctcattctccccagggcagggagcaggttatgaccaggactaaggtcccagagtccccaccctgacccctccctgctgttccagccgctccctcatatccacccctgccccatctcctgactttggtcacgctagcatcttctgctgatcctgaaattgtaccagcggcaagatgtggcctggaaggggactttaagttctccacaactgccagcaatccttccaccaggcaaaacacatcatctaaggaaaagaagtgaggtcggaacaccaacgcatcatctcactgcatggccctggaggctctgccgtttaaagaccccagaaccttccccattcaaggtcctctcctgggcacaggagattggagaaagctcctcccttaattccaggggccgagttccagcccatccaattctccgtctcacctgaggctgctgtggtcctggtgaccccagggagcaacctgccgcccatggctggggagggggtgaagctgtctctttaagagcaggaatggagcccctgggcctcagggcatctgacttgttttctacctgcccaggtttgcttagggcgtggcagcttcggataaacgcaggactccgcctggcagcccgatttctcccggaacctctgctcagcctggtgaaccacacaggtgagcagctggggccccttcctccaagccctccttgtctctgcccctaaattaggaagtatctacctgccccctgaccctgccccatagaagcttttatgttaaagcgcctaaaatcttgtgaaatgcttttctggagccaggagataaacggaagtcccttcccctaatgtccctttccccaccattctcctctcagggacttgttgaaccagctgaggtgagggcaggactgataagtgtggttggggtgtctgaaagactagtgtctgcatggattagggatatctgggttggggatagctgggtggaggagagggggtgcctgggtaggtaggggtatctaagtggaccaggggtgcgtagatggactggggacatctgggtggatgaggaatgctgggtggactcggggtgtccagacattgagggatctgggtggataaggagtgctgggtggactcggggtgtccagacattgagggatctggattctggagacctccaggaaaaaaggatggagctgctgggggaa

SEQ ID NO: 8169 - DNA, 6000 bp, Homo sapiens
gcagcagcagcagaatgcctgcccctcccatgcccccacccccactctgaggcacccgcttctcccggcccacccagctcagcccaggccactacgtctcctcctccaccaggccgccctccatccgcctgctggcacgctcggccctggcttctctctcctcttctccgtctttctttcagtcggccttcctccctgttcgtatgtctttggtgtctaattttctgtttctctttctccctgtctttctgtctctgtatttttgactctgtgtgttagtctgtttctatttctgtctttgtctctctttctgcctgtttctttttttctgtgttgctgtcagtctttcaggctttaggtagctgtctatctgttggtctctatgtgtgtgagtgtatgtgagtgtgtgtgtgtcctgctgcctggtgtcttgatttcttgtctcctgccccccccacccccccttccagctccctgcctgtagtttctttgcctcctcccacctcccttctccccgaaggtttgggaaaggggttcgctggacacccggcacacccggcagagtaggatgggaaggaggagggggtcagaggccatgagaaggtcggccttgggggaagggactggacagccccacaggagggggaggggccaccaagggctggagccgccccaccactcccgccagccccctccccagattccccactcaaccctattgggggagcaggaggacgatgtcaccagggtggggaccagatggctctgcattctggagcagggtgggaggagaggccctgggggggctggggacatcccgtcctggccactctctgccagccccctcccctggctacaggagggtgtgttgggcgctgtcagtggggccagatcacgtccagctgctccctctggtggtcatactcggcaggacctctgcccggccccaagcccttagcctccctcccctaccctgaaattaaccctctagtggccaacacccactgggggacagcaccaacccgaggacatgatgatgatgaagatgatgatgatggtgaagatgatgatgatgatgccaccccttcttcagcgtctactctgagcctggccttgtcctaaaagctcatctattaactcattctgatcttgccaaagccctctgaagttagtgctgtcatcatcaccactttacagctggaggaagtggagacagaggtcagggaacctgaactctaggttacccagctgagggcacagccgggattcaaacccaggcatccggctccaggttattttgcattctttctttggagatcagagttcatggatagatggataattggttgttttaatctggactaaattttagtcatttggatagattctgtccactaaataagaaacataagtaaatgacacttgttagctaagatgaaatagtagtaatgtttatactcactcagccttcacagccaccctgtgagatgggcagtactgctatccctgctttacagatggggaaactgaggcacagggaagttatgtgattagtttcctggctctagtcagctctaaacctaacccctaggctgtaccacctcatcgcctggggacgagactcatcctgtgattgaggaatgcatgcagcctctcttgacactgacgcccacgcccagaagcctcgttggaggataagggggcttaacagcttggaggtcatgcagatctgggttccaggcccagtcctgtgtggcctcagttttcccatctgtcaaacggggacaatcgtggcacccgcttcccagttgtggagaggactcaggtgatggaggcaactcatccttttggggttcagcacaaggtgggcatcccacagtggtcggcaagcttgggggtgggctccggatccagctcctagaggagcagaccccagcagcttgtggtttgagccatgcccgtcagctctcagtttccttcactgactattgggtatgataaacagggtccctgaaagtgaagttggagagctgagtgccaggggcacagagggatctgaacccactctcatagggtgcccagcccagcagtccagttcacaaggaggaggatgacaaggacaataataataggccaggcacggtggctcatttctgtaatcccacattttggcaggctgaagtgggaggatcgcttggggccaggagttcaagacaagcctgggcaacatagagaaaccccgactgtacaaaaaattaaaaaattagccaggcatggtgtcgcacgcccatagtcccagctactcaggaagctgaggtgggagaatcacttgagcccatgaggttgaggctacagtgagctatgattgtgccattgcacttcagcctgggtgacagagcaagacccggtctcaaacaaacaaacaaaaaatgaagttaatcataagacaatgtcaagttcagagacctctgagccctgtccaggattatacacgtgatcttagtgatttttccattttggagcatgtgaaaatgaggcacagagctgctcaagttcacacaaccaggagtgcagtgcctgggccattccaggtttccctgtcaccaggacctgtaaacctggcctgcccatggggacgccaggtgtgttgtccccgacaagagctcaggggaaggaaagtgtggggttaaatacatatctgtggttttggaatgtgtgaacatgcaagtgtgtcagcctgcgcatctgtcaccgtggccaaccatgtgcctgtttgctcaagcatagggtgtgaaccagtgtgtgtgtttctgcttttgtgggtatgtgtgagagcggcgggttgtccttgatggtgtttctgcttgtgtatctgtgcccatggaaatctgtctgtgtgtacacaagcttgttggccttcctatctttgggaccatgtaggagtgctggctgcatgtctgtacctttggggtttttttgttttgtttttgtttttgagacagagtctcgctctgttgcccaggctagagtgcagtggcatgatctcagctcactgcaagctctgcctcccgggctcaagtgactctcctgcctcagcctccggagtagccgtgattacaggcgcacgccaccacacccagctaatttttgtatatttttttagtagagacgagctctcgtcgggttggccaggctggtgttgaactcctggcctcaagtgatcctcccgccttggcctcccaaagtgctgggagtacaggtgtgagccaccgtacctggccatgtttggccatgcatcttagaatgcatttatgtgcggtgtgcacatacttgtgtgtttctgtatggccatttgtgggtgggtcttcacataaacatgcatttttgtggccagtttgtgagtgtagatggtgatgtggctatgtctttgactgtatctctgtgtggccatccatctacatgagcgtgcgtgggtctgtgtagacataaatgtgcttgttctggtattttgtgactggcataaaaggtgttggctgtgtgtccgggtctttgggtttctctatcagtgtgtcattctgtgtgtgtctgcttctatggatgtacatacatacatggttttgtctggttttgtacctgtatatctgggtctttgggattgtgtgtgggtgtgtgtgtgtggtgcatttctggggatctcaccacagcagatagcgcacatgcgcgcgcacacacacacacacacacacacctccctcccgtcctctaaaacagccctgttaaggacctcacggagcactgggatcgggggtcagtgggctcctgggcagtcaggctgggtgaccttcggccctggctggacccagttcccagggggcagccgcctcagcccaaaagctcttggaggcgtgtgtgtttgtgtgtgtgtgtgttcacaaccctgtcctccacaatcctcctagcctctccagcctgcctgctggctgcctgctgctgctctctctgaactgagagagttaaccaagcgggccagggcagtctgggctgggggccgccccctggcccccctccagccccagctccagtttcagctgctggttggggagggcatgggtggggtggggctgggaggggaggctgctgggggcggcgcgtccagctctgggccagggggtccaaagtgctcagcccccggggcacagcaggacgtttgggggccttctttcagcaggggacagcccgattggggtgagcgtcccccactccttccctccaggcctcacccctggtctggctgggccgcctattttgggagcaggagtggccagcccgaggcttcccaggcaggccaacccaagagggagggagtgtggttgaggcagtgggttctgcagggtgggatgtgggtgactcctccctgccctgctggtgcgtgtgcaccctggcagggtgtggagttgggacacacacgtgtgtagggctggttgcgtcactgcgtgggggcaccggaggcccagaggaggagtattggatgcctgacggtgtttacaccccacgtcctgctccaaccagcagtttggggagaggttgttgttcatgtccattccggccccactgtgtgtgtgtgtgtgtgtgtgtgtgtgtgtgtgtgtgtgtatccctgccccagcatgtgttttctatctctaaggcccactgggctgggcctcatgtcacttgcctgacatccgattgtgaaagatgtcacccagaggcgggcagaggggctgtcttttccttttctcgttgctgcccagggaggagacggggtgacctttcccacaggggcagcctgtggcgatgtggcagctgggcctcaccccggcagggctgtgcgtgaccccctgagtgggggaaggcaggctgttgccatggtggcctgagcgagcagaattcctccagggtgaagtgggagatatttatacccggggtcaggccgcgagcgggcgggcggagagggcagggagctgggatttcgcggggcacagtgaggccgggcatgtaggcaggtgggacttgggcgtgccctgctgtctcctgctctgtgtttgtgtgaggcagcgcctcctctgccctgccagggtaggtctgggaatcgggggcctgctgcgggaggtggaggcccaagggaggccccccggggactgtgtgtctcacccccgtccctgctacgttgtgttgttgtgtgatcccatcgtggaggttgttttggtgacactgtgtccccacgaagctggggatacccgtttctctagcttggagccaccaagatagaggacaaacacttctgtgattcagtccccagactgtctctgacttaatcccttgggttcaagccctatgtgggagagcaagggcacacactgcctaatccgtggtgtcccccccaggacaatggcgtctcttggccacatcttggttttctgtgtgggtctcctcaccatggccaaggcaggtgagtgcaggggaggctgcccgctacccacctcagccccaggggtggcggtggggaccgaagaaccaagttggagaccccaacctagactaagtcggctggggtaccaagaagtttgggggtctccacgtggggtccagtcacaggctggtatttgggggaggggagaggaagccccagatcaggcaaagatggggtgggatggggctgaatccccgatgggataactgggtcacagacagcctgccgtgagtcagggagctggggcagttaggtgccacctgccccatctgggacagtgcagagggggcagctgggacccagagagtgtgggcagcctgcccagacaccctcagactctaagcccagcaaggcagagcctccagtggtctcctcatgcccctccctgccaggaccccaggaagcattcaacccctgatttctctctctttccagaaagtccaaaggaacacgacccgttcacttacggtgagcggggggtctaattt

SEQ ID NO: 8170 - DNA, 6000 bp, Homo sapiens
cgggcgcttagactccaaggaggggagcgagctgcggccaggtggggcgaggtcatttcctgactcccttccccaggtcgcctgctgaccggtgactgtcaaaagaacatccacctctggacacctacggacggcggctcctggcacgtggaccagcggccattcgtgggccacacacgctctgtggaggacctgcagtggtcaccgactgagaacacggtgagggagggtggggttctggtcgtttagttctgatggattctaggccagggacctagaatcctaggtctgagggaaaagagggctgggagcctgacggaggtttagtttccaggccaagtcatagtaaggggaacagtgaaagagagagtagcccaccgctggcgcttgggcttcactgcgggctggggggcattgggaccactcagactccgcctcccccaggtgtttgcctcctgctcagctgacgcctccatccgcatctgggacatccgggcagcccccagcaaggcctgcatgctcaccacagccaccgcccatgatggggacgtcaatgtcatcagctggagccgccgggagcccttcctgctcagtggcggggatgatggggccctcaagatctgggaccttcggcagttcaaggtattttcccagccggacacctgggggctagagaagcttgctcccagcagcccctgggatttgtaggatttttcctccttgaatagttttacacaaccagagctggagagcccttagaactagactcctgcctcttcagggtacagaggaggaaactgaggctcagcaagaggaagggtggcgggtctccactcttggggtcactcactctaccaggggaacagctgacaagagatggaaggggctggggcagcagagactaggactctcatctgcctgtgggcagaagtacaggtgtctgtacggccagtgctgagagcttcagagagttgtagatttctagatgcaactgagaatcggggcccagcctgctcgttgtaggagaagactgaggcacagaaaggacaggagccgctgtgacatgacagccaagctagaggttgacattgtggagctgggagggtccctgtgcaggagaagttgcagcgtccggcatccctctggacaaagccgcagctttgtgtggctctgccttcccgggctgccatgatgtcatcctttttctcctccagtttgatcgtttctatagcgtcagccctggggaggaggctggagacggattccagcctcccaggcccaccaggtcacacagggcccagcttgttgaccattggaacttcagagcagcctctcctaatgagagagacgccaattgagcggggcctttgctgtagtgaaagtgctgtcattcttagtctttctttgggtcggcttccggggattgtgtttctgcctcctttgaggcctttgtagaatctgctgggagagctctgggagagccatgccctcctttttttctttttttttttttttttctttttttttgcgatggagttttgctcttgtttcccaggctggagtgcagtggcgcaatctcggctcactgcaacctcccgctcctgggttcaagcgattctcctgcctcagcctcctgagtaactgggattacaggcatgtgacaccagcccggctaattttgtatttttagtagagatggggtttcaccatgttgttcaggctggtctccaactcctgacctcgggtgatccacccgccttggcctcccaaggtgctgagattacagtcgtgagccaccgcacccagcccatgccctccttttacaaggaagaaaacaggcaggcagagggaagagcaggggcgggggttttgctacctgagctgggaggggcttctttgcaggtgaatcacagttcccagcaacccctgggctggtcagccttcttagcagccagaattaccctgtgtccctttcctggactctgggcttgtgagggcttaaggggtggggccctggctgaaccctgaggctggagaagggttggggcttctgcctgggtcctccccagagtcaggctgaggcattcagagcccgttcctcccatcctctccctctagtctggttccccagtggccaccttcaagcagcacgtggcccccgtgacctccgtcgagtggcacccccaggacagcggggtctttgcagcctcgggtgcagaccaccagatcacacagtgggacctggcagtggagcgggaccctgaggcgggcgacgtggaggccgaccccggactggccgacctcccgcagcagctgctgttcgtgcaccagggcgagaccgagctgaaggagctgcactggcacccgcagtgcccagggctcctggtcagcacggcgctgtcaggcttcaccatcttccgcaccatcagcgtctgaggcgtcccactggctctgatcttgcttcctgcttggaaactgaagtcgaattgggctcccctggaaggggttcattcaggtctgttgactgagactggccggcctgtgggctgccgtgatggattctgtttgacgtattgttctctagaaggcctggctctgatccagtgacccctctcaccaaagaactcggtttaaccagggctctgtaagaccactcccacccagagacttgtgtggcctggtgtggcctgtgtgtcggattccttcctgtcagctgtgacccatttgacctgtgtccccagaacccagttttttgtttgtttgtttgagacggagtcttggtctgtcgcccaggctggagtgcagtagcacgatcttggctcactgcaacctccgcctcctgggttaaagtgattctctcagctcagtctcccaggtagctgggattacaggcatgtgccaccacaccccgttaatttttgtatttttagtagagacggggtttcaccatgttggccaggctggtctcaaattcttgatctcaagtgatctgtccgccccggcctcccagagtgctgggttgggattacaggcgtgagccaccgcgtccggctcaggacccagttttggctgctggttcccagcaggggactcgggggatatacagtggctgcaccaaattggaggtgtgggttcctccaacacaatttgcttctgcccgttgtcttcctgccagctgggtttggccaggatttctccgtgtgggggctacatgcgaccctctcccctcctccctgactttagaggctggtgctgtgtcgggaggaaggtcagggctcctgagcagcaataaaggaccaggaagaggcctgaggtgtatttgagactctggtcctttggccacagccctatgaggaaacggggtgtggggggagtttgggggtggggaggaatttggcaccagctgcccccaggccgctaggctgggggaggccactgggagtccagtgcaacccaaccttccgcccactgggtgccgccgcgttctgccttctctaagtgtccttccatctggaactcactctggcttagtgaaaggggcctcatccctgacccccaccagcttatgaaggcttcatctcagggaactctggaccccccatttctccctccgtccatctcccctttatcacgtttctttctttcttctctgtgtccccctctttcagagtctcccgtcccccactgccagtctccctgccccctagtcgctgtctcgctcctccgccgctgtctcctgtccagcctgcctgggctgtggcccagccgctctgcctggctggcctccctggctccccctctgcggctctgagctagccccacccccggcccccctccatccagcctctgatccatctgtggactccgaggtcgggtgcccgtcacacggcccctgggaccaaggacagactacagcccctcagcacccacagaggcttcccctcagccctagccgaggagcccccagcggagggcatgggggtgggccgccccaacaggtacgtgcctccatgcaaggcaccgctgagccatcccctcctgctctgctgcgtcgcccccatccacccctgccccagcatccctgtcctcagcttgtccccttcaagaaggccttgtcttcccatcagtgacaggctcagcgccaggagaatccacccccaggttcagtgcctccaactctcaccccatccccattttatgcattttctcactggcttccatcctttcagagaaaccctctcagtctgtctgtctctgtctctgtctctctcccccatctctgtctctcccatctctctctgcctctctctgtcttcacaatttcatctccccatgtcgccatttcttaaaacatttcttttctccttttcgttttcccaattgccctgtccgcctctatcttctctgtccccctccatctaggtctctgtccccccctctctctgggtctctgtccccctctgtctctgagtctctatcctctcaaggtctctgttcccctctctctgggtctctgtcctctctcaaggtctctgtccctttctctctggatcaatgtccctttcctgctgccctctctgggtctctgtccccctctctctcagggtccctgtcctgcttggtccctgtactttttcttggggcaccctctcaacacccctcctcctgcctatctctgcatctctttgtctttctgtagtctctgctttccaacctgctgtccagcccccaccagtaggtggggagtggtggggaacacccctggtttcggaagagtgagagtgttgatttgggagggtgagggtggggcctgggggcggggcttcttggcctcagattagacagtgactttgacacgaagttgaagcaccttaagccctgtatctcctttatatggaaacattaagctgctctcgcaggtcaggtggaggatccctttccctcccgccctgcttttgctaggggaggggggtgccctgagcctgagtcgcagccagcctgggagctgggccatgttggccgcagatggccccctggtgaaggttcccgttggctttgggaagtagacaacgggtctgcctcacggggctgaggtgggactggaggatttcgagggcagaactctgggaaggaaagaaaggcttaggacccaaccagcattccccctggcactgcgggggcctggccagctcatggcgttccctgagcctgttccccaactgtgaaagggggtgatgatcttcacctcccggcatcctgagcggccaaggtgagcagtggggtctgagagtccagtgggggctgtgggcatgtcgggagctcatcacgaggcctcgtacataccaggtgtgtttgaaaccagagtgctcttgagaagactgtggtttgtcactcgggccgtggctcccaggaggcctgggtgggaggctagcttttgccactcctctccccactggctgagagacctgcgacaagggactaacctcagccccagttggcttttctgtgaaaagccaggtcccttcatcaaagggctttggtgagagatgggcaagtgggggtgagaggcccaggctggggcctggggagcacaggtcagtgtcagtgcccacctgcccccccagcccacgggggtggttcctgagggtggagtcagtgctgagtggggatccccaggctggggagggctgcaggtgtagatgctgcatcctgatgttgacctccaggccgcccccttgggcaacgagcctatttcccctttttgggagaacagtctctaacatgcagggttgtcaggggtgagatagagtcaaggttggggtacactgtgggcactggacacagccaggctggtcccctcacctcagccttgcctctgtcaagtgggcctaatgaaccctcgcgaatggccaggctgcctgcgtggttgtgggaagcaggtgcagggctttgggagacccagttggtgccaaacttgacattgtctcatggtcttctttc

SEQ ID NO: 8171 - DNA, 6000 bp, Homo sapiens
gattacaggcgtgagccaccacacccggccctgcccctggttttctatctcagggcgaccccatgtctccctgtcagggtgggctcaggtgctctctccacccgctctctgcctattctccccctagcctatcagcccctgtgccatccctccttcccccgactctctttgccacagacccctgtctctgtccccacaccccaagatgcagcttgggtcttgtcctctccttcctggaccactgccccagcctcccagccttcagtctgtcctcacctcacatgcctgcagaaggatctcttttctttcagaactgaccctggcctgcccttgctctgagccctcccacagcaccaccccagggcccctgggacagattctggggacaccttggtgggtggatctgggctggggacatacattgcagaaggagcagtagccacacagggaccctggctggtagttcccatactcctgagcatcctgtggacctgcggggacaggagggcagcagtgacccaggctgactcggttccttcccacccacaccagcccaggccacttacctgtgtcctcaccgctttcctcctcgctggaggcacctccagcctcctctctcctgtccagtgggttggggatgatggtgaagcggggctcatcttcctccagcccctcctcctcctcctcttcctcctcgctgtggtctgggctcagtggggccccaacctcagccctctcttccctcctctcctcgtcttcttcctcctcctcctcctccttgtcttcctcttcttcctcctcctggttcaggctgaggccatgaccttcctcctcatcctcctcatcttcctggtcccggctgccatgatgggtgcctttctctccctgctctgaactttcatcgtcttcctcatgggagccggggtcctcttccttctccttttcctcctcagaatcatccttcctcaaatggcttctatccttgaccactgtgtgtcctggggggtgatggctcatctctttgatggaccctctttgaccatggccagtttcttcatcttggtggctttgcctgtggctgggggcctggtggccaagctcagcagagacctcctcatcttcctccctggggactctgtggtggtgatggtgagggacttctgttttatactcatcttggaagtcctcttcatcactcttgtggcctcgaggttggtggcttgcaacatagtggccgaactggactgtgatctcctcttcttcctcttcctcatctacaaggccatggtggacatgttggggaccctggtgccaacgttcagtggacacatcctcatcttcttcctcgtctctgtggccttggtgcctgtggtcagggacatgatggtggtgttcacctgagacagcctcaacctcttcctttctgtggtcttggtgcctgtgggcctggtgtccatactcagtggagacatcatcatcatcattgtcatcttcttcatggcttcggtgcctgtggctggggtcgcgatgatggtgtccatctgagacatcttcatcctcttcaatcccgtggccttggtgcctgtgagcctggtgtctatattcaatggagacatcatcatcatcatcatcatcatcatcatcatcatcatcatcgtcatcttcttcatggccttggtgcctgtggctggggccatgatgatggtgtccatctgagacatcctcatcctcttcactcccatggcctcggtgcctgtgggcctggtgtccatactcagtggaggcctcctcttcctcctcctcctcctcctcctcctcttctccttcatcatcttccccatcatggcctcggtgtccatgcctgaggatatgatggtgatgctcactggacacaacttcatcctcatcctcgtcttgatggctgtggctcctgtggctggggaggtggtgcctgtgctcagctgagtcttccgtgtcttcactcccgtggcctctgtgcccacgggcctgcccaccatgctctgcaaagacctcctcacctgagacaccctcatctccgactttgtggtcttgggacctgtggcctgggagtaggtgcccatattccttggagacatcttcatcctccttttcacggtctgggtggctccagaaatgatgcccattctctgtggaaacatccttgttctcatctggatggtctctagggctgtggaggtggtggcgaagctctgctgatgcctcctcggagagcccggcgactccagtgctgttgttccggtttctgaagcctagcccatcccctctgagctgctgggtcatggccggggggaggagcaggctggccaccccagcccagaggacagaagcgtgcagccatggcctatggtggcccatggggacggacaggcagcactggctccagctgcctctgcggcaatgtggacaaacgttggggtctttgtccctttggggttggtctctttttttctctgtgtctctcctttgtcctttcggtctctgtccaccttcctctggtccttgctgcctggctctggacacccctctgaggctgtctccggagccccctgacccccctctggggccctccctccccattccccagccaatagggtccttcccctcccctctctccagctaaatttactctcagccctgagttattctgggtcagtccccgcctgcctgcctcctgctcctcctcctcccagctggggaggggaccagtgaggggtctctccctggccaggagacggtggccaagggacttgactttgaactaccaacaagctcacgtttggcagctgcaaagacaaaggctagacttttagcaggtttttgggggagcctggggcacctgggggaggcagaagagacttatcagaggggagagactcctgggacggaaggactgggggttcgattgcggggtgtttccagctggaatgatacgtgctggtgagagagtgatgtcagtattgaggccctagaatggggggaaaggaacatggcccccaacacacgtgcccatgacctcctgtccctggaactcagatctgggggcagggactgggctaggccagggctataaatacagctgggaggggtagggggactcaggttacggaggccacagctgtccccatcacagagggctggcaggagacaagtggccttgcccgtctctgtgtgtcagtatttcctactcctcacccttcatgactgcccccactagggtctcctttcctgttcacgggtcctcctctctcttcaattctgtcatctgctctctcagggtccctgtccctcctccatgggattgcctctccctctcactctgggcttctgtcccactcttatcttagtgtcagtcctcccccaagtctgtgtccctctctctcccctaaatctctggcccctcctttctgagttcctgcccttcccccaattctttggtttttgcatccccctctgccccttgcctcagtcaaggtgtctcctccccatctctggcatccacctctctgggtctctgtccccactctctctcagagtctctgtccccctctgtctcagagtctctgtccacctctccctgggtctctgtccccctctctctgggtctctgtccccctctccctgggtctctgtccccctctctctgtggatctctgtccccctctctctgggtctctgttcccctctctctgtgggtctctgtccccctctctctgtggatctctgtccccctctctctgggtctctgttcccctctctctgtgggtctctgtccccctctctctctgggtctctgttcccctctctctgggtctctgtccccctctctcagggtctctgtccccctctgtctcagagtctctgtccccctctctctgggtctctgtcccctctccctgggtctctgtacccctctccgtgggtctctgtcccctctccctgggtctctgtccccccatccctgggtctctgtccccccctctctgggtctctgtccccctctctctgggtctctgtcctcctctctctctgggtctctgttcccctctctctgggtctctgtccccctctctctgggtctctgtccccgtctctctgggtctctgtccccctctctctgggtctctgtcctcctctctctctgggtctctgttcccctctctctgggtctctgtccccctctctctgggtctctgtccccgtctctctgggtctctgtccccctctctctgggtctctgtccccctctctctgggtctctgtcccctctccctgggtctctgtccccctctccgtgggtctctgtcccctctccctgggtctctgtccccccctccctgggtctctgtccccccctctctgggtctctgtccccccctctctgggtctctgtcctcctctccctgggtctctgtccccctctctctgtgggtctctgtcccactctctctgggtctctgtcccactctctctgggtctctgtcccctctccctgggtctctgtccccctctctctgtgggtctctgtccccctctctctctgtctatccctgggtccctgctgccccaccttctgattctctgtcccctaagtctttgtctccccctctttgggttaaattgtcccctccctgtctggcatcctcctttctgagtctgttccctctccgccactggcccccaactccttctgttcccatctcgcgcttgcccttggagtctcccctgtgtgtctctctccccccggcccggacctctgcaccccccaggtcgctgtccctctgtccccttatcgcggcctgggacccgccctctccccgcctcccgctttggcgtctccaagactccccgccccccagacctcgccccgccccaggctaggctggaaagtggaggatccggtttgctctgggcgggtctggaagcagagccggcggagggagcgccggggccctgggctgcaggaggttgcggcggccgcggcagcatggtggtgccggagaaggagcaggtgagcgccggaccagggtctgcgggagcgcggagctggggacctcgcctccaggctcccagagaggagggcgctggacacccagattcctgggtcagacggaggagggggatgggagggtccaggttccagggtccagggcatgggggtcgagactcctgagtctggagcgggagggcgctgggggcccggactcctgtgtccgtggggagcgcacggggtgggtggctctgtgtcccataggacagaactgggtgccctctcaccccacttccacccctacatttgttcctgtccccagagctggatccccaagatcttcaagaagaagacctgcacgacgttcatagttgactccacagatccggggtgaggagttcgcccctggactgaccccagagggtccgcggcccgctgaccccgcccgcggatggtcacgccccagccctgctccttccccattcctggactcggggaccttcccaagggcgttccttgccgacgctctccctctaggagcgtttgggtctgtgtagacacccctcattccccattcgccattctcccgctcagggtcagtgtagacgctccagggctcggttctgcttctttcctccccgatgtctcttctatgtgcttctgtctcttcgtgtcactttctgtgtctctgtctttcccttttgggtatttctgtttcattcattcattcattcattcattcattcattcatccatccatgcaagaaaccctcactcagcgctcccaaggtccctttagcctaattcaacggccctgccagggttccaatttcccctgggacacgtgctgtgtggcttcgggcaaatcatttcacctctctgggtcccgtttctcatctgggcatcaaaagaggcttgatctcctggggttattatgagaattaaacaagttaatgcttgtgatattcctg

SEQ ID NO: 8172 - DNA, 6000 bp, Homo sapiens
tgagtggggatccccaggctggggagggctgcaggtgtagatgctgcatcctgatgttgacctccaggccgcccccttgggcaacgagcctatttcccctttttgggagaacagtctctaacatgcagggttgtcaggggtgagatagagtcaaggttggggtacactgtgggcactggacacagccaggctggtcccctcacctcagccttgcctctgtcaagtgggcctaatgaaccctcgcgaatggccaggctgcctgcgtggttgtgggaagcaggtgcagggctttgggagacccagttggtgccaaacttgacattgtctcatggtcttctttccaaatggagtgtgccaggccctgccaagaagcccctgaggatccccaggttccagcacaaattatttaacccctggaatggtttgtcctgatccagccagttcctgggaagttccccaccacagggccaagcgtttggtaacgttgcagtgaaccctgaaggcaatgaggggtgcgggtccatgcccagccctttcctttggtccaccctgacaggctgctgcgattccctccatttcttttcttcctttattttttatttttaattatttatttattttttagagacagggttttgctgtcttccccaggctggttctcaaacccctggcctcacgcattcctcctgagttggactcccaaagtgctaggattacaggtgtgagccaccgcacctgccctcttttttttttttttttctttaagagatagggtcttgctctgttgcccaggctgcagtgcagtggtagagcatcatagctcactgcagccttgaactctgggctcaagtgatcccccacctcagtctccacagtagctgcatcaccatggctggatactttttgtttttaagatagggtctcgccatgttccctaagctggtttcagactcccgggttccaacagtcctcccaccttggcctcccagagtgctgggattacaggtgtgagccaccatgcccagcccccaggcctcctgcctttcacagatgagagctgaggctcaggaaaggatttgacctgtcatccatcacacacctagtaaatggttgagcaaactgagtctctggaaaaagaagccagagatcccaggggacatggtgggtgagcaactaagccaggactgggccctcatccatatggtaagaaggcccttcctggtcttttaagaagtcccaatttccccaccttacaatggaggaaaccgagactcagaaagagttgccaaagatcagagggtcgggcatgaggcccatttcatttattttacaatagcttcattgaaatctaattcacatatcatatcatacactcactacagggtacaattcaatggcttttagtgtattcacaattgtgcagccatcacaattaattttttttttttaaatggagtcttgctttgtcgcccaagctcgagtgcactcgtgcactctcagctcactgcaacctccacctcccgggttcaagtgattctcccacctcagcctcccgagtagctgggattacaggtgcgcgcctgtaatcaccatacccggctaatttttgttatttttagtggagacggggtttcaccatgttggccaagctggtctcgaactcctgacctcaaatgatctgcctaccttggcctcccaaagtcctgggattacaggtgcgagccaccgcacctggccagcataatgttttcaaggtttatccatgttgttgcatctatcgatacttcatttctctttattgtcaaatactattcattggatgaatataccacattttatttattcattagttggttgatacttgggtttccaccttttggctattatgagtaatgctgctgtgaacatttgtgtaccagtttttgcatctgttttcatttctcttgggtacataagtaggagtgcaattgctgggtgatgtggtaattctatgtttaaccatttaagtaactgccagactgcttcctacagcagctgcaatttttcattccccacagcagtgtatgaggatgccaatttctccacattctcgccaacacttgttttttttattatagccattctaagtgggtgcaaaatggtattcctttgtgcttttgatttgcatttctctgatggctaatgatgttgagcatcttttcatatgtttatgagccatttgtataccttctttggagaaacgtctgtacagatcctttgcctactttttttgtgcctcagcctccagagtagctgggactacagatgtgcaccaccaggcccggctaatttttggatttttaatagagacgggattttgccatgttggccaggctggtctcaaactcctgagctcaagtgatccagcttcctcggcctcgcaaagtgttaggattacaggcgtgagctgctgtgcctggccccctttgcccacttttaaattgggttatttggcactagcccacatcgtgaaaccctgtctctactaaaaatacaaaaattagctgggatggtggcatgagcctgtaattccagatactcaggaggctgaggcaagagaatctcttgtacccaggaggtggaggttgcagtgagctgagattgcgccactgcactccagcctgggccactgagtgagactccgtctcaaaaaaaaaaaaaaaaaaaaaaaagccgggggtggtggctcacgcctgtaatcccagcactttgggaggccgagacaggcggatcacgaggtcaggagatcgagaccatcctggctaacatggtgaaaccccgtctctactaaaaatacaaaaaaaattagccgggcgtagtggcaggcgcctgtagtcccagcctcgggaggctgaggcaggagaatggcgtgaacccaggaggcggagcttgcagtgagccgagatggcgccactgcactccagcctgggcaactaagcaagactccgtctccaaaaaaaaaaaaaaaaaaaaagtttggggggtgttacttatcttttcatgattgagttgcaagggctctttatatagtctagatacaagttcctcatcaggtatatgatttgcaactacagtatcttctcccattagtgggttgtcttttccctttcttaaaaagcttttttgagacatggtcttgctctgtcgcccaggctagagtgcagtggtacagtcgtaactcactgcagcctcaaactcctgggcttaagcaatcctcccacctcaaccttccaagtaactaggactacaggtttgcattaccacatctggctaattttttaatttttttgtagagcaagccccttgctatgttgtccaggctggtcatgaactcctgggctcaaatgatcctcctgcttcagcctcccaaagcgctaggatacaggtgtgtaccacctcgcctggcctctcttcactttcttgatagtgtctttcggagcacaaaagttttttagttctggccgggtgcagtggctcacgcctgtaatcccagtactttaggaggccaaggcaggaggatcacttgaggtcaggagttcaagaccagcctggccaacatggtgaaaccccatctccactaaaaatacaaaagttagccaggcgtggtggcatgtgcctgtaatcctggctgctcgggaggctgaggcaggagaacccaggagacagagattgcagtgagccaagatcgcgctactgcactccagtctaggtgacaaagtgagagtccatctcaaaaaaaaaaaaaaagttatttagttctgatgcaattcaattgatggattttttccttttgttactttgtgagcctgtttttgaaccacagctgacctcagagccctgaggcatctctccatgctgagaagcagttacaccttacgattatgagcatggaccctggagctggatggctagcattcaaatcccagtttacttacctgtggtcttggggaagttttatttatttattttttttgagacagagtttcactcttgttgtccaggctggagtgcaatggcacgatctcggctcaccgcaacctccacctcccaggttcaagcgattctcctgcctcagcctccctagtagctgggattacaggcatgtgccaccatgcccggctaattttgtatttttagtagagatggggtttctccatgttggtcaggctggtctcgaactcctgacctcaggtgatccgcccgcctcggcctcccaaagtgctgggattacaggcatgaaccaccacacccggcagtcttggggaagttgcttaaactttctgtgcttcagtttcctcatctagaaaatggggataatgatgtctgcctcataggcttgctctgaggttcaaatatgtaaattcatgtaaagtacttacaacaacctccaaattgtataaacagtataattgatagaacacaaattatgaattcagtacatagatttagcactgtataaatgcatgctgtaattattgtggcacttgctataatatcgttattgttatagtattttccgttgttgttgtacaagtatcttctatagtattgttgctgtttatcttccaacttggaaggtgagtatgggccaggtggggtggctcaggcctgtaatcccagcacttgggaggttgaggagggaagatcgcttgaggccaggagtttgagaccagcctgggcaacatagtgaggcccctgtctctataatataaaaattaaattaaaaaaaaaatttaaaaaagaaggtggctggccaggcgcggtggctcacgcctgtaatcccagcactttgggaggccaaagcaggcggatcacgaggtcaggagatcgagaccatcttggccaacatggtgaaaccccatctctacttaaattacaaaaacttagctaggcatggtggcccgtgcctgtaatcccagctacttgggaggctgaggcaggcgaatcacttgaacctgggaggcagaggttgcagtgagctgaggttgcggtgagctgagattgtgccgctgcactccagcctggcgacaaagcacgactccgtctcaaaaaaaaaaagaaaagaaaagaaaaaagttaaaaaaaaaattacccaggagtggtggtgtgcacctgtagtaatcccagctactcaggaggttgagacaggagaatcgcttaaacttgggacgcggagattgcagtaagccaggatcatgccactgcactccagcttgggcgacagagcgagactctgtctccaaaaaaaaaaaaaaaaaaaaaatgcgtatcgttccacctatttgacagatgaggccactaagccccaccagaaagcatgcttggccgatgagctcatccattcctgttgcccctgacgtttctgccggtttcttgtcccagcaggttgggggcgcctgccccccactaggccaagtggagggggtccctccgtccaatgggcctggccagggccctacgccgcctcagcggcgccctggattcgggagacagccgggcgggcgatgaagaggaggccgggcccgggttgtgccgcaacgggtgggcgccggcaccggtgcagtcacccgtgggccggcgccgcggtcgcttcgtcaagaaagacgggcactgcaacgtgcgtttcgtaaacctgggtggccagggcgcgcgctacctgagcgacctgttcaccacatgcgtggacgtgcgctggcgctggatgtgcctgctcttctcctgctccttcctcgcctcctggctgctcttcggcctggccttctggctcattgcctcgctgcacggcgacctggccgccccgccaccgcccgcgccctgcttctcacacgtggccagcttcctggccgccttcctcttcgcgctggagacgcagacgtccatcggctacggcgtgcgcagcgtcaccgaggagtgcccggccgctgtggccgccgtggtgctgcagtgcattgccggctgcgt

SEQ ID NO: 8173 - DNA, 6000 bp, Homo sapiens
tgggcgtggtggctcgtgcctgtaatcccagcactttgggaggctgaggcgggcggatcacgaggtcaggagatcgagaccgtcctggctaacacggtaaaaccccatctctactaaacatacaaaaaaaaattagccaggtgtggtggcgggcgcctgtagtcccagctactcaggaggctgaggcaggagagtggtgtgaactcgggaggcgcagcttgcagtgagccgagactgcgccactgcactccagcctgggcaacagacagagactccgtctcaaaaaaaaaaaaaaaaaatacaaaaaattagccaggcgtggtggcacgtgcacgtgactgtagtcccagctacttgggaggctgaggcaggagaattgtttgaacccgggagacggaggttgcagtgagccgagatcgcgccactgcactccagcctgggtgacagagctagactccgtcaaaaaacaaaaaacaaaaaacaaaaaaacaaaaaaaaaaaaacagcaggaactggcaggtcttccctgaagagataaaaaaaaaaaaatgcagttgcaacacaaaagcagccacagagaaaagcaaacccatatatggtatttattatgcaccgagtgtggctctaatcacttttttttttttaattgagagacagcctggctctgttgattgggctggagtgcagtggcgcgaccgtagctcattgcagcctcaacctccttggctcaagcaatcctcctacctcagcctcctgagtagctgggaccacaggtgtgagccaccacgcctggctaattgttttttttttttttgtagagacagggtctcactatgtggcccaggctggtttccaactcctgggctcaagtgatcctcccacctctgcctcccaaagtgctggggattacaggcatgagccacctcgcctggcctctagtcgctttatatattttaacttaatccttacaagagccctgtgagctagttacaggagcacaaatggaaaccaagaaacagaaaaatttatcagcatgactcagtcctcagagccatgtatggccgtgtccgtgcatggcaggcaggtcaggggcctggggaacgctgttctggaaaccttggccaggccttggcacccgaggaatgtgcttttcagagtttttgtggctcttttccagacctgccctgacctctagctctgggaactatgtaagccaagtgccttccgggaagggagtccctctcctggtaactctttctgggtaaccagatgtggactcatgacacacactgagcctacgtcttataattttttgtttttgtttttgagacagtttcggtcttcttgcccaggctggagtgcaatggtgcgatctcggctcactgcaacctctgcctcccaggttcaagcgattctcctgcctcagcctccctagtagctggaattgcaggcatgcgccaccacgcctggctaattttttgtatttttttttttttagtagaaacggggtttcaccttgttagccaggctggtcaccaactcctgacctcaggtgatccgcccacctctgcctcccaaagtgctgggattacaggtgtgagacagctgtgagccaccacgcccggcgcattttttttttcttttttttcagagggagtgtccctctgtcacccaggctgaagtgtagtggcgtgatctcggcccactgtaacctctatctcccaggttcaagtgattctcctgactcagcctcccaagtagctgggactacaggcgcctgctaccatgcctggctaatttttgtagttttagtagaaaccgggttttgccatgttggccaggctggtctcaaactcttgacttcaggtgatccacctgccttggccttctgaagtgctgggattatagggcatgagccactgtgactggccatcttaaattttttttttttttttttttttttttgagacagggtttcactctgtcgcccaggctggagtgcaaaggcgcgatcttggttcactgcaagctccgcctcctgggttcatgccattctcctgcctctgcctcatgagtaactgagactacaggcgcccaccaccacgcccggctaatttttttgtatttttttagtagagatggggtttcaccttgttagccaggatggtctcgatctcctgacctcgtgatccacccgtctcggcctcccaaaatgctggcattacaggcgtgagccaccgcacccagccttaaatttttttttaagggaaatcaaacccagtgatattgggccagtacagtggctcacacctgtaattccaccactttgggaggctgaggcaggtgaatcacctgaggtcaggagttcgagaccagcccggcaaacatggcgaaaccccgtctctactaaaaataagaaaattagccgggcgtagtggcatgcacctgtaatctcagctactcgggaagctgaggcatgagaatcgcttgaacctgggagcaggatgttgcagtgaaccgatatcacaccactgcactccagcctgggtgacagagcaagactctgtctcaaaaaaaaaaagaaaaaaaaatccagtgatacttactttttaaatttttatttacttattttttgctttaagttgaatctttaaacttatctttatttttgagacacagtctcactctgtcgcccaggctggagtgcagtggtacaaccacagctcagtgcagcgttgacctcctgggctcaagccatcctcccgcctcagcctcccgagtagctgggactacaggcgcacacaaccatgtccagcttatttttgtattttttgtagagacagggtcccactgtgttgccctggcttgttctgaactcctaggctcaagtgatccccccgcctcaccctcccaaagtgctgggattacaggcatgagccaccacatccagacttcacttttttgtttaatgtcgcaaatggcataaggaatgggattcaatggggacacatttataaacgttgcagcagctcctagaacttgcctatccttgtaaacttctctaggtgattgctaattacttctttttttttttttttttttgagacggagtctcactctgtcgcccaggctggagtacagtggcgcaatctcgtctcactgcaaactccacctcccgggttcacgccattctcctgcctcagcctcccgagtagctgggactacaggcacccgccaccacgcccggctaattttttgtatttttttttagtagaggtggggtttcactgtgttatccaggatggtcttgatctcctgacctcgtgatccacctgcctcagcctcccaaagtgctgggattacaggcgtgagccaccatgcccagcccgctaattatttcaatttgaccttgacactgagcctgccaagtaggttcaagcattttgatggcccctttacaggttgggaaagctaatttatctgtccaaggccgaattctgaaactgagtcttaactgccaaaaattcttatcatcaatttcttcttctgggttgggcacagtggctcatgcctgtaaagccagcaatttgagaggcatcatgatgcaagaggaagaggattgagtgaagctaggagtttgggaccagcctgggcaacatagtgagaccccatctataaaaaaaaattaaaaattagttgggcatggtggtgcactcctgtggtcctagctattcaggaggctgaggtgggaggattccttgagcccagggttgacgctgcagagagctgtgatcacgccactgcagtccagcctgagtgacagctggaaataatgataaataaataataaataattatttaaaaaattataataaaaataattaaaaaattattttccctgattaatctttttttttgtccttctgagagttcaatttgtcccttttctgcctggtctcctaggtttccctaaaatcctgctgagaggttagcactgcctgccaaagtcagtttgcaaaatcccagagaaatccagcttattcctgggggaaccgccaagactgcccagccctgtgtggggttcaggcaagtttctcacatgtgcctttttggcaagaggcctctggcaaccccatgagtccccaaagagactcaattctaaaagttggtctccaccagctctctgtggcttaggggttcaagttcaactgtgaaagccctgttttgttttgattttgctttgagggagaggaaaccgcccttctgtttgttcaactccttctcctaaggggagaaatcaatatttacgtccagactccaggtatccgtacaattgatttttcagatgtttatactcagccaaaggcgggatcccacaaaacaaaaaatatttttttggctgtacttttgtgaagattttatttaaattcctgattgatcagtgtctattaggtgatttggaataacaatgtaaaaacaatatacaacgaaaggaagctaaaaatctatacacaattcctagaaaggaaaaggcaaatatagaaagtggcggaagttcccaacatttttagtgttttccttttgaggcagagaggacaatggcattaggctattggaggatcttgaaaggctgttgttatccttctgtggacaacaacagcaaaatgttaacagttaaacatcgagaaatttcaggaggatctttcagaagatgcgtttccaattttgagggggcgtcagctcttcaccggagacccaaatacaacaaatcaagtcgcctgccctggcgacactttcgaaggactggagtgggaatcagagcttcacgggttaaaaagccgatgtcacatcggccgttcgaaactcctcctcttgcagtgaggtgaagacatttgaaaatcaccccactgcaaactcctccccctgctagaaacctcacattgaaatgctgtaaatgacgtgggccccgagtgcaatcgcgggaagccagggtttccagctaggacacagcaggtcgtgatccgggtcgggacactgcctggcagaggctgcgagcatggggccctggggctggaaattgcgctggaccgtcgccttgctcctcgccgcggcggggactgcaggtaaggcttgctccaggcgccagaataggttgagagggagcccccggggggcccttgggaatttatttttttgggtacaaataatcactccatccctgggagacttgtggggtaatggcacggggtccttcccaaacggctggagggggcgctggaggggggcgctgaggggagcgcgagggtcgggaggagtctgagggatttaagggaaacggggcaccgctgtcccccaagtctccacagggtgagggaccgcatcttctttgagacggagtctagctctgtcgcccaggatggagtgcagtggcacgatctcagctcactgcaacctccgcctcccgggtttaagcgagtctcctctctcagcctcccgaatagctgggattacaggcgcccaaccaccacgcccgcctaatttttgtatttttagtagagacgggttttcaccattttggccaggctggtctcgaaccccgacctcaggtgatctgcccaaaagtgctgggattacaggcgtcagccaccgcgcccggccgggaccctctcttctaactcggagctgggtgtggggacctccagtcctaaaacaagggatcactcccacccccgccttaagtccttctgggggcgagggcgactggagacccggatgtccagcctggaggtcaccgcgggctcaggggtcccgatccgctttgcgcgaccccagggcgccactgccatcctgagttgggtgcagtcccgggattccgccgcgtgctccgggacgggggccaccccctcccgcccctgcccccgcccctttggcccgccccccgaattccattgggtgtagtccaacaggccaccctcgagccactccccttgtccaatgtga

SEQ ID NO: 8174 - DNA, 6000 bp, Homo sapiens
cggtagctcatgcctgtaatcccagcactttgggaggccaaggcaggtggatcatgaggtcaagagatcaagaccatcctggccaacatggtgaaaccctgtctctactaaaaatacaaaaattagctgggcatggtggcacatgcctgtagtcccagctacttgggaggctgaggcaggagaatcgcttgaacccggcaggaggaggttgcaatgagccaagatcacgccactgcactccagcctggcgacagagtgagactctgtctcaaaaaaaaagaaaaagaaagaaagaaaagaaagaaagagaaggaaggaaggagggaaggaagatagaaagacaaaagaaagaaagagagagagagaaagaaagaaagaaagaaagaaagaagctctagtccagggctctgtgcctcttgtctgtagaggactaggaggtaaacactttcatctttgaagtccatgtggcctctgttgagaaccatagctctcatctttcctccttctgtagtgggttgaactacaggctccccacaaaaagatatatccatgccttcgcccccggaacctgttaatgggaccttgtttggaaggagtctttgcaggtgttacttagttaaggatcttgagatgacatcatcctggattatctgagtgggccctaaatccaatgactgatgttgtaaacgggagcgtgaccgctgaagcacagcatcacaggggcacgtttaggcctctggatggctgcgggcgggcctgactaatgtcaggccttccacaagaggtggtggagcagagtcttctctaactcccctggggaaagggagactccctttccaggtcggctaagtaatgggtgccttcccaggcgctggcgttaccgctagaccagggagccctctagtggccctgttcgggcatgacagagggctcacacttgtcttctggtgacttctcactgtgtcccttcagctcctacctctgtatggcctggtttttcctaggttataattgtagaacagagattattttaatattggaataaagagtaatgctacaaactaacgaatgattaataatattcatatataatcatatctatattctatttcttgtataactattcttattctatatattttgtttattatactggaacagtttgtgccctcggtctcttgcctcggcacctgggtggcttgccgcccacagaggtgatcagtccaagactacctggctagaaacgagcagagagcagtttggcccggaagcctgagttttactccctggtccacatctcagtttcctggggataggacagtccccaatccctcatctgaaatccctggggacagctgtgtttgtgaattgggagattttgtattttaggaaaacaactgggggcagaggctgctgtatacccgtgctgttttagggggctcagaaaataatacccaggccgggctcagtggctcatgcctgtaatcccagcactttgggaggccgaggtgggggatcacttgaggtcaggagtttgagaccagcctggccaacatggcaaaaccccatctctactaaaaatacaaaaattagccaggcacggttgtgtgcatctgtaatcccagctactcgggaggctgaggcaggagaatctcttgaacccgggaggcaaaagtcgcagtgagctgagattgggcaactgcactccagcctgggtgacagagcaagactccgactgaaaaaaagaaagagagagagaaagagagagagagagagagagagagagagagagagagagagagacagacagacagacagaaagaaagaaagaaagaaaaaaaacaccccaaaatgaagatctcagaagcaaaagtttttctctgaccttctcctgccctcttgtgtctcagatctattctcccccaaggctggccataaaaactagaatccctctttcccaaggtaggttttagaaactagaactcttggctgggtgtggtgcctcacgtctgtaatcccagcactttgggaggccaaggcaggcggatcgcttgagatcagaagttcgtgaccagcctggtcaacatggtgaaaccctgtctctaccaaaaatacataattagctaggcttggtggcatgcgcctgtaatcccagctcctggggaggctgaggcaggaatcgcgtggacccaggaggcggaggttgcagtgagccaagattgagacattgcactccagcctgtgtgacagagtaagattccatctcaaaacaaacaaacaaactggtaagatggagggggaaaagggaggataggaaaaaaggaaggggggaagagaggaggagggcagggaggaggagagaaaagggcagaaaggagagaaggagggagaaagagagaaggaggaagtggggtaagagaagagagaatcagagcacaagaaaggtggaggggaagtttagagaagaaaaaggaggaggaggggtaagaagagaggaaggaggagggaaaggaggagaggaggggaggagggacagggaacactcagctgacatttatgaatgaatgaatctcaattccaagtaagcatgacagctccagtcctcagtttctttcttccttctttctttgtttctttcttttctttctttctttctctcttctatttttttttttttaagacagggtcttgctttgtcacccaggctggagtatagtgacgcgatctcggctcactggatcctctgccttccgggttcaagtgattctgctccctcagcctccggagtagctgggattacaggtgtgctccaccatgcctgactaatttttgtatttttagtagagacggggtttcgtcatgttggtcaggctggtttcgaacttctggcctcaagtgatccacccaactcggcctcccaaaatgctgggattacaggcgtgagtcaccacgcccagcctgccctcagtttctttacctgtcaaatggggtgatcacagcggtgctacctggctaggtaagagtgcaactgcagttactggtcattgctgactcttccaggcccagaaagcagcaggccagtggctggctctgggcctgtcctccggatcttcctcgtgatccctcattccagccaccctgctgcccgcagggaccaatggcagcgtagggggtgagtgcctgcccagccctgtcctccaaatgcattggaatcaggcccgggccgcctcctaaggagaacgctggaaaggtcggccaaggagagcagaaaacaagcagtggtggagtcggcagtggggcagaggagggggagctggaagggaaggaccccaaagcagaagcccgcacagtaggcacagcgcacccaagaagggtccaggagtctgcagaaacagaaaggtccccggcctcagcctcctagtccctgcctgcctcctgcctgagcttctgggagactgaaggcacggcttgcagcttcaggtcagccagagaatggggttgtgcgtgcccccaggccagcgctggcagcgcctgggggagcatctaggaccccggggtgcaagtaaagggcctgtaggtgcttctaggaaggatggggacctggcgtgtggattttgtcctccctgggatcctggggtgtgacggtgagacttaaccgacaaggcttcgggacatggattaagaattagctgtgtccttgaatcacacgtgttaagaccgcggcggtgtttacagttagagacttctgaggccccaatggtgtgagttgagcactcccccgggccctggaacgtgtttttaagaccgaaagaggctttggggcttggatttaggacaagctggagcaagaatacagcccgcgcgggccgtgggtgtggactgggatatttttggtcccccggggtagagatcctgcacgccaactagggctcgggtcctgatatcttgcgagccacgccccaaggctgcaggacacgtgtgtttcctaaaaggagagggggtggggcaaggcttggttgtcatggagacagcggacgaccctggcgggccgttctagcacccatgtctctttggccgtcgcctctccggtccggttgcctctctatggtcgtggcttctggaagacggccggcctcggctctgcgggctgaggggcttcgaagtagacaggagggaagaggggcggggcctaggtcctaggggggccggagtgaaacccaggaggtggcgaccgagccaaagcctgagggcggggcccgtggccaggatagaacctgagcctgggaacttgggctaggcccggaactggggtggggcttgaacggattggggagggctctagtttcgggagggtggggcgtgtgcttattgcgggggggtggggaggcatatgtctaacctagggggtggggcctggctgagaggggcgggactcggggagagggcttgtacctgtgggctgggctagaagcataacctaagggcggggcccagtgagtggtgaaaaggccacggggtagaggcaggaccaggaggaaaggggacaggacgtgaagggtaattcggggatcgaggatagaggctagatgaaggcatgtggcgaggcctgacagtgaccgacaaggtggacatgctggctctgggggcggggactgttgtaagattggcagggaaggatgggctcaaaaatatggaatagagcggacccagggtccgggggcggagcctggccaggacctggccaatcccaggcctggggccctggtctggttcctagttagcgggcgggtgtaaaagcctggaaaggggcgatgcctggcctgaggagttgaccaatcccaggcctgggggcggagtctgactcggagcgcgttcccggactcgcggggggcgcagagccgaggcctgggggcgcggctcgctgtagaggcgggggcggtcgtggggcggagcgggtcgtggggcggggctggagcggcccgcggcctcagctctctctgcttccccaggatgcgggctccgggtgcgggcgcggcctcggtggtctcgctggcgctgttgtggctgctggggctgccgtggacctggagcgcggcagcggcgctcggcgtgtacgtgggcagcggcggctggcgcttcctgcgcatcgtctgcaagaccgcgaggcgagacctcttgtgagtgttgccgggatccgtccagggctgggggcggggctgagggctctgggggcgcacggtgcagggctgggttgcggggacggcttggagggtccggagagctgagggtgctttgtaggttgggggcggggctgggccgagggctgggcgggggcggggcctgagagggtgaccagttgggggtctctgagggggctacaggggacactttaaggatttctcgaggaagatgagtagcctctaaggtgcttcgggcgttgcaggctgcttaggagatgatctcaggggatttggggggcaatttgggggtctttgggcaactggtggaaattccagggagctggggctgactggaaatccgtggcggtgtgggggtctttttggagccgtgataactgtgagagacttcagggggctctccagtaggtcaccggggctcacagggacgacccaatagatagtctctggggggttgccaagacactttgggtctatctagggctttctctgagggatgagcgagctgctctataaaggacttcccgggtttctgaaggtgtgagtttcctcgggatcgtttacagctggggcactgtttgagattttggggtctgtgtgggactttgggtttgggagttgttcggagtgtgtcgggaggctgctgtgtattccaggacttgtttggggggtctcttctggagactgggacactggattcatgctaggggggcagattctggtgtcctgtgcaaggatccttggagggtttttgcggtgtctctgagggacttgctcaaacgagccgttgggggtccttctg

SEQ ID NO: 8175 - DNA, 6000 bp, Homo sapiens
gttcgtaaccagcctggccaacatggtgaaaccccgtctctactaaaaatacaaaaattagctgggcgtggtggcggacgcctgtaatcccagctactcaggaggctgaggcagaagaattgcttgaacccgggagacagaggttgcagtgagctgagatcacgtcactgcactccagcctgggtgactgagcaagactccatctcaaaaagaaaaaaaaacaggccaggagcagtggcttacacctgtaatcccagcactttgggaggccaaggcgtgtggattgcctgaggtcaggagttcaagaccagcctggccaacgtggtgaaaccctgtctatactaaaaatgcaaaaattagctgggtgtggtggcaggcgcctgtagtcccagctactcgggaggctcaggtaggagaattgcttgaacccaggagatggaggttgcagtgagccgagatcgcgccactgcactccaacatgggcaatagagcaagactccatctcaaaaaacaaagaagggagggagggaaggaaagaaaggaaaagaagcaacaggtagagtcaggctctgaaccccacaccaatcataacacaacacacagtaggtttgtttttgttttttattttgggcttttgtttgttgtggagacagcgtcacccaggctgtaatgcaatggtacaatcatagctcactgtagccctgaactcctagactcaaacaatcctcccacctcggcctcctgagtagctgggactacaggggcatgccaccacgcctagctaaattttttttttttatttttagtagagatgaggtctccctatgttgcccagattagtgtcttaactcctgggctcaggtgatcctgccaccagggattacaggcacgagccaccatgctggcccttgttttttgttgttttttttttttttttttgagacggagtctcgctttgtcgcccaggctggagtgcagtggcgggatctcggctcactgcaagctccgcctcccgggttcacgccattctcctgcctcagcctcccaagtagctgggactacaggcgcccgccactatgaccggctaatttttttgtatttttagtagagacggggtttcaccgttttagccgggatggtctcgatctcctgacctcgtgatccgcccgcctcggcctcccaaagtgctgggattacaggcgtgagccaccgcgcccggcctgtttttttttttttttttgagactgagtctcgcactgtcgcccaggctggagtgcagtggcgcgatctcggctcactgcaacctccaccttccaggttcaagcaattctcctgcctcagcctcctgagtagctgagattacaggtgcccaccacgatgcccagctaactttttttttttttttggtatttttagtagagacgggggtttcaccatgttggtcaggctggtctcgaactcctgacctcgtgatccgcccgccttggcctcccaaagtgatgggattacaggcgtgagccaccgtgcccagctttttttttttttttttaagagacggggtcttactatgttgcccaggctggactctcaaactcctgggctcaaggaatccttctaccacagctttctgagtagctggggctacaagcccctgccacagtacctggctgtttttgtttttttataattgtggtaaaatataaacaacatggccgggtgtggtggctcacgcctgtaatctcaacactctgggaggttgaggtgggaggattacttgaacccaggagttcaagaccagtctgggcaacttggcaaaactgtgtttctacaaaaaataaaaatattagctgggcagccaggcgcagtggctcatgcctgcaatcccagcactttgggaggctgaggtggatggatcacctgagaggtcaggagtttgagaccaccctggccaacatggtgaaaacctgtctctttaaaaatacaaaaaaatgagccagccatggtggctcacgcctgtaatcccagcactttgagaggccaaggcaggtggatcacctgaggtcaggagttcaagaccaacctggccaacattgtgaaaccccgtctctactaaaaatacaaaaaattagctgggcatggtggcaggcgcttataattccagctactaaggaggctgaggccggagaatcgcttgaacccgggaggcggaggttgcagtgagtcaagatcgcaccattgcactccagcctgggcaacaagagcgaaactatgtctcaaatacatacatacatacaaaaaattagccgggtgtggttgccgcacacctgtaatcccagctacgcgggaggctgaagcaggagaatcgctggaacccgggaggcagaggttgcagtgagccaagatcacaccattgcactctatcctgggtgacggagtgagactctgcctcaaaaaaaaaaaaaaaaaaaaaaaaacttaaccattgcagccatttttaggtgtacagttcagtggcattaagtacattcacactgttgtgcaaccatccccactatttgcaggatgtcttcgtcatcccaaacagaaactctgggtgttttcaatctgctgatgattgctacagaggaattccaggggacatctgttgcgcacctactgtgctcacgctggggcctctgggatggacaggattctgccaaggcagacatctgggtcaagacagtcctgcacagttgttcaggttgtggccaaggttgcgtttgcagatttgccatgtaaaaatacaggatgctcagttacatttgaatttcagattaatagcaaaaaaaactttttggtataattctgaaatatttcatgggacatatttatactaaaacgtcatgcactgttgatttgaaattcaaatgtaattgggcctcctctatttcgtctggcaagcgtagacaaaagaatccagtccaggccaggcgcagtggctcaagcctgtaatcccagcactttgggaggccgaggcgggcggatcacgaggtcaggagatcgagaccatcctggctaacacggtgaaaccccgtctctactaaaaatacaaaaaattagctgggcgtggtggcgggtgcctgtagtcccagctactcgggaggctgaggcaggagaatggcgtgaacctgggaggcggagcttgcagtgagccgagatcgcgccacagcactccagcctgggcgacagagccagactctgtctcaaaaaaaaaaaaaagaatccagtccatagtcccctgagccatgtgccctggggtgcagctgggtccttcaggagaaaaatgctctatttctggcactgggaccgagcctgatgtgggttttttgttggtttttgttgttgttattgtttttgagacaaggtctcgctccaccacacccggctaatttttgtatttttagtagagacggggtttcactacgttggccaggctggtcttgaactcctgacctcaagtgagccgcctgcctcggcctcccaaagtgctgggattacaggtgggagccaccgccctggccctgggcctgatgttgatgacctcctactatgtgcacctgcagctctcctgcataggcctcagccgtcctgcatgaggacactgggaggcaggtgctccctatcaaccccgtgttacagttgaacaaactgagccccagaaaagaaaacgtatttgcccaggtcacacggtgaagaagtgagggattcgaagcccaggtccatctgaagccagagtcacccagaggagaaagagttggaattgagaactcaaggaatgcttggaagtgatcgggctcgagcccacctaggaagaaacagaggctggagacatgagactgtgttgctatttcctctcatcaacccttgggccctattgaggccctaccacaagcctggccctgcagcccagtgactaggagaaattagacacaagataataataacagcaatgatcttttttttttttctgagacggagtcttgctctttcgcccaggctggactgcagtggcgcgatctcggctcaatgcaagctccacctcccaggttcacgccattctcctgcctcagcctcccgagtagctaggactacaggcgcctgccaccacgcctggctaatttttcatatttttagtagagatggggtttcaccgtgttagccaagatggtctcaatctcctgacctcgtgatccgcctgcctcggcctcccaaagtgttggggttacaggcatgagccaccgcgcctggccaacagcaatgatctttgagcacctatattgccagtctccacggtaagagctttcttcattttttgttttgttttgtttcaagacagagtcttgctctgtcacccaggctggagtgcagtggtgtgatcgcggctcactgcagccttcacttcccgggttcaagccattctcctgcctcagcctcccaagtagctgggattacaggcacgcatcactacttctggctaatttttgtatttttagtagggacagggtttttcaccatgttggccaggttggtctcaaactcctggcctcatatgatctgcccacctcggcctcccaaagtgctgggattacaggcgtgagccactgcgcctttctttgtatttgttcaagtaatatactgaaatatgtactgtgcctcccactttatggaggaggaaactgaggccagcaaatgaggctgtcatgggaggtggagacaggatttgaacctgcctcagtgcaggaggctcaagagcctctgtcttctctcagggcactgtgtgggagggtgagaaggagggaggcccacagaggcatgacctctgattgccactgtcacctgggccctgctctctgaagtctctgccaagcggggaggtggccgggggagggccctgctctgtgcagcctcccctcccccggcccgcagagttgagcacagagggacagaggcacggaacccccagaaatgtccctcctcagaaacaggctccaggccctgcctgccctgtgcctctgcgtgctggtcctggcctgcattgggggtgagaagaagtgggtggagggatgtggggcccacacctggtgggtgtgagtgtggctgtgtgtcctgtggctctgtagccacgtgagacatgagtacggagtgtgtgcgtttcatggcgtgcgtatgcatgtgcgtgtcggggagtgtgtgtgtcggtggctgagagtgaagtgtgaatgtcacattggtacaaactgggatcatctgtgtgtgtgcacgtgcgtgcgtggaagtgggagtatgcagtcgtggtaaaaaagtgcatgtctgtgtgcatatgtgtatttgtgtgcacctgtctctctgtggggtatgtgtgtgcaaaatatttgagtgtgtggacatgtgtgagggggtgagtgtgtgctggtgtgtacgtctgtgttttgcatatgcatttttttttttttttttgagacggagtctcactctgtcacccaggctggagtgcagtggtagcagtggtgcgatcttggctcactgcatcatccgcctacccgtttcaagggattctcctgcctcagtcttcagagtatttgggactacagacacacgccaccatgcctggctaattttttttttttgagacggagtctcgctctgttacccaggctggagtgcagtggcgtgatcttggctcactgcaacgtccgcctcccgggttcacgccattctcctgcctcagcctcccgagtagctgggactacaggagcccaccaccacgcctggctaattttttgtatttttactagagacggggtttcgccgtgttagccaggatggtctccatatcctgacctcgtgatccgcctgcctcggccttccaaagtgctaggattataggcgtgagccactgcgcctggccaatgcctggctaatttttttatatttttggtagagacagggttttgccatgtt

SEQ ID NO: 8176 - DNA, 6000 bp, Homo sapiens
aagtgctgggattacaggcatgagccactgtacccagcccaaaattatcttttaaaaaaaattacagagagtagcaaatacacataaaagtggacagaaaagtatagagagttctggtgcacccctcagctggacccagaggctatcagataccctgtcctgcccctccccacctccccacatcctcccctcggtgatggcataaagcatccctcagacggcatcatgtttcctgtgtagctgtttcactataacctttgaaagatgagtacttgttttttcaaattaaagtgaaattcatataaattagccatattaaagtgaaaaatttggccaggcacagtggctcacgcctgtaatccctgtacttcgggaggctgagatgggcagatcacttgaggtcaggagtttgagaccagcctggccaacagggtgaaaccctgtctctactaaaaatacagaaatgtagcctggcgtggtggttggtgcctgtaatcccagctactcgggagactgaggcggaagaatcgcttgaacccgggaggcagaggttgcagtgagccaagattgcaccactgcactccagcctgggcgtgacagagtgagactccatctcaaaaaaaaaaaaaaaaaaaatttggccgggcatgatgatacacacctgtaatcccagctgcctggaaggctgaggcaggagaatcgcttgaacctgggaagcggaggctgcagtgagctgagatcgggccactgcactccagtctgggtgacagagtgagattccatctttaaaaaaaaaaaaagtcagtaatttggtggcattcacaatgtacaatcaccatgtctatctagatccagaacattctcatgccccccaaaggaaatcccatccccagttactccccatccctccacccccagcccctggcaaccactattctgcttcctgcctctatgatttgcctgttctggacatttcagatcaatggagtcagacactgtcgccttttgtgtctggtaagcattgtttttaagtgacagtgatatctcagtgtcatcaggaatctgggcagtggctcaattctgtctcacaatgtcaaaaatgtgttttttcttatttccataattaaatacacaaccagcattatgactggttgatgtgtcttgtaagaattcttggctgagcgcaatggctcatgcctgtaatcccagcactttgggaagccgaggcgggaggatcgcttgagcccaagagttgtagaccagcctgggcaacatagtgagtccctcatctctacaaaaaaattgaaaatctagctggttgtggtggtttgtgcctgtagtcccagctgcttgggaggctgaggtgggaggattgcttgagcccaggaggtcaaggctgctgtcagccgtgattgtgccagtgtactctagcctgggcaacagagcaagcccctatctcaaaaaaataaaaaaaagaaaagaaaagaaaagaaaatatttcatctgtaggtgccttttctctttctgtctgtctctcttccctcttggaatttatttattacagaaattgagatagtgtccagaacaggtttgactcttaacatttggggctggatcattccctggggtgggacgtgtcctgtgcattgtagcatatatttagcaacatccctggcctccctgcaccagatgccagtagcagtccccttcccccaagttgtgacaattaaaaaaatgtgtctagatgttgctaagtgtccctgggggacagaatggtccccgcttgagaatcgctggtctatatattttatcggcttcaaactcaacttttttggcaaagattccttatgggtggtgtggtgtcctcccactgggaagcccgtcatgtctgatggtctctctttgtccttgacacaccatcttgcattggttactacttactgtctcctgggccttggaagctcattctgtcagtttcctagaagtggaatttctgtgtcaaataaggcacacagtgaacattgagaggctttttaagaaatagaggatgggaaattagctaggcatggtgggcgcctatagtcccagttatttgggaggctgaggcgggagaatcctgtgaacccaggaggtggaggttgcagtgagccgagatcgcaccactgcactccagcctgggtgacaagagtgagactccatctcaaaaaaaaaaaaaaaaaaagaaaaagaaatagaggacggggccgggcgcagtgtcttacgcctgtaatcccagcactttgggaggccgaggcgggtggatcacctgaggtctggagtttgagaccagcctgaccaacatggagaaaccccatctctactaaaaatacaaaaattagcagggcgtggtggcacatgcctgtaatcccagctactcaggaggctgaggcaggagaattgcttgaacccgggaggtggaagttgcagtgagagccgagattgtgccattgcactccagcctgggcaacgagagcgaaactccgtcttaaaaaaaaaaagaaagaaatagaggatgggaaattagccaggtgcggtggtgggcacctgtagtcccagctatttgggaggctgaggcaggagaatcctgtgaacccaggaggtggaggttgcagtgagctgagactgtgccactgcactccagcctgggcgacagagtgagactccatctcaaaaaaaaaaaaagaaaaatagaggacagggccgggcgcggcggctcacgcctgtaatcccagcactttgggaagtcgaggcaggtggatcacctcaggtcaggagttcaagaccagcctggccaacatggtgaaaccccatctctacaaaaacaattagccatgcatggtggcgggcacctgtagtcccagctacccgggaggctgaggcaggagaatcgtttgaacccgggaagtggaggttgcagtgagccgagatcgcgccactgcactccagactgggtgagagagcacaactccatctcaaaaaaaaaaaaaaaaaaaaaacaggacagaatctctaaaggtgatgtttaataaggacacaaggagaaaacaagagcatacatttatttgggttcagaaattacatctcatgagaaactgctcactgctattttatctgtagcagcagttgcagtctagccattctcatgggggcagcaggctataatctagaaccttacttttttttttttttgagacacagtctcgctgcatctcccaggctggaatggagtagtgtgatctcggctcactgcaacctccttctcctgggttcaagtgattcccctccctcagcctcctgagtagctgggattacaggggtctaccaccaagcctagctaattttttgtatttttagtagagacggggtttcaccatgttggccaggctggtctcaaacttctgacctcaggtgatctgcctgccccagcctcccaaactgctgggattacagccatgagccacagcagccggcttttgttgcttatttctttcttactgtacacgtgctaacaaaaaagggatggtggagcccccagggtggacatgcccagccccaggtagctgtttcttttttttttttttttgagacggagtctcgctctgtctcccaggctggagtgcagtggcgcaatcttggctcactgcaagctccacctcctgggttcccaccattctcctgcctcagcctcctgagtagctgggactacaggcgcccgccaccacacctggctaattttttttttgtattttttagtacagacagggtttcacggtgttagccaggatggtctcgatctcctgacctcatgatctgcccacctcggcctcccaaagtgctgggattacaggcgtgagccaccgtgcctggcctttttctttttctttttctttttgagacggagtctcactctgttgcccaggccagagtgcagtggtgcgatctcagttcactgcaacctccacctcctgggttcaggtgattctcctgcctcaggctcctgaatagctgggattacaggtgtgtgccaccacgcctggctaattttgtatttttagtagagatggggtttcaccatgttggccaggctggtctcgaactcctgacctcaggtgatccacccaccttggcctccgaaagtgctgagattacaggcgtgagctaccgtgcccggccacaggtagccctttttatcggtgcagctgctggcatcccctgctgcaagcttccagcttccttatttgtgtttgcagcccaatcttccaggctgttctttgttagaaaataagtgatttcttgggctgctttttgttagaagggaagttctaccgaggattttttgtttccaaaaaaaaaaaaaataggcaacgtagagtagctactcacctgcataataagagattgggttgggggctgccagagatttgcgccctatgcggatggcacatctggtcctcaccggtttttcacggtctatttagatcagatacagcctccctgctagcttgtctgtaaaaatccttgccttttttttttttctgaggcggagtctcactcttgtccccaggctggagtacaatagagcgatcttggcttactgcaacctctgcctctcgggttcaagagattctcctgcctcagcctcccaagtagctgggattacaggcacatgccaccaggtctggcaaaattttcttgtatttttgtagagatgaggtattactacattggctaggctggtctcgaacttctgacctgaagtgatctgcccacctcggccccccaaagtgctgggattacaggcatgagccaccgcgcccagccatgtgcccattttttttttttttttgagatggagtctcgctctgtcgcccaggctggagtgcagtggcgcgatctcggcccactgcaagctccgcctcccgggtttacgccattctcctgcctcagcctcccgagtagctgggattacaggagtgtgccaccacgcccggctaattttttgtattttttagtagagacggggtttcaccatgttagccaggatggtctcgatctcctgacctcgtgatccacctgctttggcctcccaaagtgctgggattacaggcttgagccaccccgcctggccgtgcccattcttaagccagtcatattggctgaggaggggctgggctgattggccaggttctctcctagagatggtgtgggctgtaccacacctaaggcagtggcccaagtctgagaatggagggagaggaccctcccccttagggacctgctgttggtcagcagccagtgatcttgggtgcactgcatttcctctctgggcctcagtgccttcatctccaagctcagctcagagcatggcggtggtgtctgctgatcatattggtttagtcatcagctatttagtcagtaccttctcaggggcacagctgggggcacaggggatgcctctcagtgacgtttgagctgagactgaagagttcaggcaaatgcatctgggggaagactgcttcaggcaaaaggctagcatgtgcaaagtccctgaggaggcagagtgttcagcggagatggagggagaggaggcagcaggggcggcagggccagatccagttggccacaggaagaaatgtgggtttcatcctgtgtgtgagcgggaagccccgagcacatttgcagctgttatgatccatctggtgggtaatccctggcatgcaactgttttattcccactctggggccgggatgcctgggttcaaatcaaattctgccacttcccagctctgtgatctcgttccagttccttaccatctgtgagcctcggtttctccatctgtaaagtggcggggggggagtcattccgaagcccaactggagatgagaactcttaaaggcaccgtggggcacctggtggatgaccccaggaagctcttgcggggcttgagaatgtgtggcagg

SEQ ID NO: 8177 - DNA, 6000 bp, Homo sapiens
tcccggggaccttgctccgggccagcctgacccccgcccgggagtgtgtctccagctctgtgtcctctgcctgagctgaggcctctgtgtgtgctcggcatgggttgggcctggggtgagagtgaccgttgaatcagtagccccaaaacatcgtttctggggagccctcagctgtcccagtgtcctgggtaagtccctttccctctccacgggagaatgacagcacccacctctggtaacatattacatgcccagtgctgggcacagaacaaacgtgggagccatttggcagatggggaaacagaccccataagctcagtcaccaacacactggaggctggggtggtgcccagtgtgctgggatggccagtgctccagccaggggacacagtgggcatccagccacctccacccccacagggctggtccccgggggtcctgaggtgcagcccaagcccccagaacctggcccaactcctggcgctaagatggaaacttctccagcagccaagtctgagtcttggccagcggcccccggcctcccagaacctctgccctggagtctccacccaagaacagatcactccctttgggagcagtggcctcctggggagggcagggggccagcctccgggaggacaggggtggagcgtggtacagtcatccagccccactttgcagctttttccttacttgtgaccttaggttagtggcttgacctctctgatccctgagtttcacaaccaccacgtgggcagagagcaggtggaggtggggtgagtgttgcagggagtggaggcagtgaacgagcagaactaatttccaggcaaacaccagaaagggcaggcaggctttgggatatggttttcagccaccgctgcacggttccacccctgcctcggccttgaccctgatgccagcaggcttgaatcagtcaaagaggtcagctgcctgggccagacacggtggctcatgcctgtaatccgagcactttgggaggctgaggtgggaggattgcttcagcccaggatttggagaccagcctgggcaacacagcaagaccccatctctctaaaaaattaagaaattaactgggtgcggtggtgcacatctgtagtcccagctacacggaggctgaggtaggaggatcgcttcagcccaggaggtcaaggctgcagtgagctatgatggcgccactgcacgtcggcctgggtgacaaagtgagaccctgtatccagaaagaaagaaagaaaacaaaaggtcaggtgccttcctgctcctctctgagcctcagtttccccatatctgtgctctgggaagaccacagatcctacacacaggctgcacttgaagaaagagaggctcagtacttggcgacatccggcccgccctgcggcagcccaagtctgggacaaaaaagatttaaaaataaagcattgtaaatacccttgtttcctgcaaatagagccagcctctgagttccctggcctcccgggcagccaagcccagacagtttcttggaaaggggtggaattcagagggctgttttttgttttttttttgggggggggggatcagggtctcgctctgtcacccatgctggagtgcagtggtatgatcatagctcactgcagccttgacctcctgggttggggtccttctgccccagcctcccaaatagctggaaatataggcgtgcaccaccacgcccagctaatttgaaaaaagttttattttgtaaagatgggggtctccggatgttgcccaggttggtctcgaactcctggcctccattgatcctcctgcctcagcctcctaaagccctgggatttcaggcatgagccactgcacctagctcacagaggggtgttaatggagagtcctggtccctgggttcctttctgggatagggggtggagggatcctggaggggcccgtgtgtccctgtgcacctcagttcccggctttggtgtgggtcagcgagtgtgacagggtgtctgtcaccgcctgtcacagggggtgagatagcatgtgggttggtgacagagagagtgtgcgggtgatttgggagggtgtcaggatggaaggaactgtgttcctggtgtgaccacatggggctgagcaaggcagggtctccgtgtcccccggtgcgacggggtctccaaccacgtgtgtggttgtttcagcgtgtgtgtccctgagtggaatggctgtagctgggcgtaggtcctcgcgtccccacctcctgcgccccgccccgccccctaccttggacacgcccctagcgtctccccccaatcccagaggaagaaccaactctttcaagtcgctgttgccggggcaaccgttttacaagcgtccacatggtgggcacatgtgtgtgtgtcctgcgccccatgtgtctgctcggcccccgcccccatggcccccagccgcggcggggagggggcacaggcggtgtggggtgagcgggaggcagtggaggggcagctggtgacagcttaatgatggagggctggggtgggggtgggctcctggccctgctgtgtgtgtgcaggggtggctgtgccttccagacggggcccggggtgtatgtgtgtgtctgtgtgtgtgtgtgggtgtgtgtgtgtgtactaaccagtgccaggcagcgtgggggtgtgtaaggatctgctgagagtgtgtgtgtgtgtgtgtgtgtgtgtgtgtgtcgggctgagtgaaccccgggtctgtgggcatgagtgcattcagaagggcgtggggtaaggaaggacccccgcaggagagtgtacgcgtgaccttgtgagatactcgtggaggggttgtgtcagcgtgtgtctgcgtgtgaggacccgggggtggggcggggtgtgacagtgcaggagtgtctgtgctcactagggcgtctaggtttgtgtgagaaggaaagataggccgggcgcggtggctcacgcctctaatcccagcacttcgggaggccgaagcgggcggatcacgaggttaagagatcgagaccatcctgaccaacatggtgaaaccccttctctactaaactgggcgtggtggcgcgcgcctgtagtcccagctacttgggaagctgaggcaggagaatcacatgaacccaggaggcgaaggttgcagtgagccgagattatgccattgcactccagcctgggcaacagagcaagactccgtctcaaaaaaaaaaaaaaaaaaaagagagatggcagggggggtgaccccaccgggaataaaggtttgagggtgtgtgtttgaggttagggtatgtgtgtcactgggagtgggtttctgggagtgaacatttgggaacactagtaatggcagacattgggacatcacccccaacttgccaggcttactcacttacttattcacatttactcattacttatacaagcttgttcacactcattcagtccttactagaacacagtgaagatctactagtaataccctgttacaagtggggaaactgaggcacgggggggaaggcccaaggccacacagaacacagatccctgttaacttccatcctagatctgggaacaggctgccacttctctgacataggtccgttctctcgtccccccacccacaactcacattccagcacgcaccccgcgcacgtgcacagcaccgcgtgcatcagcccgcgtgcagcaggaggcgaggctgcgtgagtgtccccatcaccgcgcgcactgcgcggccccgcaagttttacaggcgctttgtggggacgtgcatatgttggggttagggatcttctaggaaggcctaatctgcatgcgaacccccaggctgctggaatcagaaacatgcaggcagccagggccggagtgaggaggaggccccaagaacctcagcggcgggagcgagaaaccagagcacgggggctccaagaacgcaggcggcgcggggaggagtctgcagggcgggagtttttcggtcaccccgcggggcgggggcggggccgcagcagtcccagcccagctcagccatcccagtcccgtccccgagttagcccggcgccgccagggagcgctgtgggagcgcggagccgtcggggaggagcccgggtgggtttgggctcccctgcccgtgagccttggtgccaggagggggcgccggcgggagctaggagcgagaaatcccctgcagggctctgaggccgcactgggggacttactgcttgatggggggcgctgaggacagcgggtgtcgtcatccgtccgaggggaagactttgcgtctcagttccctggaagagctttcttgggagggggcttcttcagcttctggggaaggagaacctgggacgagattggagggggacaccccaatcctcagtggggtggggggagctgtatgcgggggccacagctgttggggtgtgggccatgggtcttagttcgccagaaggggtcgggggagcgtcttggagctccggatttaggcaagaggagccgtcaggggtccccggagtgaggatgggaaacagctagtttgaggggggcgccgctctgggggcttcccttgaggggcttctttagtgaagggacttcttggcgccttgttctctggaaggggacctgggacaggtttgggaggtctggcagaaaggtcagatcctcgatagaatgtggggggcgccaagggccacaggcactggcgtcgggacagctgcggctcttagacaccttcggagggggtgtcttggggtcccggctctcccgaaggggagccgtcggagtccccggggccgggggagaaagccgtctaaagggggctctgtggttggttcccgcgcctctgccacctgcgctcctccggtcccctccggcgggggcggggagggcggggagggccggggaaacccgagccaccgcccccagccccgcccccggccccgcccccggccccgcgccggccgagccgtccgcggcgggacgggcggaggcggcgggagagcgcgccctgaagccgctccgagtgcccaggtccctctcgccgccgccccggagccccgtgctgcgcgccgaggccgcctgcgccgtccgtgcgcccccgcgccccgcgccctctgagccgccggccgtccagggcacccacccccagccccagcccccgccggcccgggatggccgcagcccgcggctaagcgagcccggggggccccatgggccggcccgcgccgcaccccgcccgcggccgccccctccggcccgggccccccccgggcaccgcgggcccaggcggcccggatggcggtcgcggcggctggggcaggggctggggccgcgcggccgccactgacgggtagtccggcgcccacagcaggtaagcaaggggcaggcggggcaggtgggggggcagcagggtacgacggggacgacctgccccatggacggggcatggagggtgctgaggactccgagtagaccaggggattccctcctgcagcagaaccagcgggtgtatgagggtggggtcagagggacgacaggtcagcgcgtggggaggggcgggggcgtgaagccagatcctaagcggctctccaagcccgaatccagccgcggtgtccctgtccgacggggcgggcgcactcctgtctcctaaaacctccaagtgtgcatctgaggaacgcacggtgccctccccagaatccccttagcctctaggagggcgagacccagacagccctttagccatgtggtctccaaggggccgttggggggcttccggatcctgcagagcccgggcggggggctgccgtcgcggtccagctgcgcacagaagtaaacatctgtcagtggcgcgttccctgctcgccgccgccgccgccggggacacggtgtcctccggtgagggccgggccctctcggctcctggagcagcccgttcagccaccagagggcgtgaaaccctttggtgttgggggtgggggtcccttaagggcaaagcctggatgtgaag

SEQ ID NO: 8178 - DNA, 6000 bp, Homo sapiens
tccctgagatccatgcttgatagggcttagcaggttctctgattcaggaagaatgaaaaataaacgcaacagggagaaaaggcagagaaagggccccgcgttcccctcccatcaccaccctgtccgcccacctctcccgggcgcgccgcacgccctcctgctccacgggccccacgccctcccgcaacccagccgtgtcgctcagcagcacaggaaatccggccaggtcgactggggtctccagcacgtcacgggtggtccctggctccggggacacgatggacacaggcttccgacctgggggagggtcagaagaagaggagagggtggagacaagggagctcctcccccaggttctaccccatgtctggagggagctttagacctgaacaactaactcaataacccagctcttggccccgcccctggcactaggccccgcccccttcccgccgcctactcactgagcaggttcactaggctgctcttgcccgcattggggggtccagtgaccactacgtgcacccctgagcggagcctctgcccgcgcctggcatctcgtagatgtgcacccagggccacctgcagtgcccgtacttcgatgtcggctgtgggtgagagaaggcaggcagagagagacagtgaggggagcctttgagggctgatatgaggtgtcttcctcccccaccaccaggtagacccaccttgctccaggaccccctcctccaggttgtcatcctcgccgaaatcgatataggcctccacgtgggccagagcctggcggggcagggagagcagaggtggtgtgtgcacccagaaacccaccttcccacacccaatttgtccagcccgacttcaggggccagaatggcggctcataggccggaagctttcacgcagggaatgaatgcgggattgagagggggtctcatgcaggggttgcacagatggggtctctgagggagagaatggacaaatgggggacttgctttggtgagggtctcggcccagccacggcagaggtggcccagctctccgtccagctgcctgagggcctgccgccgctgcgcctctgtttccgcgtggataaggtccgccagcccctccacttcggtcaggttcagcttcccattggcgaacgcccgtctggtgaactcgcctgcctccgccggtcgaagccctggcacgctgcctgcaggaaggtcccagtctgacaccccctggtccccacccaggcccattgggaggaccaagcatctcacccaacgctgcaactcacccaaggcctgcaggacgccgctcaccactgccgggcctccatgcacgtggaactccacgcagtcctcaccggtgaaactctggggacctaatgtgacagacaggtgacaggaggacagcacagccagtgcaaacccttggaagggggaaactgagtcatgggacctacaggaggctcggaacctggggaccctcacctgggaaccagagcaccagtgcgcggtccagaggctccccggagcggggatcgctgagcaggcgcaggctggcgtggcgagcaaggggcaggtctcggggtgctgtgagaattcggagggcgtggccgctggcggggccgctggtccggatcactgcgatgccgcagcggccttggccagagcttagcgcgaagatggtggcgccggagccgggggctggtgcgccgctgctccggcgcgtgcacaatctggaaccggaggggaggcgaatcagcgcacctgggaggctcagcctcagtgtcaagtagaccgagggctcgatgatcgcgagatgctccaggtgggggggttctgcggctgggggatgcacaaattggatgttctgaaggccgaagggtgaccggattagggactgtgaggccagaaggagacccagatatgggctctgccgcaagggtcatgaacgattgaggcacggaagaacgcgaatgattgctctgccgcagggaattgggcccctaaaacccagggagtgggtctggggtccaagcagcaccccaagctgtcgcaccccttcccctgtagccccacctgcgaggcccacgtgccgcttgggccgccagggtccaaagcccccgccacatggatttacaacctgcgacccgcctgcccgacctgcctgtgtggcttcaagtctgggcagggggccccgcccactccgcggcttgactagtaaagtgctcaactattctcgaccaccattgggtatcttaggatacgtcctgcccaccgtctgaagatactcgcttccattggctggtgcaagggagagcgggagcgggaggcggtatggaggtaggtgtagcgaaatgttgttccccgggcaacatgagaccaaatttttagggtcctagcgcagcgaggctgacaataggaataaggaatggaagaaaggacagagtttggcacagggcagtgcaaattacagcgaggggaggttttgagtcccgcattttccatctgctcactccgcagccttaggcgtggcaaggacctatgtgcgttcagttttcccgttcaagaaaggagggactacacctctttacgttcaggttcagaccggaaactcagagcatctcggtgaccgggagggacgagtactggagaacccacgccctgatccagggaaaatcttgcccgaacttctggaaagagtcctacttgctttttccggaactctccagattctctcccctccccagcgttcccttctgccgttccctcggcttcggatgcccttcctcatttgacaaactcgtcttcaaggcctagctccaagatcccctcctccaggaagtcttcctggaacccccagcacagccctctctccactgtggacttccttggctctctgtctctctggtccaggtctgcacctgcagagccaagtgtccggtcagtctctggctccccgaaagccagaaaggggagcctcggagattgctttcaggttaacccaggacagcactgaaactcggaataaagcgctgatggtggaattccaggcactggctgggcggggtctccgggagcgccttcgcatggcggattctctggttctggatcagagcgggcgggcggcgcacttgcgtgttaagaaaaatctgtctgacagaatagagttctaatacccccttacctcgccctgctcaatatttttatttactttattattttattttattttatttttgagacagggtctcactctgtcgcccaggctggagtgcagtggcgcgatcacggctcttgcaacctccaacttttgggctcaagggatccgcccgcctcagcctcctgagtagctggaaccacaggcgcgagccaccatgccagtctaacttttcggtgtttctttttgtttgttgtttttgtttgtttgttttgttttcgtttttttggtggagacggggatctcactacgttgcccaagcttttttttttttttttttttttttttgagacggggtctcgctctgtcgcccaggctggagttcagtggcgcgatctagactcactgcaacctccgcctcccaggttcaagcgattctcctgcctcagactcccaagtagctgggactacaggcgtgcgccaccatgcctggctaattttttgtatttttaatagagacagggtttggccatgttggtcaggctggtctcgaactccttgcctcaggtgatctacccgccttggcctcccaaaatgctgggattacaggcgtgagccactgcgcccggccgaggctttaatattttaagttgtaaaataggaacaaatgatgacatatttatatttcatctgccattctctagttgttacatctgtaacaagctagttattacatctgtaacaagctagttgttacatctgtaacaagcgtacagcaagcgcctactgtgtgctcgcattgagaaccagacctggcccctcgttcctaccctcgctgggctttcagtctaacagactgagctactcagaatagtcaggggttggccaaatgccaggtaaaacccaggtcgcccagctaaatgtgaatttcaaataaacaatgaataattttttagtactagtatgtcccatgtagacataggacatagaaacatttatgtatgtatgtatatatatgtatttgagacagggtctcgttctgtcgcccaggatgcagtgcagtgggtgtgatctcagctcactgcagccttgacctcctgagcacaagcgattctcctgcctcagcctcccaagtagctgggattacaggtgcgccccgcccagctaacatttattcttttatctgaaatttacatttaactagacggactgtatttttatttgctaaacttgacaactctatgggatcctctccgaggttacatcctgaagggagtcggtgttaaccggacgaagagtgcatgaggagtgttctaggcagccaaatggtgcgtgcaaagttcctaagcagggcttgctgtaattatgtatcacagccctactggggtggttgaagttattgtcaccaggaatcttccccaaccggcccgcccctcccacgtcctcccttagtcaacttacgcccatctcacattccaaacagcgtctccagggtccggagtttgcagatggggaaactgaggctccgaggcggggaccagaagaaagcatgggtggggacaagttggagaatgcaccatcagtgcgggcggggaccagcagcagggagcgaggtaggcgggcgagaaggaaacccagaaaacaacacgggcggagacgcgaaccaaagaactaggcgggcgaactcagctgagaaccctagagtgacgtgcatcgggccgggaaggagaatcgaggttcggctcgggcggggacgagaagcagcgctcgggcgagcgaggaccgaggccggcgcgggcgggcgcggcctttgtctcctcctcccgcgcgctccgcggctgcaccggccccatgagcccgcggctccccgtcgcccgggccgtccgtagcccctgacctgacctgtcctcgccatggccgaggccgcctccggcgccgggggcacgtccctggagggcgagcgtggcaagaggcccccgccggagggcgagcctgcagccccggcgtccggagttctgggtatgtgtgcggcggctggaccagacagggttgcaggtgcctggggagcccgcgtcaactacacggggaggaggatcagggtcaaacgtaacctggcgtggtgtctggacgaggggccggctcctcccggcactgcggctgcggcccggcgggcggggctgggacggtgcttcgggctggggtcccggcgcggagacgcggacacgcccctccgagagccccaggcttgggctgcgccctgccacccccgggctgcgggatcgcggcgggccagggatgtgcttgagagagcctctccgcgaagaatacagaatcatacggtcctgggttcaaatcccagcttgactgtgtgaccttgggcgcgtgacttaaacgctctgggcctcagtttcctcacctgtgaaatgggggtaagaaccgcacctagtccctggggctgctgcaaggacggcgctgtcataatgtggtgaagcgctcagggctgctagtgagcgccccatcgattgtggttttggaggcggagctgggcctcaagaatgagtaagatttgtaagggaggatctggggggaagggcatttctggaggaaggcctggctggtacaaggacgtggagggaggaaaataagccaagcccagagctcccggggccttgaatgccaggtggagtggtgaggagccctggcgggggcaggaggagccaagactggaggccgggtccggatcccagagtggcctgacccgggcctgctacgccgccccctagataagcttttcggaaagcggctcctgcaggctggtcgctacctggtgtcccacaaggcgtggatgaagac

SEQ ID NO: 8179 - DNA, 6000 bp, Homo sapiens
cgcttggtaagcgcctggagagggcaacgaactacacttcccagtgctcctaagcaacggaagtgacgtaagagcagccagacctggagggcttgggtaaaaatggctgaatatttagcttcgatattcgggactgagaaggacaagtgagaacgggcgctgggagtggactctcggggggtcggggccggggtactggggtcctgggtggtggggcggtgtttctggggtgcccagcttccccggccctcggttcacctttgtctttgcaccttttccagggttaactgctctttttactttaagatcggggtctgccggcacggggaccggtgctcccggcttcacaacaagccgacattcagccaggtgagacccggcacggagcctcgggggttaacggctccctggcccttccccttctggggccgtcgtcaccatgtcccgcctattccgggttcctgagtccctccccaccgcccggctttttttctcattggacctttctgcaggctcctcccaccggtcttcgtgccgttttcccgggaacttggtcgcgcccccatgcgtacaggctacacacggcggctgttcatctttgccagtcccttccatcccgctgttcatccttgccagtcccctccatcccttttctggtttcttaggggcaaaggatcgccgatgcactcatgatgcttaggctggggtgtaaggttccacccccaaccttcatgcctcactctctgttcatgcagccctgccctctgagctcaggccccgccccttttaaattctgtgcagaccatagtgctgctcaacctgtaccggaatccacagaacacagcccaaactgcagacggatcacactgtgagtaagggaccaggcctgggggcaaggtgaacagcccccagtaggctacactctgattccaccctgcccgcccccaccccaggtcatgtgagtgacgtggaggtgcaggagcactatgatagcttcttcgaggtgagggttggtaggggcagatggggtttcttgtgggagctcagctgagttcctccccgtcttccacaggaggtgttcacagaactgcaggagaagtatggggagattgaagagatgaatgtgtgcgacaaccttggggaccacctcgtgggcaacgtctatgtcaaggtgcttgctgccccccacttagggcccagaagtggaggcgtttcaatgcctgatggtggccactgtaggctctcagcttgaatttcatcactaaatccagtccagccccagagcgggtagtgagtcccctgaagatctctgagttctcctgctgaccctgactgacatttcctgcagttccggagggaggaggatggagagcgggccgtggctgaactcagtaaccgctggttcaacgggcaggctgtgcacggtgagctgtctcctgtcactgacttccgggagtcatgctgtcgccagtatgagatggggtatggtagttcaagggtgggatgggcacttggaatcccagactttgaatgcgtggtaggggctgtcagtgacaatggcttcctccatctctctaccctctatgcagggaatgtacccgaggtggcttctgcaacttcatgcatctgcggcccatttcccagaacctccagaggcagctctatgggcggggacccaggcgcaggtacctcaggaccagcctgctatgtctcctcatgtcctaaggcccctatatcctcagatgagcctaaccctaagccccagtaaccacgttcccaagaatcttttttttttttttttttttttgagatggagcctcactctgttgcccaggctggagtgcattggcaccatcttggttcatggcaacttccgcctcccgggttcaagcaattctctgcctcagcctcccaaatagctgggattacaggcacctgccaccatgcccggctaatttttgtgtttttagtagagatggggtttcaccatcttggccaggctggtctgaactcctaacctcgtgatccacctgcctcaccctcccaaagtgctgggattacaggcgtgagccaccactcccggctgactgttttttttttttttttttttttttttttttgagacggagttttgctcttcttccgcaggctggagtgcaaaggcgcagtcttggctcagtgcaacctctgcctcccaggttcaagcaattctcctttctcagcctcccaagtagctgggattataggcacctgccaccatgcctggctaatttttgtatttttagtagagatggggtttcaccacgttggccagcctggtctcgaactccggacctcaggtaatccacccatctcggcctcccaaagtgtggggattacaggcgtgaaccactgcgcccggtcattcccaagactcttataccctaagagtagttctgagctccatctggagaccagtacctaagtcccaatccccaaaccagcctgaacccctaatccacgaccagcctggattgccacccctgatactggccactgagttcccctgatactggccactgaggtcgtgtcttagaactctagttatttcagcaccctcctgcctcatcccagagcagagaggcaggcctgcaggatctctgcaccactcctcagggttctaacagaactctcaacgctcctattcccaggtcacccccgaggttccatactggccaccatccccgagagaggaaccatcggtgttcccctgatcactggcatggccgcttctgaggccctggcccccttacccttcacccccaacagggacagatgttcctggcaggacctctcctcaaagcccccttcactctcctgccccatccttcccaggctcccgggctccataatgtaatctgttcagcatggagaccttcttctaccgcccctgtcttaataaagctgcgtgtttcacttcggcatcaacttgcttttgctgtggtttggcatttccctccacccacacatgtgacgaaaaggggaaacaagactgggtcctggccacaacttcagctgaggaacttggcacggccagcttgggacccaggaccctaacggtactggtagggtggggacacctttgtgctgaaaaccttagcacctccatctgaggcttattcaagggggagagacctggttgtggcaggtgggaggagccctagccccaaggagattaggattcaaaggtgaggtgaggtgctgggaggtggtctccagccagtatggggctgactcctccgtgcctgccgaattgtgatgggagttagtaatgccttacacttaaacactgagtttactgtatgtgaggtgctgttttcagcactttagtttgtttttgttttttttaaggagtttcattcctgttgcccaggctggagtgcaatggcacgatctcagctcactgcagcctccacttcccaggttcaagcaattctgcctcagcctcccaagtagctgggatttacaggcatgcgctaccacgcccggctaattttgtatttttaatagagacagggtttcaccatgtaggccaggctggttttgaactactgacctcaggtgatccacccacctgggcctcccaaagtgttgggattacaggcatgagccactgcgcccggcggccagttttttttgtttttagagatgaggtcttgctgtgttgcccaggctggtctgtaattcatggctcaagcaatcctcctaccttggcctccctagtagcagggactacagacgtgagccactgcacttggcaaagtgctttgctgttttttttttttttttttttttttgtaaagatggggtttcattttgttgtccaggctgatctctcgaactcctgggctcaagtgatcctcctgtcttggcctcccaaagtgttgggattacaggcatgagccaccacacccagcccctgctttacttctaatgacggttctaattctccacaataaccctatgagacaggtgctatcattgtcttattttagggatggaaaagggagggtgggtgggtgaggacacggcagaggtgggatatgcattcttgcaatctagatccgcagccctgttagtcccctagtggccttgtgggcttctctgataaccggctcagttgggggatgagggctcgggggtagattcccggcttccgaagaggcgtgagaattctgttcccccacatcaccgcgtcctttcttctgcccgatttccccggaaagtgtagcagaggcgctgtgtttggaagtcccgctatcacggccccccagatggggcctggacgatgcctcctgacggccttgttgcttctggccctggcgccaccgccggaagcctcccagtactgcggccgccttgaatactggaacccagacaacaagtgctgcagcagctgcctgcaacgcttcgggccgcccccctgcccgggtgagaatccgagaccgagccttgcttgggcggagcttgcaggtgatagggagcggggaaggggcgaggtctgtgggctacgggccagagaggcttgcttaggggtctaagcggtgggccttatgcagatcagacagggatggcaggcagagcctgtgcagatagtgcgggctaccgtagggcaacagcgaatggatatggctggagaggcgggataggggccgcgtggaaagggtgggctttatgtagagaagccgggagtgggcggagcttcgtgcggagcaggctggaggggggtgaaaaggcgagcccggagaaaagtgacaagaccggggcgcacgctaataggctggaagcgtcctggaggggcggggcacgctgggatagggcgaagggagagggcgttgcccgcgcaggggcgggctaggcggccgcactggagcgcagctttcccgctagactatgagttccgggaaaactgcggactcaatgaccacggcgatttcgtaacgcccccgttccgaaagtgttcttctgggcagtgcaaccccgacggcgcggagctatgtagcccctgcggcggcggagccgtgacccctactcccgccgcgggcgggggcagaaccccgtggcgctgcagagaggtgcagatgggactcccggcagggcaagggcgtgctggaggtggggggcctagatgtagggagccggcgtagccccacgtaaggggtggggccgtggtttcaggaggtggctggcctgcaggggtcgggaggtcctaggttaaggtagttgggccttgcggggcccaactaccttatcagataccgtatcagatgggatgtggccccattaaaggatataaagttgggaggtttgggagcgggcaggagtggagtgtggcctccagctttactccaaccccttatccccagaggccggtccctgccaaggggcactgccccctcacacctggaaacccaggcgcccctagctcccaggagcgcagctcaccagcaagttccattgcctggaggacccctgagcctgtccctcagcaggcctggccgaatttccttccgctcgtggtgctggtcctgctcctgaccttggcggtgatagcgatcctcctgtttattctgctctggcatctctgctggcccaaggagaaagccgacccctatccctatcctggcttggtctgcggagtccccaacacccacaccccttcctcctcgcatctgtcctccccaggcgccctggagacaggggacacatggaaggaggcctcactacttccactcctgagcaggggttagtcctggaggagccccggggcagggaaggtggactggacgcccgctcttccgcacctttacccttcccctttcttccagaactgtccagtctggcgtcacaacccctgtctcgcctcctggatgagctggaggtgctggaagagctgattgtactgctggaccctgagcctgggccaggtgggggtatggcccatggcactactcgacacct

SEQ ID NO: 8180 - DNA, 6000 bp, Homo sapiens
ccaacatggtgacatgctgtctctactaaaaatacaaaaaattaccctggtgtggtggtgggcgcctgtagtcccagctactcgggaggctgaggcaggagaatggcttgaacccgggaggcagaggttgcagggagctgggatctcgccactgcactccagcctgggcgacagcgagactccgtctcaaaaaaaaaaaaaaaaaaaaaaaaaaaaaaaaaaacagaagtagaactcatagccaggcatggtggctcacacttgtaatcccagcagtttgggaggcccaggcaggtggatcatcttgaggtcagggcaatatggtgaagaccagcctgggcaatatggagaaaccccttctctactaaaaatacaaaaaattagctaggcatggtggcgggcgcctataatcccagctactagggaggctgaggcaagagaatcacttgaacccgggaggcggaggttgcggtgagccaaggtcacctgggcaacagagagagactttgtctcaaaataaaataaaataggccgggcacggtggctcatgcctataatcccagcaatttgggaggccaaggtgggtgggtcacaaggtcaggagatcaagaccatcctggctaacacggtgaaaccctgtctctactaaaaatacaaaaaattagccgggtgtggcggcgggtgcatgtagtcccagctactggggaggctgaggcaggagaatggtgtgaacccgggagacggagcttgcagtgagccgagatcgcgccactgcactccagcctgggcaacagagcgagactctgtctcaaaaacaaacaaacaaaaaaacacaaaaaacaaacaaaaataattattaatttaatttaatttaattagataaatgtggaaggggaagacccaggaagggtaagttttgggagtaagaaggatattattattagtattagtattagtattagtattagtattagtattagtattagtattttgatgctctgtcacccaggatggagtgcagtgttgtgatctcagctcactgcaacctccatctcctgggttcaagtgattctcgtgccaagagtagacgcagggtttcaccatgttggccaggctggtctcgaactcttggcctcaagtgatccgcgtgcctcggcctcccaacgtgctgggattacaggcgtgagtcaccatgcccggccaaaattttttaagtattattattattttttttttactttttaaaaaatgtatagagatgaggtctcactgtgttgaccaggctggtctcaaactcctggccccaagcagtcctcccatctcagcctcccaaagtgctgagattacaagcatgagccactgcatctggccaggtatagatgacgcttaaagctctggggctgaggccaggtcaaagcaccccagtgtttagacaagtgcttctcaactgggggcaactgtgctgctgctgcacccccaggagacacatggcaatccctggagacatgttgttgtaactggaaggtgctagtcggatgtcgtgggtgggggccagggatgctcctaaacaccttaaaatgcacaggatccatcgtttttgtttattttacagctcaagtgcagtggcgtgatctcggctcactgcaacctctccctcccaggttcaagcaatcctcctgtctcagcccccctagtagctgggattataggcacgtgctaccatgacagactaatctttgtatttttagcctcccaaagtgctgggattacaggtgccagccattgcacccagcctccgcactcttgaagaaccagaaagccaatggtcctcccttctcaagaaaacaagagttggccaggtgcaatggctgacatctgtaattccagtattttgggaggccaaggtgagaggatcacttaagctcaggagttcgagaccagccaggtcaacatagcaagactccatctttacaaagaaaaaaaaagaggctgggcgcggtggctcagacctgtaatcccagcactttgggaggccaaggtgggtggatcacaaggtcaggagatcgagaccatcctggccaacgtggtgaaaccccatctctactaaaaatacaaaaatggctgggtgcagtggctcacgcctgtaatcccagcactttggtaggccacggcgggtggatcacaaggtcaagagattgagagcatcctggccaacatggtgaaaccccgtctttaccagaaatacaaaaattagcctggcatggtggtgggcacctgtagtcccagctgctcgggaggctgaggcaggagaatcacttgaacccgggaggcagaggttgcagtgagccgagattgcgccactgcactccagcatgggcggcagagcgagactccgtctgaacaacaacaacaaaaaatacagaaattagctgagtttggtggcgcttgcctgtaatcccagctacttgggaggctgaggcataagaatcgcttgaatccaagaggcagaggctgcagtgagccttgtcgtgtggcaacagagcgagactctgtctccaaaaaaataaaaagagtgaggaaagatggtgctgggccttggaggaagaggaacatatctcctgggcccagaataaggaaggaccacaggccagggacttctggatcttcatgagccaggcaggagttgtcaaatgttaacaggcatcagagtcactggaggacttgttaacttggaagacttctcctgggccccacccccagggcttctggtgcaaaaggggtggggacaaggatttgtatgtctcacaagttctcaggtgatgctgatgccagacctgggaccccaggttaagaaccaccgggctgcccgggtgtggtgtctgacacctgtgatcccagcactttgggaggccaaggcgggcagatcacgaggtcaggagatcgagaccatcctggctaacacggtgaaaccccgtctctactaaaaatagaaaagaaaattagccgggcgtggtggcgggcgcctgtagtcccagctactcgggaggctgaggcaggagaatggcgtgaacctgggaggcggagcttgcagtgagccaagatcgcgccactgcactctagcctgggcgacagagcgagactctgtctcaaaaaaaaaaaaaaaaaaccactgggctgaagaattaagacttgttggtcctgggagaggaagggcagtggaatataaaatgttaaatctttaaagaagaagagggtcttgataggactgagtgtgtatggaaggctgcgagctcctggatccctgaaggagacagaggcctgtagcctcctccgccttccggagctagggtcatgggtctgagtggggagggcctggggcctggtctcctggatctgagggaggagggaggtggggtctggtctcctggatctgagggaggagggaagtggggtctggactcctggatctgagggaggagggaggtggggtctggtctcctgggtctgagggaggagggactggggcctgatctcctgggtctgagggaggaaggggtggggtctggactcctgggtctgagggaggaggggctgggcctgcacttctcggtctgagggaggaggggctggggtcctggactcctggatctgggggcagtgggcactggggacctggactcgtaggtcctgactcccagcctcctcctcaggagcgcctggaccatgctgctgagcgcctactggcacggcctccacccgggctactacctgagcttcctgaccatcccgctgtgcctggctgccgagggccggctggagtcagccctgcgggggcggctgagcccagggggccagaaggcctgggactgggtgcactggttcctgaagatgcgcgcctatgactacatgtgcatgggcttcgtgctgctctccttggccgacacccttcggtactgggcctccatctacttctgtatccacttcctggccctggcagccctggggctggggctggctttaggtgggggcagccccagccggcggaaggcagcatcccagcccaccagccttgccccagagaagctccgggaggagtaagctgtcacgacgctccctctgccagctggtcccgggaattctgtgaaccaggctgctgtctcctccccagaaagagtccttaccttggagagggtcctggagagaatttcctcttccccagctaaataccctgcctgcaactgaagcagacccgggggtgtcctccctgccctctgcccagaggccacctccactcctacaaaatcaaagtattgtccagacaagagtcactggcccctgctccagcttctgggtatccagagagcactgcacttccccaaaacggaaggggcccctgggcagtgggttttgggcaaattccctttctttgcatccacaatgtggggtcggagcttgggggcaggtcctgggagtgggaagcctcttccttgtgtctttcgctccacttttagctcatcgcaccaatattgcagacttggaaggaagcataagcttcccatttcacaaaggggaaactgaggtgcgggtgcgcgggcctggggacggccgtcccatggcttccatctgagccacctcgggaccccagcgctcctggcgccctcttctcatcgcttggcctatgacaggtcaccgtgtgtaaatctttcccaataaagtgttgcacaaaggcatcctgtccgtgcaggtatctgggtgataaacggtgggaaggacttagtccaccaagtcccagggtgaggtacagcccccccgcccagcccaggaaccaaactgtcaggcccggggcaccacggggacttcagctcccaggagacctttcgcatcagcggccctgagaaaccacaggaagtgtaccttactccctccgggccacctgctggccaggtacacacctgcccctggcccctcccttacctggggcagtgtctgcctggtggccactagagacagcccagcctgggccatggaagaaaacccgaccttggaatcagaagcctggggctcctctagggggtggctggccccccgggaggccagaggaggtagggaatgccaggagaagctcagatccatccgaccttcaggctaggtgggagtcctgctggaggaggaaaggggaggcctggcctcctgagtctgagggctaaagagagaaggttccacttcctgatattatgggggagaagggaactggaggctggaactccagggtctgaggaggaggagcctggagaaccaggctagtctgggaggaggggagggctaagggctgggagtttgggtgtcttgggaataggagaggctgggttcccacactcctgagctagagggaaaaggaagttgaagcctggactccactgccctggagtaggagggttccacgcttggggatggagttgagggctgtggacccctgggtccaggggaagtagaggctggcacccggactcctgggcctgagggaggaggggctgggaacctggtttcctggtctgagggaggaggggctgggtgcctggattcctatgtctgagggaggaggagccgggggcctggactcctgggtctgagggaggaggggccgggggcctgttctcctgggtctgagggaggaggagccgggggcctggactcctgggtctgagggaggaggggccgggggcctgttctcctgggtctgagggaggaggggccgggggcctgttctcctgggtctgagggaggaggagccgggggcctggactcctgggtctgagggaggaggagccgggggcctggactcctgggtctgagggaggaggagccgggggcctggactcctgggtctgagggaggaggggccggggacctggtttcctggtctgagggaggaggaattagggcccagactcccgggtcttcccagccccctgctcctccccaggcccatcgctgtcttct

SEQ ID NO: 8181 - DNA, 6000 bp, Homo sapiens
cacccaggctggagtgcactggtgcaatctcggctcactgcaacctccacctcccaggttcaagcgattcttccaactcatcctaccacatagctggggttacaagcacacgccactgcactcgctaatttttgtattattagtagagacggagtttcgccatgagccaccatgcctggttcctccaattttcattgacagttacttccttatcacatcatatgctgttcattaatgatcaagacccccaggatcacagcacattctcaacggcaggttcagggctaatgatgtcttctaagaagcatttgaaggcgcaaggagctcacctgatttctttcaagcctttgttaattcactggacagaccctgattaaaggtaatggcctggctagcctggtaatggtagctcatgcctgtaatcccagcactttgcggggctgaggtgggaggatcgcttgagcccaggagtttgagaccagcctgggtaacacagtgagaccccatctctattttctttttgaagtttttaattctttattatataataaagttaaaatatacatatatatatatatatatatatatatatatatatatatatagtaatggccctcaaacttttgcaggcaccaggatgacctgaaggactttaagcagctcactgctgggccccacccttggagtttttgattcagttctagggtgggtccaaaaatctgcatttcaaacaaaagagcatcacatgatgccgatgctgctggtccacaaccatcctttgagagccagtgttttgactcactccctaacacaggctcttaacttgtggtccagaaattcctgacactatagatacataattttttttttttctgttcccagaaaaaaaaaagtcagtaacatctgacaggagggtgtgtgacccactgttataagtaaaatgtttgtttagagacagaacgcttgtacctctgtactgtaaggaaaaattagcatttggacaaaaagttttcttagcaagacaattttactttctgaagaaagggtgctcctcgcagatggaacaatggcgagagcagagcacacctgaacaaaggagggaagcaatttttttttaagacagagtcttgctctgtcgcccaggctagagcgcagtggagcgatctcagctcactgcaagctccgcctcctgggttcacaccattctcctgcctcagcctcccgagtagctgggactacgggcgcccaccaccactccaggctaatttttttgtatttttagtagagacggggtttcaccttgttagccagtatggtctcgatctcctgacctcgtgatccgcccacctcagcctcccaaagtgctgggattgcaggcgtgagccaccgcgcccagcccacgaagttagtttttaaaagaaactaatacttctaacacttatgatttattctttaatacccaccaaaaattaagagccattgttccttactcaaaagttgctaataggagagaagcttctagagcaagttggccagacaagtcaagtacaaactgaagagtaaatcaagctttgctaacaatttcagaaacatttattgggtcccaaagaagttgcctcccaatttcccctctgccaacagctgatagctgcatccttggcatctgcctcctggccttggcaggatccatttttatgatttacaatgcatcatcaaccagaaatacaatgagaaccacctgccagtctcccaaatactatctgcagccactcatttaactctcctggctagctccacgtgggccgtctgaactctcttagaagaatcatctctctgctcaggcaccgggagcaaggggcatctgtcgctctgcagaacggaggggaccaggcctgatgaacaccatcctgggcccagaaacctgggagggtaaagagaactgccaggggtgaagtcaaggatgggaaaaaggcctccggggcagagtcctgaaatgtcagaagtacaccaaagaggaaacagcatcacgttattgctgaggcagggcctcattctgttgcccaggctgcagtgcagtggtgacaccatggctcactgcagccttgatctcccagtttcaagtgatcctcctgcctcagccttccaagtagctgggaagacaggtgcatgccactgtgcccggcttttctttctttctttttttttttttttttgtagagacagggtctatgttgaccatactggtttcaaattatgctcctgcctcagcctcccaaagtgctgggattaaacatgtgagacaccgtgcccagcccacatggcctcatttaaatcccacaacaactctaataagacactaatatgtccaggtcacagatgagaagagggaagccaaaggaataacttgctgaaggttatggagctaggataggaccccacaaggtcttgctctgggggcctgcatcagtaaccagtactcaacatcaaggaaaggccttggggccgggcgcagtgactcgcacctgcaatcccagcactttgggaggctgaggcgggtgaatcacttgaggtcaggagttcgagacgagcgtgggcaacatggtgaaaccctgtctcttctaaaaatagaaaaattagccagccacggtggcgggcgcctgtaatcccagctactcagggggctgaggcaggagaatcacttgaacccgggaggcagaggttgcagtgagctgaaatcgcgccactgcactttagcctagatgacagagtgcaacttggtctcaaaaaaaaaaaaaaaaaaatcttggagcagcgttggagaagctccctctgtcccctctctactggctgctgcccctctgaaatggcctttcccttcccaacagatccttgagatttgtttagaagagtctggagagtgagcgcagaggctgactcactgcgtgaccttgctctgccagttaggagataaccttcccatagatgccactttccacatcagtagtttttttttttaagggaaggggagctgggggagaaggcttttggggccttcctactgtaaaagctcaagttccttacactcactgctttctctctattacatcatcctgctccctccccacccccaaggctcttagtctgaaatgatctaatttctaccaccggaatgacttgttctctacagtattctcagaacttgctacgtggtaggaggtcaagaacacactgaataacccacctcttcccaccctcctaagcctcctgtcccatccatgctctactatttctcgtaattattgccttctaatacaatatcgttactaaacatctttattgcctgtctcatcctgccaaaatgtaagctccaaggcagatttattttttaagagacagggtctcgccatgttgaccaggctggactccaggtttccaacaatccttccacctcagccgccagagtagctgggagtacagcgcgcgccaccatgcccagcttcaaaggcagaaatttttgtctgttttgttcactgccatatccccagaacctagaacactctctggcaaataataagcaatcaagaagtatttgtctaagaaaggaatgaattctgatcccagtgaggctcgtaaccagacggcagagcgcctggggcgaggaggtattacaaaactcgtgccaagtaaggagaaaactaacagcgccgtaacactactcaggtccctcccggccccggatttctatgaccggcgttctaaagtggataatcctaggctcatcgggttcaactcctctcatctaacggatcctaagaaatccgaaagggagaggactttggctcaaggttcccaagctagtggtgagcagacaaggattcgaactgcacccttcgagaaacttcatgtctgaaaaagttgcgaaacacaagggcgctcaagtgatcccacggttcagcccgctgcttgcacaggtgggaaacctgaggccgaggcggggactcccattacctcgataatcttgataaagcgcgggaacaccgggttgcgggtgatggcgatgagcggcaggtgcggaaacacatcggggatcgtcatgggcgtgagcgccgttatgaccgggccttccccggcgcccgcgctgccccccgcgccgccggctccttcctccgcgccgccctcggaggcgtcctcgccccccgagaatgcgcctccgccgcggctgctcgcttcccaaaacccccgccattggcccccaattgccgggcctcggccccacagtgcccaaggaggagaggcgtcgcaggtccgctggcctcggagcaaccacgctcctgctgcagtgggaacccgccccccggcggcggccagcatcggccgccgcagcacccagcaccgcgccgctccccacagtcgcacgtagccagtgctcgccgccatagcccggccatactggcggctcacacaactcgcgtcatttccgctcgccgcgaaacgcacgtgacgcccggcgcgtgcctcggtacccgatgggcgcgtggctcgaaacagccgcttcagggagctgggcctacgcggagaagagggggcggagttcgagcatcggatcgtctccgcctcttccggtctcccactttatgcgctgaaggccttttccggtcacgtggaaggctgtgagcaggcgccagcgcccgtacaaaacactggtagtgttgcaaacgcaacgtttaggaactcatgagcagcctgtgcacatgcttaggcgcgcggacaacatgcgcatgctcagactctagactggccacgggtggccgggtgcgcatactcaggctctgagcgcactttggggtgcgcggattcgggcttcccgggattcgtctgcgcatgctcaagattcaggcggagcgccgggctgcagtgcgcggaggcccgctcccgggactcattgatgcgcatgcgcagggcttcagcctgcacgtactcggattgtgcagcgactccccgtggcggttgaggggcagtggtggcggcggaagcccaagtcgatgctgatgttgatgctggtggcggctgtgaccatgtggctccgaccgctggtcacagctcagctctgtcggtggggctgccaggactcctggggctggggtgctgccgggggtcgggagggtgctggttcatcttggagccgaggcctgctccccaacctcactgaggctccccttttactctttttaggaatcgaacttgacgcctcgctcaccctactccaccccatcctcccagcccgatattaagctctcctacctctttttttttttttttttgagacggagtctcgctctgtcgcccaggctgcagtgcagtggcgcgatctcggctcactgcaagctccgcctcccggattcacgccattctcctgcctcagcctcctgagtagctgggactacaggcgcctgccaccacgcccggctaatttttttttgtatttttagtaaagacgggggtttcaccgtattagccaggatggtcccgatctcctgacctcgtgacccgcctgcctcggcctcccaaagtgctgggattacaggcgtgagccaccacgccgggcctagccctcccacttctttttctttttggagccggagtttttgctctgtttcccagggtggagtgcagtggcgcgatctctgctcactgcaacccccgcctcccaaagtgctgggattgcaggcgtgagccaccgcgcccagccttacccagcacattttgaaatttcagtaaatgttaggttagtgcatactccaacctgccatggggaccagttgctgaaactccgttcctgccctcagggaactcccatctggactaaactgtcacattcagtagggacctgtgagctgtattcttagggtgtatggcctcatttgatgtttacaggaagattcataatgattccttaaccttattttattttatttattattattttttgtacagatgggg

SEQ ID NO: 8182 - DNA, 6000 bp, Homo sapiens
aggtggcccccgagaacagagaggcccattgttcatggctgctaatcagccctgcctgctgggccccctccgccaatggccccccgatttcctgccctccaccagagctctaggtggggagagtctgaagctccaaggcctccagggggtcctgtgaccaggccatgctggggctaggcccttggtagaaacagaccaccacagcccaagacttgttccaatccaatggggaaactgagtcacaccactccaagacttgaatgtgtgggcaagcagggtggagggggtccagagaggtccggggcccgggtaggtttcctgcctgtctccccctcctaccaccagcattcaaatgctggctctatgaccttggacaagtcacttcccacctctggacctgtttcccattcatgcagtggggataagggtattacttgcagccaggcgcagtggctcatgcctgtaatcccagcactttgggaagccaaggcaggaggctcgcttgagcccaggagttcaagaccagcctgggcaacatgatgagacatcgtctctacaaaaaatataaaaattggtcaggtgtggtggctcacgcctgtaatcccagcacttggggaggccaaagcgggtggatcacctgaggtcaggagttcaagactaacctgaccaacatggtgaaaccccatctctactaaaaatacaaaaaattagccaggcgtggtggcacatgcctgtagtcccagctacttgggaggctgaagcaggagaattgcttgaacttgggaggtggaggttgcagtgagccgagatcatgtcattgcactccagcctgggcaacaagagcaaaattccatctcaaaaataaataaaaattttaaaaaataaataaaaattggctgggtgtggtggtgcatgcctgtggtcccagttacttgggaggctgaggtgggaggatcacctgagctgggtaggttgaggctgcagtgggcgctgtgattgcaccactgtactccagcctgggcaacagagtgagatcctgtctcaagaaagaaaaaaaaaagtgggggtattacctgcttcttaggacgcttgtaaggttggaatgactatatctgtgttaagtttgtaaaatggggttggacataaagtaggtgatcattaagaataaaggggatgatggccaggcacggtggctctcgcctgtaatcccagcactttgggaggctgaggcgggtggatcacaaggtcaggagatcgagaccatcctggctaacatggtgaaaccctgtctctactaaaaatacaaaaatttagctgggcgtggtggcagacgcctgtagtcccagctactcaggaggctgaggcaggagaatggcgtgaacctgggaggcggaggttgcagtgagccaagattgtgccactgcactccagcctgggcgacagagcaagactccgtctcaaaaaaaaaaaaaaaaaattgccgggcacggtggctcacgcctgtaatcccagcacttttggaggctgaggtgggtatatcacaaggtgaggagatcaagaccatcctggctaacacggtgaaaccctgtctctactaaaaatacaaaaaattagctgggtgtggtggcgggcgcctgtagtcccagctactctggaggctgaggcaggagaatcgcttgaacccaggaggcggaggttgcagtgagccgagatcgcgccactacactcagcctgggcgacagagtgagactccgtctcaaaaaaaaaaaaaaattacttagacatggtggcacattcgtttaatcccagctacttgggaggctgaggcaggagaatcgcttgaacccaggaggtggaggttacagtgagccgagatcgcaccactgtgctccacactccagcctgggcaacagagtgaaactctgtctcaagaaaaaaaaaaaaaaaaaaaaaaaaaaaaaggaataaaggggatgggtttgacatctgacaaaatgctgctgctgccatccgcttctgcaaaacctcaagaatgaaatgtccttcccatggcccacacgaggccctgcacgagctgcttcatccccttccaaacctcctctcctctctcttcccctcctcactctgctcagacacacgggcctcctcactgttcctccaacacgccacgtgtggtctgccccagggcctttgcacaggccatgcctctgcctggaacacctgcccccagattctcctatggctgacttctcacacttgggtcttagtgcatgcatcacctcctcagggagggccccctgcccacccccagtgaatctagccccattcaggacagtcatctttattatgcactgattgtatactaagcccagagacttcaactgtggtttctttttcatcctcccaataaatccatccatccatccgttcactcagacatgaaattctggaccctccaattcaggatctgggccacccagtgcctagcttttttttttttttttttttttttttttgcgacagagtttcattctgtcacccaggctggagtgcagtggtgcaatctcagctcactgcaacctccgcctcccgggttcaagcgattctcctgcctcagcctcccgagtagctgggattacaggtgtgccaccacgcccggctaatttttgtatttgtagtagagacggggtttcaccatattggccagactggtcttgaacacctgacctcaggtgatctgccctcctcagcctcccaaagtgctgggattactacaggcatgagccactgcacccgtcagcctagcttctttgtgttcattcattcattcattcatcattcagcaaatgtctatgagcgcctactctgagccactgaaccagctgggctggccctgggggagaatcgacttcccctgcaaattcactctcatcagatccccaggctggtctaggatttgtttagatgccctcacgttggggaactcattccttactaagaataaccaccaccaataccaaacagtctcaagtaccaccaatagtgctgagttctcagggtgactacagcatctgctcccaagcccagcccagcccatatggtgtgtgctgtgtcaaagaacctgggttcaaatcccatgtccttttctaacccttggacaagcccctacccattttgtgcctcggtttccctagctgtaaaatggagatagtagtgcctctcttgtgggctcagcaccaggcctgttacacagctggtgcttaataaatgtgtcctgttacttaaggtctgatatgtgtagctcctgtcgtcgccgtccatgggggtgagtggggtggggaaggggtggtttgagtttctgcacatcaggacacgaggcgcggtccatgcaaatgaaatgcaaatcccatgcaaataaatctctgggtggtgcagggcagcgtgcaaggctggaggtacaaggtgcacgcatttggggggcgcctgggaaccccatgagccgagcccaggcccggaggtgctgacccgcatccagcccggctttcagtgctcggtgtaaatgtttacacctggccggccgccaggctccacgccgccccacactaggcagccgggagggggaatgtaaactcgggctgggggccgcgggacgctcgggaggagcccagacggcgtcgagtgtggtgggcgtgtacacgtgagttattaaacaccgactgtatgcagtgaggaggatgccaccaggcactcacagcaccaagtaactggtgcccgaatgggtaaagctcagggcattcctgggggcccactagcgcccctgcaccagccagaggttgaagtgaatagggtaggcagccatggaaggctccctggaggaggcaccctccaagctgagattgcaaggggagtgagagctaggtacagtgactcacgcctgtaatcccagctctttgggaggccaaagtggaaggatagcttgagcccaggagtttgagaccagcctgggcaacgttgtgagattcccctctctattaaacaaaaacaaaaacaaaaaaaattaaaaattagccaggcacggtggctcatgcctgtagtcagtcctagctacttgggaggctgaggtgggaggatcgcttgagcctaggaggtggaggctgcagtgagctgtgatcacaccactgcactccagcctgggtgacagagcaagaccctgtctcaaaaaaaaagaaagagagagagagaaagaaagaaaggaaagaaaggaagagaaaaagaaagagagaagaaagaaagaaaaaggaaagaaagaaagagaaagagagagaggaggctgggtgcggtggctcatgcctgtaatcccagcactttgggaggccaaggtgggcggatcacttgagttcaggagcttgagaccagcatagctaacagggagaaaccctgtctctattaaaaatacaaaaattagccagtcatgctggcaggtgcctgtaatcccagctactcggggggctgaggcaggagaatcgcttgaacccgggaggcagaggttgcagtgagctgagattgcgccactgcactccagcctgagggacaagagtgagactccatctccaaaagaaaaaaagaaaaagagaaagaaaggggagtgggagtggggagggagggaagaagtgttctccatgcaaggacctatctgtgcaaaagcccagagctgggactccatgtccagggcagctctggtccattgctgcccacttctgggcctgcttatccatctggatgggaaacaggctcagagaggggcagagtcaatggaggacaccagcatgtagggaacagtgtcagccccagattcctgcctccagactgtcctaaacaccaccctccccgcgcctttgtcccacactgccacctgccgggaatgacctctcctcctttcactcttccccctggctcctcagctgcagccgctccggcctccttgctgttcctgggatacgccacactcagtctggcctcggggcctttgcactggctgtgtcccctgcctgtgatgccattctcctctgcctggccaactcctacgtttattcaagtctggaccttgtcatcggctcctcaggaaggcactccgggacccccagatgggggcggttccctgtgactcctggcacggaggccaaccccttccttgttcaatggttccttgagggaccattcccatgtgattatcgaccattcggcaggcgttcaaagtcaaaggccccacactgagtcctggcccagcgccctgtgcccgttggctgctggagggacagacggggcgtgcggctgaccatcccgtgcccgcaggctgaggatgcagcgctggaaggcggcggccttggcctcagtgctctgcagctccgtgctgtccatctggatgtgtcgagagggcctgcttctcagccaccgcctcggacctgcgctggtccccctgcaccgcctgcctcgaaccctggacgcccggattgcccgcctggcccagtgtaagctcctcctctgtgtggggtcagatacccccaacgtaaggggtagaatttcaggcagtggagtgggaggtggtgggggggtgtcataggttttttaaagatagggccagccagcccccttgcagggaggcagggacagacatcctaaaagattattcagggcaaggcatggtggcgcctgcctataatcccagcactttgggaggctgagacaggaggatctcttgagcccaggagttcatgaccagccagggcaatgtagcgagaccgccatctctacaaaaaacttcagaaattagccaggtgtagtggcgcacgcctgtagttccagctacttgggaggctgaggtgggaggatcacttgagcccaagagttcaaggctgcattgagctatgattgcaccactatactccagcctgagcaacagagcaagattctgtctcaaaacattataataataaatacatt

SEQ ID NO: 8183 - DNA, 6000 bp, Homo sapiens
tgggttcaagtgatattcctgccttagcctctcaagtagctgagattacaggtgcccaccaccatgcccagctaatttgtatttttagtagagagcgggtttcaccatgttggccaggctagtctcaaactcctgacctcaggtgatccacccacctcggccttccaaagtgctgggattacaggcatgagccactgcacccagcgcccccagggtttagaatagagcatggaacacagtagacgttcagtaaatgtctgttgatcagtagccacatgtgcacttagatacagcaccgacgtgcacatactgcacatgcacacacagctatacacagccacgtgcacacacagagtacacaacccacctaccacggccacatggagacaccacatccacagacacacccatgtgcccctagacactcttggacacagaaaggcaccacccccccggccaatgcacggagaatcgcagatttgactatggtgggcagagatgatgcaggacacaaacacacacatgctccaggcagactcttgcatttctgactctagtccccactgcacctggataagtatctgataccctagtgcagcgatccccaacctttttggcaccagagactgttttcatggaagacagttggtgtgtgtatggggtagggggggagcggggatggtttctgggtgattcaagcgcattacatttattattcactttatttttattattatgacattgtaatatagaataaaataattctacaactcaccataatgtggaatcggtgggagccctgagcttgtgttcctgcaactagatggtcccagctgagggtgatgggagacagcgacagattaccaggcatttgattcttataagaagtgagaaagctacatccctcaaatgcgcagttcacgatgggattcttgctcctatgagaatctaatgctgctgctggtctgacaggaggtggagctcaggtggtaatgcgaatgatggggagtggctgtaaatacagatgaagcttctctcgctcgcccaccactcacctcctgctgtgaggccccgttcccaatgcccggtggctggggacccctgttctagtgggcaaaagcctcagcatcccccgcctcagctccctggggcacaaattcaggtgattcggggtccagttctacaggaagcctgacccaggagtcttgccatccagtccctgatttcccaccacagacttcagaattcctagcacctagtcttgaaagggatcccagactcaaatgtcacacctggacaacagatgatagagtgaggttctggtttgcaggatgttttggactctcctcccactgccacccaccccctgtgatggtcccagccccctgtctgatgctggtggccatgagcagagattacaaccacttctggtgccagggaccccacccagactccagcccagggattcccttcccagaccctctctcctgactccacagtggtcatgggggtagggcaggaccactgagttagaagcatggccagggccagagagggtgagtctagtgccttgtgtgtgtccctgccccttactgctgtgtgtgtgtgttgggggcggggatgctccattgtccccagaactatttgtctccacccccatccaatagtcctgtatctgaaacctaagagggctctcttcaggttcctcaattccaacatagacattctcctgccccagagtgcagacttggaggtcatatctgcccaggtgatgtggacaggcaaaccccctattagagcctcaatttcctcaatagctaatgcctagatcccctgtggtaggcaagatatcctcctccctcctccctcctccctccctccttcctcctcctcatccttctcctcctcctccttcttcttcttcctttttgagatggagtctcactctgttgtccaggctggagtgcagtggcacgatctcagctcactgcaacctccacctccaggttcaagtgattctcctgcttcagcctcctgagtagttgggattgcaggcgcccaccaccactcctggctaatttttgtatttttagtagacacggggatttcgccattttggccaggctggtctcaaattcctgaccttaagtgattcacctgcctcggccttccaaagtgctgggattacaggcgtgggccacagagaccagccaaggcaagattcttctgcttgcaagtacaacagaccccacttcaaactagcttgggcaaaactaaaaggaagtttcttgtttgtgtaactgacaagcccagggttagaacaacaggttcaggtatggcttggaaccagggtctcaaatgatgtctccaggacccagacttcctctcgggtctgattttctcagcactgcctttgctctcaagtaaattcttccctgtcacagctcccattacatcctcccattgtggcagccctagtgagggctggaaaaaaaagagaatgctttttcccccgtggttaaaccaataaaaatcccagaccagcgtttcattggctggatcttgctcaaatgcccgcctctctgcccaatcttagactctggttggctgggtctggatcatttgtccactgtaaaccaatccctagcttatggtttgctggatctagcacacattttctttcttaaaagaaaattgagaatgttaccctatgaaagggacgggtgctggtcaggcagctttgcagatgtttcccacatgacatgattgcttgtgggcctctggtttagcgtgacctttttctcaaaggaagtccagagcctggagccgcgtctcagccccacccaagcccgggaaatgtgcaacgctgtggctccaccccctgtgcctgtccatcaaggcagagcccacatccaattggtccgtctgctccattagaaggcggtcctatagctcagtaactgacttctttctaagaccaaatggagcagctggcatgaagtcattatcaaattgatctttcttggagacacaggatttggcaatattttaggaaacagaactttatcctcaccagatctcgacgctcatttctcaacattcaagttgtctgaaatttaaccacatatttttaaccaaaacatcatcactttctgcacataagacagtcttatacttgttttttcttcttttcttcttccttccttccttctttcttctttcttcttttttctttttttttttttttttttgacggagttttgctcttgttgcccaggctggagtgcaatggcgcgatctcggctcactgcaacctccacctcccgggttcaagtgattctcctgtctcagcctcccgagtggctgagattacaggcgcctgccaccacgcccagttaatttttgcatttttagtagagacagggttttatcatattggtcaggctggtgtctctaactcctgacctcaggtgatccgcccgcctcagactcccaaagtgctgtgattacaggcgtgagccaccacacctggccagaaaaaaataaaaataaaaatgtatgcctgtaatcccagcactttgggagaccaaggctggaggatcagttgaacccaggagatcaagaccagcctggacggcatattgagaccctcatctctacaaaaaataagaaaaattagactgggccacggtggctgatgcttgtaatcccagcactttgggaggccaaggcgggtagatcacgtgaagtcaggagttcgagaccagcctgaccaacatggggaaaccccgtctctactaaaaatacaaaattagccgggggtggtggtgcatgcctgtaatcccagctacttgggaggctgaggcaggagaatgacttgaacctgggatgcggaggttgcagtgagctgagatagcgtcattgcactccagcctgggtgacaagcacaaaactccatctcaaaaaaggagaaaaattagccaggtgaagtcgtgcccacctgtaatttcagctactcgggaagccgaggacgaaggattacttgagccagggaggtcaaagctgcagtgagccatgatcacgctgctgcaccccggcctgggcaacagagtgaaaccctgtctcaaaaaaaaattattaaaaaacatttaaagagacagggtcttgctatgttgctcacgctggtctcaaactcctggcctcaaatgatcctcctacctcagcctcctgggtagctgggactacagagcgagccaccatacccagctactttgtgccttttgtaaccccagttttcaagatcagataaacacaaagtgaactaagacaccttctagacagagtgcgggcatgtgaacgcatgcttgtgtctatttttctgagtgtcacaatgcaaatagtatgcaaatgagtttgtgatgtgtgtccgtgtgcagacctgtgtgtgtacatgtgtgagagagagtatctgggtagataagcagatggatggatgagaatgagaaacctggagtttccaggtgcagaggaaactgttcctccagggttcttttttgagacagagtttccctcttgtcacccattctggagtgcaatggtgtgatctccgctcactgcagcctccgcctcccaggtttaagcgattctcctgcctcagcctcctgagtagctaggattacaggcgctcgccaccacgcccagctaatttttgtatttttagtagagacggggtttcaccatgttagccaggctggtttcaaactcctgacctcagatgatccacccacctcagcctcccagagtgctgggattacaggcgtgagccaccgcacccagcctcctccagggttgtataaaagcaggggatttggggagggagggaaggatgtgggtctgtcctcagtcccagatgtgggtgtggcgttccagtggttagttcccgttgcctcacatctgtgcttttcctccacggggacttgtagaagtagaagaacttcttgggggtggagctgaggggtggagctgaggctggagggaggaaggtgtggggggacccaggggtcctgtctccaagcctggttgctcttacgcgaaaagttgggacactgaggtgtcacagcttctcttttgaaatggagaggaggtaggagggtgaggtccatccaggtagacacagacacacacagagaccacagcttcctgtaacatttccgagtgtcgaattccatctcccggtctagaggtttttcttcttggtccttcctgagacctcttggctcccaagagcctcttgatcggggcaggaatgagggtgccccagggtgcgagagtcgtggatccctgaaaagaggaggctgctccccctctttcttccccccacctccagatttcctcatctgcccacaccttccggtgggcggggacgtgtatggacaaatttgcgggctggggaccatggaagtggaggaaatctacaagcaccaggaagtcaagatgcaagcaccagccttcagggacaagaaacagggggtctcagccaagaatcaaggttagggaactcgaggtggaagggaggggttaagaaggagagattggggggccgggggcttttgctcatgtctgtaatcctagcactttgggaggctgaggcgggaggattgcgtgagccctggaggtggagactggcctgggcaacatagggagactctgtctgtaaaaaataaaaataaaaaaagaaggagagttcagatgggagaggtaaggggtcaaaggtgggggccgggggctccttcccctccaagatgtgtggatgtgtgtgtggatgtgtgtgtggtgtgatcactcaaactctcacacacccgctccacttaaccaaaaagcagattttagcttctcactccttatctttcaccccctacaatttattgagtgcaaagggttgggtaaaacaagatcccggatccactctccacaccacagagctctgagcagatctccaac

SEQ ID NO: 8184 - DNA, 6000 bp, Homo sapiens
ggctgaggcacgaaaatcacttgaacccaggaggtggaggctgcagtgagctgagatcacgccactgcacgcctgggcaacagagtgagactctgtctcaaaaaataaaaaaaggttactcattccaggcaacagcagtatacaggggatacagaaagaaacaaagaccggtggctctgccccaacaagcatatggggaggagaaatactaaacaaatattcacatgtgactgctctggtgggaaagtttgggtgtcctgggaatacacactgcagagacccaacatggcatgtgcatggggaagggtgggaggtaaaaaaaaagcctttccagccgggtgccgtcgctcaagtctgtaatcccagcactttgggaggccaaggagggcagatcacctgatgtcaggagttcgagaccagcctggccaacatggcgaaaccccatctctactaaaaatacaaaaattagctgggcatggtggtgggtgcctgtaatcccagctaatagggaagctgaggcaggagaattgcttgaacccaggaagcggagattgcagggagctgagatggtgccactgcactccagcctgggcaacagagagaggctccatctcaaaaaaaaaaacaacaaaaaaacaaaaaacaggctttctgaggaagtgccagagctccaagttctgacctcaaacatgggcagtttaacaaatgtgagctcaaatcctgcctctgtccttctgcacaggtgacctggtgacctgggaccatccctgcactatctatgtgcattccctcttgtgtcaataggggtgtcaggcagctaggaagaccttagcacactgcctggcacgcatgacgctctcaacaaatgcagccactatggtattacagttaagccaggcaaagaggatggagggcaaagagcagctcccacaggggaagcagcaggtgcagcacctgggctggaaggagactggacacagcaaagcaggaagctcctgacagagcactggtgccctgcctggcatccctgtcactgatgctcctgccactttgtgccaaatctcccgcccactggagctctgattcggatctgtacagtgcaactctagggcctggtagtgccttccacgtgggggttaagtaacacatggctgctgagtcaatgtatgaatggatggatcaatggatagacggacagatggtctagtgattgagtgcacaaccgctagagtcagaaaaacccaggttctaatcctgattctcattgattccctatgtggccacaaaaaagttgagccacatctctgaccctcagtttcctgatctgtaaaatgggaaagtgaccattatcttttaagaatggagggagaatgcaacactaacaggaagcacctaactgggtcagcacccaagggcaggcccccaaaaaggggagctgctggagtgtcttcaaaatctcagctcggccaggcgtggtagctcatgcctgtgatcccagcactttgggaggctgaggtgggaggatcgtttgagaccaagagttggacaccagcctggttaacacagcgagatacctatctctacaaaaaacatttagaaaattagccaggcgtggtagtaagtgcctgtagtcccagctacttgggagcctgaggcaagaggatctcttgaacccaggagctcaaggctgcagtgagctatgactgtgccgctgcactccagcctgggcaacagagcaagaccctgtctctaaaagaagaaaacctctgttcctcagggttcccccatccttgggcagtgctccatcatggcatccaccgccttgactgtgacgccgcctcctcaaatggccttcccttccacaccccagcaggagggcaaccccatcaccatcctgtgactccctgcctctgtcacctaacgtcacctctgtcactatctattccctgcttagaaaccatgtgtcccaccccatggtaagttccactctatctgtcttacccctgctgtaccccagcacctagcacagtagccagcatgcgttaggtactcaaatatctggtgaatgaaagaattaatgaatggatacaatagtcatgtacagatccccttaagactccaaatagttacacaatcaaattcagcaggaagtgtaaattctggggcctccagggcccaggcagatgatagacatatgaaggggttagggctgggatgaggcagagtctacaggccccacctcctcagagtccttctcaactacactcaatagatgcaaacagctctcctgaatcttgagttgcagaatgttccaatttttcaagaaaaatcagacatcttaatttttatataaaatctcctgattaaaaatctaatgttggcatctaattttaaaagtggcaggtctgcagcactctgaaagcaacagctatgtgtgaggttgttcattcattcattcacaggcatcggaggacgggtacggcaagaacaaaggatgggacaagccaagctagggcctcttctctgaagtttacagtcatatgtgaggggcagacattagccagatgacagcaaacataacagaacattataacggtaggaagtgatgtgagtgctcacatcagggaggtctggtaggagaaagaaatagatgacagaggtaggcagaaaggctagcacattctcagtcatctcccactcacacacacgctcaattaaagagaaaacttgtggctcacgcctgtaatcccagctcttcgggaggccaaggcagggatcacttgaacccaggagttcgagaccggcctgggcaacgtggagaaaccccatctctacaaaaaatacaaaatttagcctggcatggtggcacacacctgtaatcccagctactaagggggctgaggtggaaggatcactttagctcaggaggtcgagtctgcagtgagccatgatcgcaccactgcactccaacctggacaacagagcaagaccttgtgtcaaaaaaaaaaaaaaaaaaaaaagagaaagaaagaaaacgaaggtagggcttggcgaaacagaactgtcctctgaagtggaccatgcaattccaggatccaattagaccttacctgtgctgggctccctggactcctccccaaagccctgcgtgtccttctttttcctacaaagaggagcagacagtgtccactttcaatgggacatagagtcctcagccccctgacccccagctcagaaggccacaaacactaagtttcagccctggccctgccgcaaacttgctgtgtgacctctgacgttcaatacccttctctgggcccccactgcccggacaatcacagccaggtcagcagccaccgaccgtttacaaagtggcccgacagtgcgggtgcagggcggaaggtccgcggtggggctatttcttgggggatggggcttaagctctccaggaaggtgaacagagggacaaccaaggaacggagagtatgggtttaaggtctctcggggggtggggggcgaggaagataaaccaggctggaggcgtgcccagagggcggatagggcggggcctgcggcttgggggcggggcctgagaagtgcgccgagatcacgcttatgagggcggggctacgggttccccggatggagccgcagtccggccgcgacctactcacagcttaaagttcagcaccgccccggcattcatcagcaacgtcctgcagagggagaattacagttactaggggcgcccccgcgtcctgcctggctctctcttcccagcctctggtccccctaattacccgaacagcaggatgtctccgatcatcgttacggccgaagcgtccgtcagaaccggaagcggaagccccagggagggaggggagaggagcacaagccgaccaatcctaaagcaacagtggcgagggctgggccaatcgaaggtcaaggctgggagggtcccgccctctgcaggccagacccccttaggggagcgcgagcgccccacctcgctggggaggccccgagagccagaatgggaggagcggggtctcctgggggcgggattgggtcacgcgttcgaagcgtgccgcgcatgcgtgaggtctcgatgccgtagggttagctgggcagcaattcctactcactttctggggtcccaaattgggcttctggacaaaaggaatcctttgactcctgagctgcacagggtgcggggtcctgacgcagtggggtccctagaaacgggtgccccaaccaactgggctctaaaatgagatcctcctgggccccatggggaacgggggttcccactgagctgccccccacaagacgtcctgatttgcagagccccaccggagacggggttcctgatcgaacggaccctatggggcagaaaagtcttgacggggctccacagaggaccgaggtcctaacctatctccacggggaacaggggttctgattcatggggtcccaccatggcgtaggggtcctcactgggctccaccgaagatcggggtcctaattgagcccacggggacaaagtcctggccgatccggccccctgggaacgggcgtcccgcgtgggtgggctccgtgagggacgggcccccagaacaggcagctccccagcctccctcgccttgcacgggtgccccgcaccccgcctcgctgggcggaacggggtagcgatggcaggagggtcaacgcctgggacgcccgaccgtccagctgcgtccgtggtgctgggcgtccccaccacctgtcccggggtgggccgtcgcccctcctctcccgcgggggccgggcctggggtggcgcctggcgggcgggggcgggcccagctgcgggggcgcagtcgccgggccgcgggcggcgggacggacgaggccggggccccgggtggcacccggcaggcgggcaggcgggcgccatggagctgctctcggcgctgagcctgggcgaactggcgctcagcttctcgcgggtgccgctcttccccgtcttcgacctcagttacttcatcgtctccatcctctacctcaagtatgagccaggtgagccggggcggggggctggaggggaccggcagcgggtggcgcgggccggggcagctcgggggtcgcagagaggggaagcccgtgcgtggtggagggagcgagggacaggttcaaggattgcatcgtgggagtaggcaggcgctagaatcgtggggttctctcacgccggggtgagcccgggggagaagcccccaggacgatgaagctgggggaggggaaggagaggcgtgcgcgggtttagaggagggggaacaggtgcttggggtcggggctcctggttgggtcagagctgcaggaacttgggcaaggggcgccggctgtggcgagggtgcaggtgggggtcggtgcatctgttctggccgcgcgcaggtgtgacctccctccttgaccttggcacgcggattgagagcgccagcggagtgtctataagggccactgcgctgggggctgcggtcaggttcagcgaaagtgacaccggttctcctccccactgcaactgcccagcaccctccactcccctcccttcccccacggtgctgaatctccgagcccccacgggaattcttccagccctggctccagatcctttccacttacggagcagaaccggccccaaggctgggtgacttggggtcagtgtcctccatctcagctccagactccacgctggggaggtcacaggagggtacagcctgcttcttaatttttaaaatgaggatgaatggcttccttagaacgtgttctatttttataaaaggttcaccgtgaacaaatgtttaaatgtttcttgttcaccgttattctagaacaccagcaacttactagataatagattttaggcttagaaaaataaaggaaccccaaacttcataagcctttctcccacttagatgtaaattaccactatagctcagaaaggaaatagctttattctcagagg

SEQ ID NO: 8185 - DNA, 6000 bp, Homo sapiens
tgtcactcaggttgaagcgcagtggcgcaatctcggcttactgcaacctccgtctcctgggttcaagcgattctcctgcctcagcctccagagtagctgggattacaggcgcgcaccatcacatacagctaatttttgtatttttagtagagacaggatttcggcatgttggccaggctggtctcgaactcctggcctcaagtgatctgctcgccttggcctcccaaagtgctgggattacaggcatgagtcaccacacctggcatcatccagctaatttttatttttattttttgtagagatgagggtctcactttgctgctcaggttggtcttgaattcctagcctcaagcgatactcccgcctcagcctcccaaagtgctaggattacagatttgagccaccatgcctggcctcatctggtcattctaaatagtattcccaccacaccccaaaacatctccctattcacttgttttgttttgttttgtttttgagatggagtctcactctattgcccagactgaagtgcagtggcacaatcgtgactcactgcaacttctgccttctgggttcaagcaattctcctgcctcagcctcctgagtagctgggattacaggcgtgcaccaccatgcccagctaattttttttttttttgagatggagtcttgctctgttgcccaggctggagtgcaatggcatgatctcagctcaccgcaacctccacctcctgggttcaagtgattctcctgcctcagcctcttgagtagctggaattacaggtgcatgccaccacgtctggctaatttttgtatttttagtagagatggggtttcactatgttggccaggctggtctcgaactcctgacctcaggtaatctgcctgccttggcctcccaaagtactaggattataggtatgggccactgcggctggccaatttttgtattttcagtaaagacagcattttgccatgttggctaggctggtctaaagtgacctggcctaagtgatcggcctgccttggcctaccccagtgttggtattacaggcataagccaccgcgcccagccctccctattcactttgctactccccttgacttatctgcatgctgatggccaccctatctttatattccaggacaccatggatacccagggaccagtctcccagccttttcagcagcctgagaaacctggtcgtgtccgtcgtcggaagactaggcgggaacgtaacaaggccctggtgggcagccgccggccattagcccaccacgatcctcctgtggccattcgggatccacctgtggtccctactgcctccaagctcgtggtcataacccagggccggctgagccgggagcaccggggtctcttcaaccacgaggtgaaatccctagatgttgcaaggctgcttagcagtgggaccctggtgccaggcagccccacactccccgccaagccctccccaagcccaggcagggcccaggaaccagccccacggtccagggacaaagagaaccaggtgcctggaggttcgggcccaggcccacccagttccccagagttgtctggcgtggggcagctgctggcagagctgcagtgtcagctgagtttgccacaggccttcccccggaggaacctgattcaggatgccagggatgccatcgtgcacaccttgcaggcctgtcatggttgtgtgcctgaccttgccctggtgcttcggggctgccagccacccttgccaggtgagcgtccctcctgcccctgtactcccctttcctttgtcggctctagctcagctagcctctatgcttctttcctctgtgccaggggccaagcctggggtctctgagagaaagatgacacccttctggattaatagccctgatcaagtcccagagcaggagaggcaaaggaagcaacaagggacaaaggagttcaccttccccatgccctacacctccagcatgcccactgcgcacagggggagtctggcaccgccaagaggtccctggccaccatactttccctcactgtcttcgccatctggaacagcctggggtcccccaacagcgtttgacttgttaaaaagcatctggctggtagccacgccaccccctcctcggccctggggggttggcctccctcagcccctgcctcagccttcatcacccctgttgccccgaacctctgtcctggactggagccccagccccccttccccactgcccagcctctcctgggtagtagcccagagcagtccggaagcctggtcttttccacccatgagactgtactgaggagaggctgaggctagggctggggacagatatcttgtactcccagtgacctcaataaagtacttttcatggtcctcttgattttcagtgagttgctgactcagaagagcagcttttcttagctctgagttctaggtccaagatggaggggaaggtactgttgcttgttaccttcatagggcctgaggagccagcatggtggggaaaattgggacttcaattagtccaacacatatgcccactgtggctaactgtgtacctgaccctgagctctggtgatgctggggctccagagtgagtgagacaaaggccttgtcctcatgaggctcccagtttggtggtcggcacacacaaccccagctccagtgattgtgtctaggagagcaagagaggtgcaggggctggggcagtccaaggagggagtgatggctgccctagtgaggagggaattcttcgtagaagagctgtgtttttctttctttctttctctctttctttctttcttttctttctttctttttccttccttccttccttccttccttcctttctttccttctttctttctttctttcttttttggagacagagtcttgttttcttgcccaggctagagtgcaatggcacaatcttggctcactgcaacctccgccacccaggttcaagcgattctcctgcctcagcctcccgaggagctgagattacaggtgtgcgccaccatacatggctaatttttgtattttaagcagagatggggtttcgccatgttggccaggctggtctcgaactcctggtctcaagtgatcctcctaccttggcctcccaaagagctgcaattacaggcatgagccaccgtgccctgcgaaccctctatttttcaagggtggtggaaacttggtacttgaggaaaagaacatttcaggcaaggggaacagcatatgcaagtcctggaggaggctgcatagcagatacagggccattttcactcagcaaatccctaggccatgctgggacctagagtaagccacatctgggcctgcccttgagcgcctcctggtctgtgaacacagggaacagtgtatgtgcaggctcagggcaggagtgacagatcagggctgaatctggcccacaggctttttttagtttcacccacgatatgttttaaatgttggaatcaattgcctactgttacaaaccaggcagtttgctttttttttttaaattgcatttctggcttctttcagaaggaaagaaaaaataaaaaaggatctggcagcagcactacaatccttcctggcaacaactggccaagtagcagaggccccctctttgtgggatccatgctctccattaaaaatgtttcacttatatttccagcttggccccttggcttagaaaatttgtaaaaaatggtattttgagcagcccccgttttctgcagtggagaaggatgaagctagaaatgtttgttggagtctgatcaggaaaatcaaggtgaagggcatggcttctactctggaaaagcctttctagggcttgctgttgtccactgggaaaccatagggttgatatctgcatagaggggactgggctaggagatcatagggctgaatgacttggcccaggtcttatggtggacaagtgaaaaagtaggggtcaggctgggatttgaatgaacccaagcaagttattttaacttggatctgaaacatgcttttggctatctcacactaccacctctgtctctcacagcaacccagcttcacagcatggtaagcagtgacaggtcatggtcaggcagaggggtacggtggttatactgaagcctccaccaccaccatgtggtgtaacaagtggcttcccctctctgtgcctccatgggcactttgcagggtgcatcagatctagaacgctggcaactccaggatggacacagctggggatggctgcaatagaggtggtgatgggcaatcaaagacttgttggccaggcgcggtggctcacgcctgtaatcctagcactctgggaggccgaggtgagcagatcactttaggttagaagtttgaaaccagcctggccaacatggtgaaaccctgtctctactaaaaatacgaaaaaatcatccgggcgtggtggtgggtgcctgtaatccctgctactcaggaggctgaggcaggagaatcgcttgaacctgggaggtggaggttgcagtgagccgaggtcgcgccactgcactccagcctgggtgacaaagcaagactcgtctcaaaaaataattagtttggggactacattgaggggaggccaggacagagcatgggtctggggatccggagaaggcagtctggaggaggcatggctttggaagacgtgagttcagtttaggacacaggaaaccataggtatctacgggactccaggaggggagggctggggcggggtgacagaggatgaacgtccccctcccacgcggagaagataggagtcaggttgggccctcttggaggagggggcagggagcgcggcgcccggcggcccctttaatcgggggcgcgcgctggccagcccgcgcgctctcgcctccattgccgggccagtgcgggagccggagcggagccggggccggagcgggcggaatggagcccctgcgcgcgcccgcgctgcgccgcctgctgccgccgctgctgctcctgctgctgtcactgcccccccgcgcccgggccaagtacgtgcggggcaacctcagttccaaggaggtgagcatgccgagccctcctctgcggcccgccggcccccgggggacgcaagggaggcgaggggagcgggtaccgcctcgccccctgccgcccctcctggcggactccgggagcctcgggggagtggggccgagggcgatgggggactgggccagagtcgaggctaaggggagccgtagggtcgcggccagacctgggggttgtaggagggacgttgaggtcagagctgagcggggagggggagcgggttgggagagtcagagtttgggaagggtggtgcagaggtggtgctgaagggacagcacttttcactcagcagagagccccgagctcgccgccacactcccgctcaggaccgggagggggccgtttggaagattcccccgcgcgggatggtctttgggagcacggggtggggtgcaggggagtgtggatattgggggaacggggttagatattggccaggacatgaggtggccaggatgagcatctggcccctaaggtctttctccccagaaagatcccgggaaatgcagggaggagtgtttgaatggaggggaggaaacttgggggggcaatggagggagaaaatcagggcggcaggaatcctggacccacagtgacgggatcagggaaggagtttggaggtgacctggtctccttctagtacttgggaagccaggtacctggggggtagggaagaaaagttgggggtctatggagtaaagagttcttgaaggactcagcggagggtcagactgggcccctttttcaggactgggtgttcctgacaagattttgtttcctctcggattacggccgactggacttccgtttccgctaccctgaggtgagtctcccccaacactcgccatgctgaggctgggtacttcccttggcctccaaaggcacaggctgccccagctcccggtcccca

SEQ ID NO: 8186 - DNA, 6000 bp, Homo sapiens
ttgtcacacgtcttggtccagataaatcccaggaagtagcatcgtgatctacacttctgatgagaatactgcagcccacagtaggaaagttatatttttgaattcacgactaccagtacaggataacagcccctagaaatggaagcactaggccgatcctaccactgcactccagcctggctgacagagcaagactctgtctcaaaaaaaaaaaaaaaaaagaaaaaagaaaaagaaatggaagcactattcctttcttagtttctcatctaatagtttcctgagcaggaaagttcctagttcagaagattatgagtagtatgcactgtaaaaaatgtacatcatgtctaaatactaagcctcgtacaaagctctcaacagatgtttttaaatattaataatcatttatgcctcaacctctaaaagatcccaggaagtcagtatcgaaagttagggtcctttattgggggatgtcagcagagaacgtgggacatgaaaacaagtcttaggagtttgagaaggggctcccaggacaggctcctctgctttaaggagcctgtcctgggagaataagcagggccccagtatgtgcagaagttgtcagggggtgcccaggggtatggtgaaggagaggtagtccccaagggcaccccagcggggccggtagatctggaagatggtgatccaggaggtgagcactatcacccagaagaggaagcccacagctgagcgccagacatctgtcatgggaaacagaagctggaagggttggcctccggctgctctccagacttccctagaccagccttcccttctcacccagagccccaacattttggatcctccattgtcccttcccaccaagattccccgcttccccctctcccctgccactggcctccctcctctgtgctctagactcacagcctttgatttggctctgttctgtgtaggctgggacaaggaaggcctctcggaagaaccagaagatgttgaccaaccagagaaaaggcaggaaagcaaacccccctagggagaaagaaaaacaaacaaacaaaccccaaaacctcataaggcaatgaagatcttctccaactcccaccgagatctatttggaagaaactctcccacacccaagttcaaatggagatttctgttgtcagggactcaggaatctggctcctctttgggatccaggaatctgattcctcaaccatctctttcacaggacccaagagtccaggccctcaatccccctcctctcttgggatccagaaattgaggccccagcttcctcattcctcaggacccaggccctccccactcaaatccaggagtcggcgttcgcaggtccttcatctcttagacttaagaatccaggccccgaggccctcttccctcgggtgctctagtccagtcccctctcttctcctgggaccctagcgatctgccttacccaggtagtacttccggcacaggttcaatttctcctcattggacactcgctccaggttcatagctgcgctggggccgggtcgtcccaagggtctgcggggcaagacccaagccttgaccctaagtaacagatgcaaggatcacgaacaaccacgcccctattagaacaaatcagagataaatgtaaaggtcggtttgctgaaagcagggcatccccacccccactagtaagctggctggattaaagagctctttatatttactagggtgggcgaaacgacccccaactcaccaggagagctcacttcctccggctggggtgccttagctactttcagttatggacgtttgcgcgagacgccccaggtttccctggagattgtagtcttctttgggcgaggcaacactgcacgcatgcgctgttaaaagaactcctaccggggagtctatggggagggcgcgcgcctcccacgcgcaagcgccctggggcgtttccgagcgcttggtaagcgcctggagagggcaacgaactacacttcccagtgctcctaagcaacggaagtgacgtaagagcagccagacctggagggcttgggtaaaaatggctgaatatttagcttcgatattcgggactgagaaggacaagtgagaacgggcgctgggagtggactctcggggggtcggggccggggtactggggtcctgggtggtggggcggtgtttctggggtgcccagcttccccggccctcggttcacctttgtctttgcaccttttccagggttaactgctctttttactttaagatcggggtctgccggcacggggaccggtgctcccggcttcacaacaagccgacattcagccaggtgagacccggcacggagcctcgggggttaacggctccctggcccttccccttctggggccgtcgtcaccatgtcccgcctattccgggttcctgagtccctccccaccgcccggctttttttctcattggacctttctgcaggctcctcccaccggtcttcgtgccgttttcccgggaacttggtcgcgcccccatgcgtacaggctacacacggcggctgttcatctttgccagtcccttccatcccgctgttcatccttgccagtcccctccatcccttttctggtttcttaggggcaaaggatcgccgatgcactcatgatgcttaggctggggtgtaaggttccacccccaaccttcatgcctcactctctgttcatgcagccctgccctctgagctcaggccccgccccttttaaattctgtgcagaccatagtgctgctcaacctgtaccggaatccacagaacacagcccaaactgcagacggatcacactgtgagtaagggaccaggcctgggggcaaggtgaacagcccccagtaggctacactctgattccaccctgcccgcccccaccccaggtcatgtgagtgacgtggaggtgcaggagcactatgatagcttcttcgaggtgagggttggtaggggcagatggggtttcttgtgggagctcagctgagttcctccccgtcttccacaggaggtgttcacagaactgcaggagaagtatggggagattgaagagatgaatgtgtgcgacaaccttggggaccacctcgtgggcaacgtctatgtcaaggtgcttgctgccccccacttagggcccagaagtggaggcgtttcaatgcctgatggtggccactgtaggctctcagcttgaatttcatcactaaatccagtccagccccagagcgggtagtgagtcccctgaagatctctgagttctcctgctgaccctgactgacatttcctgcagttccggagggaggaggatggagagcgggccgtggctgaactcagtaaccgctggttcaacgggcaggctgtgcacggtgagctgtctcctgtcactgacttccgggagtcatgctgtcgccagtatgagatggggtatggtagttcaagggtgggatgggcacttggaatcccagactttgaatgcgtggtaggggctgtcagtgacaatggcttcctccatctctctaccctctatgcagggaatgtacccgaggtggcttctgcaacttcatgcatctgcggcccatttcccagaacctccagaggcagctctatgggcggggacccaggcgcaggtacctcaggaccagcctgctatgtctcctcatgtcctaaggcccctatatcctcagatgagcctaaccctaagccccagtaaccacgttcccaagaatcttttttttttttttttttttttgagatggagcctcactctgttgcccaggctggagtgcattggcaccatcttggttcatggcaacttccgcctcccgggttcaagcaattctctgcctcagcctcccaaatagctgggattacaggcacctgccaccatgcccggctaatttttgtgtttttagtagagatggggtttcaccatcttggccaggctggtctgaactcctaacctcgtgatccacctgcctcaccctcccaaagtgctgggattacaggcgtgagccaccactcccggctgactgttttttttttttttttttttttttttttttgagacggagttttgctcttcttccgcaggctggagtgcaaaggcgcagtcttggctcagtgcaacctctgcctcccaggttcaagcaattctcctttctcagcctcccaagtagctgggattataggcacctgccaccatgcctggctaatttttgtatttttagtagagatggggtttcaccacgttggccagcctggtctcgaactccggacctcaggtaatccacccatctcggcctcccaaagtgtggggattacaggcgtgaaccactgcgcccggtcattcccaagactcttataccctaagagtagttctgagctccatctggagaccagtacctaagtcccaatccccaaaccagcctgaacccctaatccacgaccagcctggattgccacccctgatactggccactgagttcccctgatactggccactgaggtcgtgtcttagaactctagttatttcagcaccctcctgcctcatcccagagcagagaggcaggcctgcaggatctctgcaccactcctcagggttctaacagaactctcaacgctcctattcccaggtcacccccgaggttccatactggccaccatccccgagagaggaaccatcggtgttcccctgatcactggcatggccgcttctgaggccctggcccccttacccttcacccccaacagggacagatgttcctggcaggacctctcctcaaagcccccttcactctcctgccccatccttcccaggctcccgggctccataatgtaatctgttcagcatggagaccttcttctaccgcccctgtcttaataaagctgcgtgtttcacttcggcatcaacttgcttttgctgtggtttggcatttccctccacccacacatgtgacgaaaaggggaaacaagactgggtcctggccacaacttcagctgaggaacttggcacggccagcttgggacccaggaccctaacggtactggtagggtggggacacctttgtgctgaaaaccttagcacctccatctgaggcttattcaagggggagagacctggttgtggcaggtgggaggagccctagccccaaggagattaggattcaaaggtgaggtgaggtgctgggaggtggtctccagccagtatggggctgactcctccgtgcctgccgaattgtgatgggagttagtaatgccttacacttaaacactgagtttactgtatgtgaggtgctgttttcagcactttagtttgtttttgttttttttaaggagtttcattcctgttgcccaggctggagtgcaatggcacgatctcagctcactgcagcctccacttcccaggttcaagcaattctgcctcagcctcccaagtagctgggatttacaggcatgcgctaccacgcccggctaattttgtatttttaatagagacagggtttcaccatgtaggccaggctggttttgaactactgacctcaggtgatccacccacctgggcctcccaaagtgttgggattacaggcatgagccactgcgcccggcggccagttttttttgtttttagagatgaggtcttgctgtgttgcccaggctggtctgtaattcatggctcaagcaatcctcctaccttggcctccctagtagcagggactacagacgtgagccactgcacttggcaaagtgctttgctgttttttttttttttttttttttttgtaaagatggggtttcattttgttgtccaggctgatctctcgaactcctgggctcaagtgatcctcctgtcttggcctcccaaagtgttgggattacaggcatgagccaccacacccagcccctgctttacttctaatgacggttctaattctccacaataaccctatgagacaggtgctatcattgtcttattttagggatggaaaagg

SEQ ID NO: 8187 - DNA, 6000 bp, Homo sapiens
cacctttgccacccagctcttcaacttgctctcgggtgaggtaggtgcctgggtccctgggggattccccgcccacctgtgaccccagtgccttcaatgacacgaacctcaaaccctgaccccagaccctgactgtgcagctccaggagccccgcctcctcccacagtggcccctgcgccgccttccccccacagggttacctggaatggtcccctctcttctatggcttctacccgccccgcccacgcctggcggtcacctacctgtgctgggcctttgccgttggcctcatctgcctcctgctcatcctgcatcggtcagtggcacctgcacccctgacccctgacgggacgggttggggtgggggagcaagtggtggtggcagaaaccccctccccaagaatcctcagtctttttttttttgagacggagttttgctcttattgcccaggctagagtgtagtggcgcaatctcggctcactgcaacctccgccttccggtttcaagcgattctcctgcctcagcctcccaagttgctgggattacaggcgcccgccaccacgcccagctaacttttttgtatttttagtagagatggggtttcaccatgttggtcaggctggtcttgaactgctgacctcgtgatccacccgcctcggcctcccacagtgctgggattacaggcgtgagccaccgcgcccggccccagaatcctcggtcttgctgtgtaaccctttattctgtgtgagttaaaatcaaggttttgggccaggagcggtggcccaggaggcggagcttgcagtgagccgagtttgcgccactgcactccagcctgggcgacagagcgaaactccatctaaaaaaaaaaaaaagatcaaggttttgggatttgtttttgtttttcatttgttttgtttgtttgtttttgagacagagtcttactctgtcgcccaggctggagtgcaatggcacgatcttggctcactgcaacctccacctcccgggttcaagcgattctactgcctcaccctcccaagtagctgggtttacaggctccggccaccacgcccagctaattttttgtatttttagtagagacggggtatcgccatgttggccaggctggtctcgaactcctgatctcaggtgatccacctgcctcggcctcccaaagtgctgggattacaggtgtgagccaccgcacccagtctgttttgttttttgagacagggtctcactctgtcacccggctagcgtgcggtggtgcaatcatagctcaccggaagcctgggcctccggaactcaactgatccgcctacctcagcctcgggagcagctgggaccacaggggtgcaccaccatgtcttgctaaaattttttttttaatgttatagagacagggtcttgctatgttgcccaggctgcgctcaaactcctaggctcaagagatctgctcacctcagcctcccaaggtgctggaattacaggcatgagccaatgtgcctggccaaaagtcaactttttttttttttgagacggagtctcgctctgtcacccaggctagagtgcagtggtgcgatctcagctcactgcaacctccgccgcccgggttcaagcaattttcctgcctcaacctcccaagtagctgggattacaggcatgtgccaccatgcccggctaattttgtatttttagtagaaatggggtttcaccatgtttgtcaggctggtctcgaactcctgacctcaggtgatgcacccgcctcggtctcccaaagtgctgggattacaggcgtgagccaccacgcccggcaaagagcctcgattttaagagaagggaaaagccctggaataggtcttaaacaggggaatacggtctgagttgcatcaaaagaaggtcccactggctcaagaactgagaatggattatatgcgggcacaagtggaagcaaggagaccatgtgagggccctctgtggttgttcacatgagagatgatgggggccggggccagggcagtgaaggtgcacatggtctctttgtccagttctgtttctgcccctgctggggttctctatctccttcctgggtctttgcccccctctcttgagtctctttacctgcccgtcttctctgggtcttttttttttttttttggaggcgacctccacctcctgggttcaagtgatcctcccacctcagcctcccaagtagttgggattacaggcatgcaccaccacgcctggctaatttttgtatttttagtagagacggggtttcaccacattggccaggctggtctcaaactcctgacctcaggtgatcctcccccctcggcctcccaaagtgctgggattacaggcgtgagccatggcgcctggcctgccccctctcttgagtctttacctgccatcttctctgggtctctgtcttcttctcggctcttcccgccgcagctcccttctctgtgtgcctgtacttcttatgggtctttgacccccatcttttgtagatgtagtttcccctttctcactgtctttttctccctttctccgaatctccctctggggcctctgtccctcctccacatctctgtcttcctcagggcctctgtttctctcactctgggtttctgcccccttcgctccgaggctctgtccctgtctcctaggtttctgcctctctttggggtgcctgcaccccagaactgtctctgaatctcccttggactttgccttcaatgactgtgtctccgcctctttgactctttccccatctggtctggtgggaactcgcctagtacccaaggccttagggttcatcttccccatttgtcccaatatgaggggtctccccataacccccgttcctggctgtcctttcacttcccgtctcccgggtctcccctctcagctcggtgtctgggctgaagcagacactgctggcggagtccgaggctctgaccagctacagccaccgggtgttctcggcctgggacttcggtctctgcggggacgtccacgtgcggctgcgccagcgcatcatcttgtacgaattaaaggtgcgattagggagcggggtctgcaactgggtagggaccagacaggaccgggctgagataacgcacagggcctaactcggtgatggggcctccggagagatgctaagcagctccttctccaagaaaggcaggtcctggggaatgagaaggttgagaggaggccgagatagggctgcccgagctccaagcgtgtaggaaaaggatgcgccagggctgggatcggtggctaatgcttgtaaccccagcactttgggagaccgagacaggtggatcgcttcagtctaggagttcgagaccagcctgggcaacatagggaggctccctctctaccaaaaaaaaaaaaaaaaagtttgtttttttttaagtaagcacaagaagcgggcggggcctaaggcaatttggttcaaagttaagtgatgggagcggccagcagggcgtcttgatacagctgaactggaacttcaggccaggaataaagcgcagggccacctgggggcggagcctctgatgggcagggctgaccaggggcgggtcttgggatgctgggcggagcctcaggggcggggcctggggtgctgagattgaccgcggagggatgggggcttgggttgctggatccggccgcgaaggggcggggctgtaaagggccgctggtttcctggagcgggtggaaccaggactgcagaggttgttagcgggtggggagacggctgcatcagttcacgttaaggaggatctctggagagccagacctggggaaccgggaggcccgcgccttgggaaatggagtccaagcgggcatctctcctgccttcaggtggagctggaggagacagtggtgcggcgccaggctgcggtgcggacgctgggccagcaagccagggtttggttggtgcgggtgctgctcaacctgctggtggtcgcgctcctgggggcagccttctatggcgtctactgggctacggggtgcaccgtggagctgcaggtgcggacggtcttggaagaggaagccagggggtcctggaacctacatttccaacggtggagggaggggacggaagtttgggatgccagagatcttagagaggaagtatgggagagggtatgttcggaccctggacttagggattttaaaggaaaaagagaggctgggcgcggtggcttacacctgtaatcccagcactttgggaggctgaggcgggcggatcacgatgtcaggagttccagaccagcctgaccaacatggtgaaaaacagtctctactaaaaatacaaaaattagacgggcgtggtggtgggcgcctgtaatcccagctactcaggaggctgaggcaggagaatcacttgaacccgggaggcagaggttgcagcgagccgagatcgcaccgctgcattctaggctgggcaacagagcgagactctgtctcaaaaaaaaaaaaaaaaagaagaagaagaagaagaggccggggggaggaccttaagcttggctcctccaggaccccaagcctctactcatggtccatcccgctcccaggagatgccccttgtccaggagttgccactgctgaagcttggggtgaattaccttccgtccatcttcatcgctggggtcaattttgtgctgccgcccgtgttcaagctcattgctccactggagggctacactcggagtcgccagatcgtttttatcctgctcaggttccagcctcacggggatggctgggaatgatgaagggtgggggcggtcagagggatgttggcgctgacaggtaagacacggaaatcctgctgataccgaatccagggattcaaatcctgactctgttggccaggtgcagtggctcacacctgtaatcccagcactttgggaggccgaggctgaggtcaggagttcgagaccagcctgacaaacatgatgaaaccccgtctgtagtaaaaatacgaatattagcccggcggtagtggcttctgtagtcccagctactcgggaggctgaggcaggagaatggctcgagcctgggaggtggaggttgcagtgagctgagatcgcgccactgcactccagtccgggtgacagagtgagaccctgtctcaaaaaaaaaaaaaaaaaaagaaagaaagaaagaaagaaatcctgattctgtcactgggcctcagcttcatctgtgagatgggttgaatgcgggcgcgttccactgagaagggaactgccacatggtgggtaccgggtcagggcccattctctgccttccccccttcaggaccgtgtttcttcgcctcgcctccctggtggtcctgctcttctctctctggaatcagatcacttgtgggggcgactccgaggctgaggactgcaaaacctgtggctacaattacaaacaacttccggtgagaacggcatgggtgtgcgtgggactcttgggtccctgaaggaaagatggagctgggtgggtccagactcttggtttgggcggagaggggagcttggggtgctggaacactctcccaagggtatgaaagtttgaaaaacgaggacccccagagaaagtattgacagggtctcataggcttgcgatgtggagactcggacgcgtgggcctccaggtgcccgggtcccgagttctttctgatatatttcttccttcttcagtgctgggagactgtcctgggccaggaaatgtacaaacttctgctctttgatctgctgactgtcttggcagtcgcgctgctcatccagtttcctagaaagtgagagccccgccccttgctgtggccccgcccctctaggacgaggccgtgccccatcgcgctgttcttttcaccgcgcacctttttaccattcccgcctctgcctgctccctttgcttgccctaggtccgcagatctccccgctccccgcccttgttttagtgggttacttccctctggccccgacggcgg

SEQ ID NO: 8188 - DNA, 6000 bp, Homo sapiens
atcccagctactcaggaggctgaggcaggagaatcgctggaacccgggaggtggagtgagcagtgagcagatcgcaccatggcactccagcctgggcgacacagtgagactccaaaaaaaaaaaaaaaaaaagcttcaactctgtatttttttcatattgcttggcatttccacatgaattttgtgattataaccagaaaatagctgtcatattattcttttttttttttttttttttgagatggagtttcaatcttgttacccaggctggagtagtggcgtgatctctgctcagtgtaacctctgcctcctgggttaaatgattctcctgcctcagcctcctgagtagctgggactacaggcgcgcaccaccatgcccggctcatttttgtatttttagtagaaaaagaggattcaccatgttggccaggctggtctcaaactcctggcctcaagtgatccacccccctcggcctctcaaagtgttggaattacaggcgtgagccactgcacccaaccacacttatgtttttgtccacagaaatgaccagcatttcaatttttgttttgtcttgttttgtttttcccagctgaaaatgaactggcagttataactcgggaggataatttgtattatggcaatctgggcatcgtgccaagttccataatcaaagtaggtaaaaagaaagtggggttatgggctgggcacggtggttcacgcctgtcatcccagcactttgggaggctgaggtggaaggatcacctgaggtcaggagttcaagaccagccttgccaacatggtgaaaccctgtctctactaaaaatacaaaaattagccgagcctggtggtgggcacctgtaattccagttacacgggaggctgaggcaggagaatcgcttgagcctggaaggcagagtaagactctgtctcaacaacaacaacgacaacagaaagtggggttatgaattagttggtaaggaataatggtcttgttcacaaacttctgaaccttttttcgaaggctagaaatcactctagttagtaaaacaacaacaacaacagcagctaaaaggggaagagtatttaaaatactataggtgctggtctaggcaccttcgtgtattacattatttaaccttgaccatcatcttaggaagctcctcatatcgtccctatttgacagatggaaaaactgaggcacagagacctaagtcgtctgtccaggctcaaagtggtactaagtggtggtgcaggtgtcatctgacatcctcttgtgcattatgcctatctaattttttttttttttttttgagatggagtctcactctgtcgcctagcttggaatgccacagcacaatcttggctcactacaacctccacctctcaggttcaagcaattctcctgcctcagcctcccgagtagctgggattacaggcgcatgccaccacaccaggctaagttttgtaattttagtggagtcagggtttcaccatattgtccaggctggtcttcaactcctgacctcaggtgatccacccgcctaggcctcccaaagtgctgggattacagtcgtgagccaccgcgcccggccgaaactctgtttcttaaaaataataataaaactaacaaaaatttaaaataaaagaattattttggccgggcgtggtggctcacgcctgtaatcccagcaccttgggtggccaaggtgggcggatcacgagttcaggagatcgtgaccatcctggctaacacggtgaaaccccgtctctactaaaaaaaatacgaaaaaattagccgggcgtggtggcggcacctgtagtcccagctactcgggaggctgaggcaggagaatggcgtgaatccaggaggcggagcttgcagtgagcagagatcaagccactgcactctagcctgggtgactgagcgagactctgtctcaaaaaaaaaaaaaaaaaaaaaaaggaattattttggccaggcacagtggctccttcctgcaatcccagcactttggttccaggagttcatgaccagcatgggcaacatagtgagaccccgtctctactaaaaatatgaaaattagctgggcatggtggtgcatgcctgtaatcccagctactcgtgaggcaggagaatggcttgaacccgggagacggaggttgcagtgagccgagatcgtgccactgcactccagcctgggcgacagagtgaggctccatctcaaaaaaagaaaaaaataataattaccaaaggatgaatgaagctgaagagaagttagatcacaagttgtccttatgactgtgtttcctccctcccccagccctctctcccttctttcctttcttccttcctttctctttctctcttcctttctcttttctttttctttcttccctctaccttctttcaatctgcatcatggccgggcgtggtggctcatgcctgtaatcccagcacttttgggaggccgaggcaggtggatcacgaggtcaggagttcaagaccagcctgatcaacatggtgaaactcgtctctactaaaaatacaaaaattagccgggcatggtggtgcgactgtgatcccagtgactcaggagaatcgcttgaacccgggaggcggaggttgccgtgggctgagattgcgccactgcactccagcccaggcgacagaacaagattccgtctcaaaaaaaaaaaaaaaaaaaaaaaaaaaaaaaaaaaaaaaaaaaaaggcctggcgcggtggctcacgcctgtaatcccagcactttcagaggccgaggcgggcggatcacgaggtcaggagatcgacaccatcctggctaacacagtgaaaccctgtccctactaaaaaatacaaagaaaaaaaaaattagccgggtgtggtggctgcgcgtctgtagtcccagctactcgggaggctgaggcaggagaatggcgtgaacccgggaggcggagcttgcagtgaaccgagatggcgccactgcactccagcctgggagacagagtgagactccatcaaaaaaaaaaaaaaaaaaaaaaaaaaaaaaaaaaaaatctgcatcatgaaataaaatttaaacctccagaaaaacaattacaatgattagatctcaggaatcattttcttcttagtttgcagaccaatacatctggtcagaagacgtggccctgatgttcaggagcccagggactctggaaatactgaccccactgcgtgacacagcctttccagcttttgatttccagaagtgcctcgtgaatatccaggcgcttctcatggaccctgaactccacgttggaaagtgcaaggtatgtgatcctaactgttttgatcaatgttcaatgtagtttttaaagacaaattcaacctgggcatggtggtgcacgcctgtagccccagttgctcaggaggctgaggctggagggttgtttgaggccaggagttcaagaccagcctgggcaacatacacccatttctaaaacaaaaaaaaatttttttttaaagctgggcgttggccaggtacggtgggagactttggagactgagtctttgggagactgaggcaggtggatcacttgaggtcaggagttccagaccagcctggccaacatggtgacaccccatctctactaaaaatacgaaaattagcttggtgtggtggcgggcgcctgtaatcccacctacttcgagtgctgaggcatgagaatctctttaacctgggaggcagaggttgcaatgagccgagatcacaccactgcactccagcctgggtgacagagcgagacttcgtctcaaataataaataaataaataaataagttgggcatggtggtgtgtactctcagttacttgggaggctgaggtgtggggatcacttgagcccaggagttcgaggctgcagtgagctatgatggagtcactgcactccagcctgggtgacaaaatgagatcctcgtttctaaaacactaatttaaaaaaagagaaattaacaaaataagagacaacaagatagtattcgtcaccaataagagatcaatcacatcacccattgaccactgccaacacgatcaaactcaatctcatgaggcaagcatcaatccagctgcaaatttgccagaaatacaaaagacagaggaatgggttcacctgcaccagggaaatccagattttgagaaatgctgcgggcccaacagcgtggggacttccaaaatccatggaaaggaaaagggggccgggcgtggtggctcattcctgtaatcctaacactttgggaggccgaggcgggcggatcacctgaggtcaggggttcgagagcagcctggccaacatggcgaaaccccgtctctactaaaaatacaaaaattagatgggcgtgctggcacatgcttgtaatcccagctactcaggaggctgaggcaggagaatcgcttgaacctgggaggcagaggttgcagtgagccgaaaccaagccactgcactccagcctgggtgatggagtgagactccatgtcaaaaaaaaaaaaaaaaagtagattttgtagagacaggagtctccctgtgtggtccaggttggtctcaaacccctgaacttaagtgattctctacccctcaggattacaggtgtgagccactaaacccagccaacaaacctgtagattgaaagaggattaaaagacatacctgtgttgggaaacgggcaagactgagtgatgatcttcagatgcatactagggcagctctactctaaagaaacagaaagagggggcgggcgcggtggctcacgcctgtaatcccagcgctttgggaggctaaggtgggtggatcacaaggtcaggagatcgagaccttcctggctaacagtgaaaccccatctctaccaaaaatacaaaaaaaaaattagctgggcgtggtggtgggcgcctatagtctcagctacttgggagactgaggcaggagaatggcatgaaccccggaggcagagcttgcagtgagccgagattacgccactgcaccccaacctgggcgacagagccagactctgtctcaaaaaaaaaaaaagaaacagaaagaggtcaggcgcagtggctcacaactgtaacctcaagcactttgggaggccgagatgggaggatcacttgtgcccaggaatttgggaccagcgtggcaacatagtaagcccttgtctctattaaaaaaaaaaaattgaattagccgggcatggtggtgcacgcctgtagtcctggctacttgggaggctgagggaagaggattgcttgatcctgggaggtcaaggctgcagtgagccatgatcaaaccactgcactccagcctgggcgacagagcgagaccctgtctcaaaaaaaaaagaaaggaacagaaagaagcaattactgcgcatgtcagggttggggaatacttctggagaggagggaggggctggcattgtgcccatctcgagacccttctggaaatacagagtctagtggggaagacagaggcacaagtggagattcaggctgcaggaccaggagggtcccttcctccttcccacctccttgccctttctttatgggaacaggagcatgattatctttcttcttcgcctttttaactagatagagtttctgacaggagaatttatatacaggatgtataccattgacatgcacagccagctggaattgactgcttcgttgataccccagccaggcacatccctgattcctctggtaagtacatcttaatgtttctgctatctgggattctcagccacatgcctggtgcccactcccagattctggaaatcccctggcatcccccacaaggagagacgctactcgcacactcacaattctgcatagaaattgtctctgtgtctttttttttttttttttttttttgagacagaacctcgctctgtccattaggctggagtgcagtggcgtgatctcggctcactgcagcctccacctcctgggctcaagcaattctcct

SEQ ID NO: 8189 - DNA, 6000 bp, Homo sapiens
ctgcagtgagctgtgatcacaccactgcactccagcctgggtgacagagcaagaccctgtctcaaaaaaaaagaaagagagagagagaaagaaagaaaggaaagaaaggaagagaaaaagaaagagagaagaaagaaagaaaaaggaaagaaagaaagagaaagagagagaggaggctgggtgcggtggctcatgcctgtaatcccagcactttgggaggccaaggtgggcggatcacttgagttcaggagcttgagaccagcatagctaacagggagaaaccctgtctctattaaaaatacaaaaattagccagtcatgctggcaggtgcctgtaatcccagctactcggggggctgaggcaggagaatcgcttgaacccgggaggcagaggttgcagtgagctgagattgcgccactgcactccagcctgagggacaagagtgagactccatctccaaaagaaaaaaagaaaaagagaaagaaaggggagtgggagtggggagggagggaagaagtgttctccatgcaaggacctatctgtgcaaaagcccagagctgggactccatgtccagggcagctctggtccattgctgcccacttctgggcctgcttatccatctggatgggaaacaggctcagagaggggcagagtcaatggaggacaccagcatgtagggaacagtgtcagccccagattcctgcctccagactgtcctaaacaccaccctccccgcgcctttgtcccacactgccacctgccgggaatgacctctcctcctttcactcttccccctggctcctcagctgcagccgctccggcctccttgctgttcctgggatacgccacactcagtctggcctcggggcctttgcactggctgtgtcccctgcctgtgatgccattctcctctgcctggccaactcctacgtttattcaagtctggaccttgtcatcggctcctcaggaaggcactccgggacccccagatgggggcggttccctgtgactcctggcacggaggccaaccccttccttgttcaatggttccttgagggaccattcccatgtgattatcgaccattcggcaggcgttcaaagtcaaaggccccacactgagtcctggcccagcgccctgtgcccgttggctgctggagggacagacggggcgtgcggctgaccatcccgtgcccgcaggctgaggatgcagcgctggaaggcggcggccttggcctcagtgctctgcagctccgtgctgtccatctggatgtgtcgagagggcctgcttctcagccaccgcctcggacctgcgctggtccccctgcaccgcctgcctcgaaccctggacgcccggattgcccgcctggcccagtgtaagctcctcctctgtgtggggtcagatacccccaacgtaaggggtagaatttcaggcagtggagtgggaggtggtgggggggtgtcataggttttttaaagatagggccagccagcccccttgcagggaggcagggacagacatcctaaaagattattcagggcaaggcatggtggcgcctgcctataatcccagcactttgggaggctgagacaggaggatctcttgagcccaggagttcatgaccagccagggcaatgtagcgagaccgccatctctacaaaaaacttcagaaattagccaggtgtagtggcgcacgcctgtagttccagctacttgggaggctgaggtgggaggatcacttgagcccaagagttcaaggctgcattgagctatgattgcaccactatactccagcctgagcaacagagcaagattctgtctcaaaacattataataataaatacattttctaaaaaaagatggggtggagggaggttgcaaattcccccaatggcctggtggagctagggtgacttctgggaactggggtctttcggctcagctgtcacaaggaattaggctctgccctgaggtcccgtgggggccagatggagattagacctgggcattcgcctggttggcccccgcggcgcagcagggggggcggtgggaggagagagaggctggatctgaggtcccagtgacctgccccaggggacagggaccaaggggaggcgggagatggagcaggagctaaaaaccggaagaaaggcccagagattcgaaggggtgaggaggggtggagagaggagagacggggctgggggcacagacacgggcaaaagtgctgctatagggacacagaaatgcccaccctgagggcaagaccctcgcccaactccccaccaatccctaatgcctgccccaccgcaggtgctgtggggtgagggtggtgcgtgggccctgacccctgtgcccacgcacatgtccatgcgtgcgcctgcgcgggcatctgaggcgtggatgccggcagggtgcgtgtgcagcgcctttgggtgtgggccacgagtacgcccatgtgcgcgtctgcgcccgcccctgccagcccacacaatcctcttttcttgtccttacaatgcacaagggtggcctccagcacgagctccacttctgtcctcccaccacttccctctctgcaagcggcgtgaagtccttcctaggactctgggacagagacccgggcgggacccccaaaatccagtgctccaggacttggggtgcggggggcaaagcacgaatggaggaatttcaggcactgcggagggtcagggcccatgggcgggtgcctgtctgccctactgcaaaaagcgagtggccactgactccccaagtccccatgttctaggctcctggtggaatttcaggctggggaccttgtgttctagcccctgtgcaagcagccagccccgctgcagggaggcagggacagacatcctaaaagatgattcattgttgccaggtgcggtggctcacgcctgtgatcccagcactttgggaggccgaggtgggcggatcacgaggtcaggagatggagaccattctggctaacactgtgaaaccctgtctctactaaaattacaaaaaaattagccgggcgtggtggcgggcgcctgtagtcccagctactcgggaggctgaggcgggagaatggcgtgaacccgggaggcggagcttgcagtgagccgagatcgcgccactgcactccagcctgggcgacagagcgagactccgtctcaaaaaaaaaaaaaagattattcattgtttatatggaattcagatttagccgggcacctgtattgtatcgggcaagcccacaaatgtctgcttcgatgcacccctctggggttgggtgtgccccctaaccccccagcacagtcctggccactccagtcctgctccggggcttaaagaacacggactaggttgctcagtcatcgcccaccccccgcaccgatttcccaccctctcagccccggccaagacagagatcatggaagcttcatgggacagacagggaaactgaggcctgaggttgcaagtggcgaaagtggcagagtcatgctctgaggctgggtttgtctcgtttctgagaccccctgtgggaacagacatctcctcccccaccaaaccccaggagacagacagcccctccttccccagggccacccagaggctcattcttttgacagccaggtgcaccagcccggggggcaggtggggactaaagatttcctctcccaaccacaagcgtgactgccacctgctctggggctgggagtcccctgcctgcaggtccgccagcagcgctgcctgtcattccagcgtctgcagttctctcccggggcttccgagtttgggggtggagccaccgcttgggtaataaatttaggctgccaggccctgggaatcggtgacttgggcacctcctggcgagtgtgggagaaagcggctggacctgggccaaacttgggtgaacgatgaaggcaggaagaatgacctttaagcccgcctctgtcgctctctctcggccacctgctaatgatgtgaccttgggatggtccgttttgtcacctgtcacatgggggtggccttgacagtagctgctgccactccatggagtggggtccccacacaggcttcggatgcagtaggctgcggtacctgctgctcctctgcattctgagaaacccaaacaccccgattcatttcttggatagggaaactgaggctccactgcacagcggggcagtggggatggagggagtctgaaaagcccggggcctcagagcagacgtcggggcctgaagagggggctctagagacctatgacaacctcactaaagagggatagggcatgggaagcagccccccagtgctgcccagagaggatgcaccagtgtcctggggcagcccagcataggggcggggtccagatagatttgcgatggaggacgaggagaatggagcagcaatggggtgagagaggggcccagaggaggtgagttagagaccccggtcagctcagctcaaggtgagacgggctggaaagcggcccagaaaggatggaccaggttctgggcagccaatataggctcagggttcagaaaggggttttggaccagcgtaggggtgtgagtgtgtacgtgccccccagtgccgcccagagagggtgcatgagcagctcagcaagagggtggggaaatttgggacctgggagtgagacgagaagccgtctaggcctggcgtcccagcaagggtcttcgtttgcaggggtacagagagggtagggggctccctcccaccccctgcacccactgaccccccctcctttctcttcctcccctcgcagaccgtgcactcctgcagggggccccggatgcgatggagctgcgcgagctgacgccctgggctgggcggcccccaggtccgcgccgtcgggcggggccccggcggcggcgcgcgcgtgcgcggttgggggcgcggccttgcgggctgcgcgagctggaggtgcgcgtgagcgagctgggcctgggctacgcgtccgacgagacggtgctgttccgctactgcgcaggcgcctgcgaggctgccgcgcgcgtctacgacctcgggctgcgacgactgcgccagcggcggcgcctgcggcgggagcgggtgcgcgcgcagccctgctgccgcccgacggcctacgaggacgaggtgtccttcctggacgcgcacagccgctaccacacggtgcacgagctgtcggcgcgcgagtgcgcctgcgtgtgaccctacctcactcggccggcgcggcggccactccccccgcctcgacggcaccactggccggccccgcgaaagactgcgcgtgcgtagagcacgccggcgcggccccgggactctcgcgataactgtactgagataaagtgtggcaactcgagctggctggtgattcatcctcggcgaggggctcgcgtgtgggccacgtcgccgtctccaccgggaaagcggggaccagtggggggggcccagctgcagggtagtgggaggatgctgtttgctttgggggaagggtagatgcaaagtgggtccagtttatggcggacaaaaaggaaaatggggtgaatggggctatgttggcagggaccgtccttcctgcctccctacgggtccctctgcccgtcccgagcgtgttccggtccgcacctcttcgctgtgtgggcttctggggaggggaaagggaagctacgctcggatgaagagaccgaggtctaggtggaccccgtttccccagcttgttcccttccgcacctctccgcggtgcgggcttctgggatgaagacactgaagtctaggtgggcccagtttccccagattgtcgctgactgcacctctcgcttctgggatgaagagactgaggtctaggtggacccagtttccccagcttgttcctgactgcacctctctgctgtgtggacttctggagagggggaaagggggagacactgtgggtgaggagcctgagatccaggtggaatcagttccccagcgtctccctgtccgcactgatcccgct

SEQ ID NO: 8190 - DNA, 6000 bp, Homo sapiens
gtgaaaacattgtttcattttcatgtttgcttttacaatggtctactcatggcttagtggttttccattttaaacggtgatacgaagtatctgtttaatgtaaatttaaaccaaaagaaaagtatcggccgggcgcggtggctcatgcctgtaatcccagcactttgggaggccgaggcgggcggatcacgaggtcaggagatcgagaccatcccggctaaaacggtgaaaccctgtctctactaaaaatacaaaaaattagccgggcgtagtggcgggcgcctgtagtcccagctacttgggaggctgaggcaggagaatggcgtgaacccgggaggcggagcttgcagtgagccgagatcccgccactgcactccagcctgggcgacagagcgagactccgtctcaaaaaaaaaaaaaaaaaaaaaaagaaaagtatcaagttcatgaaaggtcacaccgtgcagatatggtaaaggctgagaagacctacccaagagaagtttggggaaacctgaaaataatgaaaccaacaccccaggaatgacagatgacctgaattctacacactgtgggtgaccagggggactgacattcgagctactcttagagaatttctttctttggtttttttcgagacgcagtctcactctgttgcccaggctggaatgcagcggcgtgatctcagctcactccagccaccgtctcccgcactcaagcaatcctcccacctcagcctcctgagtagctgggactacaggtgtgtgccaccacgcctggctaattttttctatttttggcagagacagggttttgccatgttgcccactcaggctggtcttgaactcctgggctcatgtgatctgcctgcctcagcctcccgaagtgctgggattacaggtgtgaagtttcaaattaaccgttttctttagagacaaggtcacaatccgtagcccagcctggagtgcagtcgtgccatcctacctcactgcagcctgcaacgcctgggctcaagccatcctcccacttcatcctcctgagtagctggggactacacgtgaacaccaccacaactagctaattttttgcagagacaggatctcaccatgttgcccagactggtcttgaactcctgggctcaagcaatctgcccacttcagcctcccaaagtgatgggattacaggtgtaagccaccacgcctggccatattgtgtattttttttttttttttttttgagacagtctcactctgtcgcccaggctggagtgcaatggtgtgatcttggctcactgcaacctccgcctcctgggttcaagcaattctcctgcctcagtctcccaagtagctgggattacagacgtgtaccaccacacctggctaatttcttatttttttagtacagacggggtttcaccatgttggtcaggctggtcttgaactcctgacctcaagtattcacccgccttggcctcccaaagtcctgggattacaggcgtgagctaccgcacccagcccagattgtgtatttctaataagcttccaggtcatgctgatgctgctggtgtggggacacactgagaaagtagcaggtttttgttgttgttgttgttgttgagacagagtctcatctgttgcccaggctggagtgcagtggtgcgatctcagctcgctgaaacctccacctctcgggttcgagtgattctcctgcctcagcctcccgagtagctggattgcaggcgcctgccaccacacccggctaattttttgtatttttagtagagacggggcttcactgtgctggccaggctgattttgaactcctgatctcgtgatccacctgcctcagcctcacaaagtgctgggattacaggcgtgagccaccgcgcccggctgaaagtcaggttcttgaaaaaaatctggtgtgtggccgggcacagtggctcacacctgtaatcccaacactttgggaggtcgaggtgggtggatcacttgaggtcaggagttcgaaaccagcctggccaacatggtgaaacccagtctctactgaaaatacaaagattagccaggcatggtggtgagcgcctgtaatcccagctactggggacgctaaggcaggagaatcgcttgaacccgggaggcagaggttgcagtgagctgagatcgcgccactgcactccagcctgggcaacaaagcgagactctgcctcaaaagaaaaaaaaaaaaaaaaaaaagaatctggtgtgctactactgcgcatgtcctcccaactctggtgctagtgacatcccattagtaacaatataggccatggctgaaggattcacacccagaaaatcagcagacgctacaaaacagggttcaatttgttttattaattgtcttgtggtcttaagaaagtgatagaaaaataagtaaaatttacaataaactatatacacacacataaatacatactaacgaatacattctcttccagagaagctgctgttaaatatttaccacatcccactggctgttcagaaaagtttaacaaccatgtaaatacatgtgtcctggattaggaactggcaaactttttctgtaaagacacaaacagtaaatgctttaagttttgttggccaaaaagtttctgttaaaaaaaaaaattagctctaatgtcacagctcaaaagtagccagagacaatatataaatgagtaagcattggctgttttcaaataaaactttatttacagacactgaaatgtaaatttcacaccattttcacatcaatagatattcttcttttggtattttttttcccaaccagctaaaaatgtaaaaaaatcggcaggcgcggtggctcatgcctgtaatcccagcactttgggaagccaaggtgggcagagcacctgaggtcagaagttcgagagcagcctggccaacatggtgaaaccctgtctccacaaaaaaacacaaaaactagctgggtatagtagtacacagctgtaatgccagctactcagaaggctgaggcaggagaatcacttcaacccgggaggcggaggttgtagtgagtcgaaattgtaccactgcactccagcgtgggcaacagagttagattccaaaataaataaaagaaagggaagggaaggaaagggagggagggaacaaggggagggagggaggaaccatttttagctcatagactatatctggcccacagattgtagtactcctcgctctcttttagatcatactcaaaaaggtgcagagctgggactccaacctaggtaagacctgaaacacaaggtcccaggcagagagacgaccaagtgcaaagacccttaggttggaatgagcttgtgctccaaggatggaaagacccacgcggctgaacagcaatgagcaagggggaacaaagcagggcatgggagccaagttcaggggacttcataaacctgaatacaaggtttaggatattccaagttcagctgagagccctctggaagcactgagtggccttgatatttccattttcagtctatgtgtatatatatatatatacacacacacacatatatatgcacacgtgtatgtatatatctgtgtgtatatatatagataaaaacaaagtatatatgtgtatatatatgggggaggttcttgctgtgtccctaggatggtggcagtggcactgtcacagctcactgcagcctcaacctcctgggctcaagtgatcctcctgcctcagcctcccaagtagctgggaccacaggcttgcaccaccacatccgggtaatttttgtgtttttgtagagatggggtcttgctctgttgcctaggctggttttgaactgagctcaagcgatcctcccaccttggcctcccgcagtgctgggattccaggggtgagctaccgcgtctggctgattatatttttcaaagactcctcagcctgcggccatgtgcagaaccaagcctggggcttcaaaagaatgcagcaaaggatagcagagaggccgctgtccaagtcttccatgagatagatacggacgatgtggcctagggtggtgacagcctgggggtgacaatgggtggctctgggctgtattttggaggcaaggccaagtccgaaggatttgctgagagattcatagcaggtgagtagagaacaactccagggtgtccaggaccctcccatgagccttgtgagtgaggctgatggtcccattttacagatgggtaacctggaggcgcgcggttcccctcccatgagcttgtgaagttgattctcgtagctccgaggggtcgagtccctcgcgccggctccccccgcccccaacgccagcacctgggtcccagggctgcgccccctcctagagcctgaccacgacccccgcccccgccgatgagctctgatttaccccccaatcccaagcaccccgcgccctctcgccacttcccccgtggtttcaggaaagcgtttgccgaaggtaccggctcctaaggcgggtaaactgaggtaggaggcaacgcgtctcccgcccgcgcgtgtgggaagcccccgcaggcccggcgatttacctggaggaaggcctcggctgcggcgccctgaactgctcactgtcccaccgcgggggaaccccggaaaacgagtgggaaaacgagtgcttcaagacccgcctcgggccgcgcggtgccgcctcactaaaccttagtcgctgccactgcgcatgcgcccttcccggccctttccccgccctctcagtcggcgggaaaaggaggcgggagatggctcgtgcgcaggtgcgtgctaggagcgcggctcgtcagggcaggctgctctgcagggcaggcgatccggggctcgcctccgcgcggcattcagcgcgcaggcgcgagctggccgcctcacacggagtcggcttgttaagtgcgcacgcgcgggagtttctggcagaaagcaggcgagcctgggccggcgcggggccttgtgggagggcttaaggaagtaaaatggcggacctggcgaacgaaggtaggggaggcgccgttggggaccggctggcggccggggaacgggcggcgggaggactaggggccacaagcccttggggggagcaccgcagagtgcaagggtttcgtccgctccaggctagcgccgtggcgggccttgcagccgccccctattgcgtcccctcaggccgggctcaccggcccggcccatcactcccggcaaccccagccactgcagccgtctggctagaggagccgggtggccatcgggatcgcagccctaaggcccctctgcgtcgcagccaagctcggggctgaagggggcgggaggcgcggccccagtgcttcggccacggatgtaaatagaccttagggcctggttgtggcccggagcgcgccacgctccctccccgccccctcgtcctccgccacccggcatctccccttccccggcctggctgcctatctcctaagcccgtgaggccctcgtcctccgcgggccagccgcacaccgcggacggaggaagcccaggccgttttcaccccgtccccgccccgaacttcggcccccacttcccgccagttccccccggatccttcggggcgcttcgtctccccctcatttaggccccgccgcaggatctgggccgccgaaaaccctggctgctctttggccctttttgctgcacttccagacaagagaccgtgcgagtccctcctctgtggagcgctgacagcccacctgagtgtttttgacaaggttacacttccagatcccccgagaaggcaccataaggctgatgtctgcttccatccatagtcgtgttgccatcgctgtagcttcaagacttctgaggcctatttttagctcccccccttttctagttgcacaaatgcaggcaagctctctacctgtctggctctgattcccccattcggtgctccctgtgactggagggttttccctaccgaattgcagtaatgaatgaatgatgatagg

SEQ ID NO: 8191 - DNA, 6000 bp, Homo sapiens
aaggtttcctgaaagtttctcccacgtggctgaaattcctcataaaagatttaacaagcgagtttaacaacctgaattctgtaacccaacctaccatatataaattcattgccgacttcaaaagcattgtgagataagttagctgctggcgtgatgtccgtgtcaagggaagaggtgggttcttataactctcagcattgagttgatggccccgtttcaacaaggcattttgactctaaaagcaaactgttttgagccgaccacctggtctcatcctgcagaggggcttggtgtttcagggtcctcaggaagggcacgatgttggttattcctggggtgtcgcttagcaggtggtggtctggatgggggcacagagcctgccacggtgaggcaggttctgctttaggtgatcagttactaaagccgtgtgtctggacccatttgtgctgctgagctctgttacaaatctcatgatcgcttctgaggtctgtgagcaacggcctccctcctgtctctctccccacagacctttcccctccagcctcgagcagggcagctgtttcgcaggccccgacgcggcatggtttaaagccccagtgccctcacgcatgaaaaggcagtcatatcagccacacatcagttctgcaaacccaacttcacatccttgtctgcctgccttctgttttttagctttaattttgaaaagctttaacacttacagaagaatttctctgtcccttttgtctgaagaccccatttagctttctccagtcagctccatgagtccattagaaaaaaggactgagaccctggtcctaccacacatacctccacttttatcgggaacaggtcttcaggcttcccttgactttcatgaccttgaggattacaggtcagctgttgggtagaagtgtctcagttggggcctgtccagtatgtcctggtggtgagacccaggtgtggcatcttggatgagaatgtcacagaagccatgcacagtactcacttgtccccttaccagcacggggtggccgtgctcctcgatcagggtgctgtctgccaggtttcaccactgtaaagctactttcccctttgtgctggatggtttctgagagacactttagactctgggactgtgtgtacctcatcacactcctgccctccagtgttcgcgcccagtgatgtctttagagtgatgtttcccgctgacgactgccccatgggattttcttccttttttttttttttttttttttttttttggagacagagtcttgctctgttgcccaggctggagtgcagtggcacaatcttggctcactgcaccctctgcctcctgagctcaagagattctcaagcctcagcctctcaagtagctgggattacaggcactcaccacccgtgggatactctgagcaccatccctgccgcgttgattagtggtgttcactggaaggaggagcttgcccttctccccacgtgcttgttccttgatcgattgtgtcaacatagacaggcgagcttctgttggcatcagtgggtgaccgtctatggttactggtttttatttaatgttcaggttgtcccagatttggccagtggaagccctgtcaggcaggtccccgttgttcatttgagcactgcccttactttgtcacaacaagagcctcccggctcagcctcttttctcatcccagtcctggaatctgcatttctcagaggcacgctggttcttcagggaacatggtctttagaaaccaaggtctgaaatcactccgtgcggtactgcgatctcactgactcaggtgtagccctgctcccggccctccgcggacagagctggggacacacctttgtccacatgatctcttactctctgcctgcctgcctgcctgcatgtggagatgacggacagagctggggacacacctttgtccacatgatctcttactttctgcctgcctgcctgcatgtggagatgacgccaggggcacgtgggtgcctcccttggtatattcctccctcttctggcactaagaaaccggcaccctctgtcctctgtgcatcaggcatcactccctgcccaccgcatggctgagcctcctccccaccctgcaccagcgccgtccacgcacagaccccagctccagccaggctgccttctcagcatttgatgcacacagtctcattcccatcccttccctggttaaatcggggctccctggggggcaagcatggcttcccacagacatcacttggggctctctgaggcaggcgaaaagcaccctcagacagggagcctgccagcttcccaggagggcaaaggctgccggcgggaggggtcctcttcctctctggagtgatgcgcatccctcagagactggtgcagcatcctctacaggcccacaccctttgggtatgtggcaggcgtcgggctctggccatgattcagcagcttgtgttgcgacctgtgttgcagaagaaaatttctggaaggaatgagaagagaccacccttgttttcgtggagcagggcctgtgacagggacctccagattttggctacccctggagcacgccttgtctgtctgcagctctggagagggccacgctctgggcctagcactagtggcaggtcggtggcagggattatccaagtctcctgcttccgcttggcagctcgggccagcccccaggctcccctcagcgttagcgccagcgctgcacggagcggagtgtggaagggcagtagtcagtctgtgaccaaaacatcagcgtggagagccagcttgaagagcttgctaaaaactatctaaattgtgaatttgaccttttaaaaatgtatctaaattgccagtcgtcttctgcatagctccgtgctttggaaatgtaattgagtgtttccttcggaaaaggaacatctggcggctcacccccgcatcctgcaggatctggctctcctgagtttgtttttttatgaccagtctgttacgggagaggcaccagctctgctaacacaggctgccagaagcccctggggctggactccctcatacaactattatagtaagaagggttgctgcaatcctcttgctgcccaggcacagcggcgcctccggggcacagcgggagaggggtcttccttggcctgctgaatcttgatttggagtctgaaaatttgggctgacaaggtgttttgggttttgttgtcatcgttttagtgtacaattgagtggttttagtacatccacagagttgtgcgaccatcacgtgattaattttagaacatttccatcatcccaaaaagaaacctcatccctgttagtcacagcctgcccccaaccccctcccttgagccctggtaaccgctcagctcctttctgcttagtctggcatttcacagaaatgcaatcagacagcatgagggggtgtttttcttttgatttacacctttaatttcttccaacaatgtttttgttttgtttgagacaaggtctcactctgtcgcccaggctggagtgcagtggtacagtcgtaactcaactgtaacctcaagctcccaggctcaagtgatcttcccacctctgcctcctgagtagctgggactacaggcatgtaccaccatgcctggctaagtttttaattttttgtagagttagggtcttgcagtgttgcccaggctgatctcaaactcttgggctcatgcagtcctcctgcctcagcctcccaaagcactgggattacaggcatgagccactgcacccggccctaacattgttttatagttttatcttgtgaaatgtattcccaagtattttattccttttggtgttattgtaaatggaattattttcttaattttgcttttgggtcattcactgctagtgttagaaacacaatcgatttttgtatattgatcttgtgtcctgtagcttgacaagggggtgaagcttagcacaaacgcagggctacctccaggagccataatgccacagtctctgtgccttgcccaggaacaggcttgcctgcctgagtcacaggccttttatgacaatccttcctgttgtggatcagattagaccaccatccccactccctgtatgggcacagttgccaagacacacagatgaaggggtccatgtggacaggtggctgggcgaggctgggctctcgagccatcccaggagctcgtgggcattcacctttccctctagttttgtgaatttgtcagcccggactctggcccagggggagctggcctcctccacggtggccaggagtgccccctcactgagacgggaagctccgcaggcacatctggaaaggggaggcaggctcactgtgtgccacctttgaccttttcatcacaaaaacctgtctcacttcccagacatctgtagtggtgccaaggttcttcctggccacagccgcatcctctgacagacaagccttctaggaaagggaagtggggcctgagcgcctgtgttccgtggctccctgacattctccagagccaggtacagggccgctgagcagctcggctcctgagcctgcagcaggtcatagacagctgggagggcggctgacgccccacctgcccccatggtcagcagctggcccaagagccatcgttcctcctgcccttgtctctcccctcctccaggcgccttccaggcctgctgatcggacgagacttctgttgtaatttggaaatgttctccctggttctccaggcccgaagtcactgaggccaagaccatagtcctctcctgcccttgccccccaggcccagccccagcccaggcaggcctgctgttgatattttgtcttgtgcttttagaggaaaggagcagtggcttccggttgaagccaccaacgctgatccacggccaagcccccagcgcaggtaggtcgtctacctccctggggcggggggtggctctctgacgtttttcagacctctgctaggccacaccagggcaccgcgggctcagcctgctttctagaaagatcacttgtaacttgacccacgagccctggaaagttcctttaaagagaggctgtctgagcagggaggttgggacccctgactgtgagcgtcgtgtgttcagaaaagtgggcagtggtggcacgggagcaggctaggcggggtgcatcgggcgggctccatgcccagcagtagcgcacttggttcagcctgtctgtccttcatgttctggcccccacataccacagtgttcgccccagttagcagggtggctgcattccagcggcgcgctgctagtgagccggctgctagtgaggctgccggggatgctgcacagggcagggcacatgcaagggtccttgtcccatctgcctttggcagagggacttcctcagcatggctgttttgaaaaacaggtgcaaaatgtgcctgtacgtgaccccacaccgagtcctgagcctccaggtagctgcctgtgaatgcactgctctcctcccacagtctccacttgactgttgagtctgccggcgccccgccacgttactgtgctaactggattaattcacaggcgtcggtcactgggagtttcatgtaatcacatgtaaaaataacagtagccagatctcctggccagctgttaaaaaaagacctcaagtttttaaaaaagtgcttccctgcaaagtctagcctgcaaggggcatgaaatgggatgccaggggtcagtctctgaagcgcctgggggcaggcaggggtccacgggcactgggaaggccgccttctgttcctaggtctgccaagccagaagcccaaggagcagcagcggagcgtgcttcgcccggcagtgttacaagctccgcagccaaaggcgctgtcccagactggtaagaaacagcagccctggcgcccaggcccagacggcagggtagagcgttcccgaagtcgcacccgggacagcagtgttgcgacagaggtgactgctgaatgcaccagaaatacagagagatcagggaagat

SEQ ID NO: 8192 - DNA, 6000 bp, Homo sapiens
cagcaggccgaggaggtggcggtgctcgaagccactgcaagggccctggggaagcccaggcctcccctcccgcctccccagcttggggacacctttctgtaggccccttacccagccatgtctggacatgccagacagctgtggcatgtcataaactgtcctggagtgacatcatgtcatgttgcatgatttggcatgttggggcacatttggcgtgagggaagctggtgcacatgggtgtccagggcctgatggggtgtggccaggcaatgaagaaagactcaggtgtctttggcctggcaccaagtggaatgtgaacttcatatcagtggggtcaggccagaagcaacctgggctatgggaccaggtccctgggactgacgcatttcgggggtccgtgaggttgcatagccacagctgaagttccaactggcctgtctcccgaagcccagggagggattcatggggactggacagagcttctcctggcagccccttcccagggagatgctgggtttggctggcagattttcctgaagggggccgggctcagtggtgcacatctgtaatcccagcattttgggaggccaaggtgggtagatcacttgagcccaggagttcaagaccagcctgggcaacatggcaaaaccccatttctacaaaaaaatacaaaaattagccaggcgtggtggcatgtgcctataaagatatttaggaggctaaagtgggagggtaacttgagcttgggaagtggaggttgcagtgagctgagatcacgccactgcactccagtctgggtcacagagtaagaccttgtctcaaaaaaaaaaacaggccaggcgtggtgactcatgcctgtaatcccagcactttgggaggctgaggcggggaggatcacctgaggtcaggagcttgagaccagcttggccaacatggtgaaacccccgtctctactaaaaatacaaaaattggctgggtgttgtggcacatgcctgtaatcccggctactcgggagactgaggcaggataattgcttgaacctgagaggcgggggttgcagtgaaccgagatcgcgccaacaacaagatcgtgcccgggcaataagagcaaaactctgtctctaaataaataaataaaacacaaaacaaaacaaaaaggagggagactgaagctggaatggttcagattcagggtgtggatgacgagttgctactaactcaaagctaaggtcaagggtttctggactccatgtggtcgagcttgcctgtaatcccagtatctcaggaggccgagggaggaggactgcttgagcccaggggtttaagaccagcctaggcaaaataggagagtctgtctcaaaaataaataaataaaataaggtaaagggtttctgggtgggggacaggcatagcaaaggtaatagtctgggactcagggggcgttgtacttcaagagaaactcagaatgaatgccaatggtggccagttccagctttctcctgggggcccaggagctgtgggacgtgtcaggttaatagcaggcaatgaattagcatgtcatttgcataagtcacatctccctgcccctccacaccaggactggctgagtctgggaaaggggagcttggaacgacccagccaagcttggattagtggccagctgtcccccttcagggtggcagctgaaacccgagacagggattagaaagactttcattcccagccttgggggcaggtgctccaggcctcacctgtgcaggtgtgttcaccgcctctcccagggcaggaccacgtcagcctgaggtcagcgccagtcagcggcctggacttgaatccagtcaacctgaccccagaaacagaacaagaagtatggtggcgagcacagtcccctccagcgagggctggggctagtcaccttccgacccacacgctgtccctggacttgggccaactttgaagaaagcagggaaatggaggcagaccaccttgctcgtgttggggtggggcagagaagctgaatttcttccctgtaccctgccgagccccagagtctaagacctgagttcctggtcccaccaggttgcctgtggaggggcaaagggagccaaggtcacatgtgggaggacggagacaggttcccaggctgccccagcaggatctggccattcccacgggtgccccctcagcagatgggcctaggcccctttgtccctggtttgcggccgccgcaaggtcaaatgttactgcagggccgcgggcaggggtcagggaggcggggtagagccttgatccacccccaggcgggccccagggggcacaggggtggccaggctactggaagggggtggggcagcctttgggactggaactactggagtttctgggatctgcgatggtctttcttcccccatctcccacccagctctcagctgcctcgcaagacttgtctcccccaaacctagttctttgctccctccccttcacaatcccctcaagattccttgagtcttctctccctcttctttttttttttttttttgagacagggtcttgctcacgctggagtggagtgacgtgacgtgattataacccactgcagccttgaacacctgggctcaagacgggtctcactttattgccccggctggtcttgaactcctggtctcaagagatcctcctgacttggcctcccaaagtgttgggattacaggcgtgagccacagcgcctgtctctcatctaaatctcttttcaatcccttctgagacctccaccccaatgctccccaccaaagatcctagcaggtccaggcaaggggcctaggatccctgccctcatcccaaattaccagtcacattcccatgcagcctcagaaccaaagggtcgtctctgcccacccacgccttcctctctcccagcagggattacatcaggctgtgggcagaacccgactctagacctcgggaagtccttgctcatgtctaatcctagtccttcctgcttttcgtgtttactaacgcctcctcctccacctcccaggcagccagaacgtccctggagcaggttgagaggcccagggctgggtgtgcctggctctcccagaacctcagtttctttttaagtgttgtaagatctctaagaatctttccccctactccagggagggcaattcttcaagtctcatcagggctctgggaggcagaggagggggtgcgcagaaggcactgtcctggccagagctctcagaggcccagctgcatgctctggtgtccagctctgggctcagggcggggtgggaccacagtctgggtggctggggctgcaagactccgaggtgaaaggtcactcctggaagggcttgtccagccggttaaaggttaacctgcccagagccagaggctcgccagcccgggcctcgcatacaaagggtgcttaataaatgctggtcgggcgggccccagccccggtactgggggatggggtgagttggaggtggcggcagctgcgaggctccagggcgcctggaagagacatctgcagtccagccggccgccaggccaagccctttctgcaaagcacagaaagaaaaggaaattaaaagggaaaaaggggcaggcccccagacagggcatgcctgtcgcctccagccgcgcggggcgggtgggcgccctgcccccggaggccagaaattctgcagaggggccccctgacctcgcggccccggccagccggtctcagaccacaacatcccttccccctggagattccgggcaccaggtgttaacccgagcagagaaagggtggggtgggggtcagacgcggcgactttctggaagaggaagcaaacacaatctagggtgtgtgtgtgtgtgtgtgtgtgtgtgtgtgtgtgtgtgtctgtctgtctcgcgcgcgcgtgtgtcttgcgcaggggcgtaccccccccccgggtgccactggccccccatcattgctttgccaggaactgtggggtggggagaggttccgaggggcgcctcgagggtgatcgagcgacccaacgtccaaggccagaggtggaggggagggccttggagagacatcttggcgaggctcaaggaagggcagagggcaggcgcggctgaggctcccgccgcggcccggcaggggttaaggcccgagctgggcgagggcgagggcgggggtgcggggggaggggcagagggaggcgggggagggtcaggccccgcggcccagcgctcggcccccgtccctcccgccggcccgttcgcccggcgccgcgcgcggccacccatgcccttataagggcggccgtcgccggggcaacgagcgcccgcccccagcccgcggcgcgcgcccctgcccccgcccccgccccccgcccgccccgcgaatggaacgctgtgtgtcaaaccggccgcagcgcgaggccggcgcgcggggtcggtggcggtggcggcggcgagagcgaggcttgggcccaggcgcaggcccaggccaggcaggagcggccgcagcgggggcggcagctccagaggcgccggcccagcggccctgcaggcccggagcggcagccgcgggcgccgggggacccagggggcgcggcgatcagccccggcgcgcacccgccgcccctccccccccgccacgggcggccgcgcaacttgcggccaaactttccccccggcctcccgcgctcggatggcggcccgctgagttggccgcagcccccgggcgagcggcggccaggccagaggacgccccctgcgcggctcgggccgggccatggcccgcgcgcccccgccggggccccagggcggcgggacgcgagtcctctgggcccccggcccgcgcctctagcgtgcccctcccggccccgggcccggccccgcgcacgcgtgggaaagttggcctggaaccggcccgaccagttccgcccgggcgcgaggaccggccgcaggaagttgctgcaaaacttttttggggggtgcagcccgtgccccccgcgcgccggggccgaatgcgcgccgcgtagggtcccccgggccgagaggggtgcccggagggaagagcgcggtgggggcgccccggccccgctgccctggggctatggccatggtgaccggcggctggggcggccccggcggcgacacgaacggcgtggacaaggcgggcggctacccgcgcgcggccgaggacgactcggcctcgccccccggtgccgccagcgacgccgagccgggcgacgaggagcggccggggctgcaggtggactgcgtggtgtgcggggacaagtcgagcggcaagcattacggtgtcttcacctgcgagggctgcaagagctttttcaagcgaagcatccgccgcaacctcagctacacctgccggtgagccccccatccgcgcgccgccgccgtgcaccccgccccgacctggggcaggcctctgacctgctcggtcaccttgggcctggcgctgaccttccctgggcctccactgccccctctgagataggggcacagcaccctcctcccgcattccatggctgggattgtgtatacagtcggcgctacatcgttgcaggttccccccccatcaggtggtccctggaggcttttgccccagttacttgcttctccttccctccgctttttctctggggaggggtcatctccgcgctggggtgggggtaggggtgctgtcaggggtggtaacccaaccccagggcacccgttctcggggatcccggcgcgcgggatgccctcgagggaatcgaacgtggaacttggaccgtggagctcgcagcgtccaggggccattgtctgcggccgcgcggatcgatacggcgcgcccttggggtcaaatatcacttccaaagtcgctgtggctacggaggcggcagacggagggaggctggggtggcacggggcggccttcttcgcatgaggggcccagcggtgggggtgggggtgggagctgggcttgcccatctcagggaacccc

SEQ ID NO: 8193 - DNA, 6000 bp, Homo sapiens
tgagaggccgaggtgggtggattgcctgaggtcgggagttcgagaccagcctggccaacatgatgaaaccctgtctctattaaaaatacaaaaaattagccgggcgtggtggcaggtgcctgtagtcccagctagtcaggaggctgaggcaggagaatggcgtgaacccggcaggcagaggttgcagtgagccgagatcacgccactgtactagagtaaactctgtctcaaataaataaataaataaataaataagaacaaagccgggcgtggtggctcatgcctgtaatcccagcactttgggaggctgagatgagtggatcacttgatgtcaggagtttgaaaccagcctgcccaacatggtgaaaccccgtctctactaaaaacacaaaaattagccgggcatggtggtgcgcacccgtgatcccagctactcaggaggctgaggcaggagaataacttgaacccgggaggcagaagttgcagtgaaccaagattgggccactgcactctagcctgggtgacaagagcaaaactcaaagaaaaaaggaagaacgatttatcctatttaccagtaggtcaaccgagactgagtgcaatgtgactcgtcccaaaagtgttgtaattcctcttcagcctatttcaggactcttgcacttttctaacagtggaaacttagaactactttaacagccacaagaatcaatacaggctggatgagaggctcatgcctgtaatcccggcaccttgggaggccaaggtgggcagatcgcctgagtccatgagttcaagaacagcctaggcaacgtggcgaaaccccatctctaacaaaaatgtaaaaacttagctgggtgtggtggctcatgcctgcggtcccacatactctggaggctgaggtgggaggatcacctgagcccaggaggtcagggctgcaataagccaagatggcaccactgcactccagcctgggcgacagagtgagatcttatcttaaaaaaataaataaataaataaataaatataaatacagttccaccatatcaggcacctcatttgaaacccaccctgtttatgcttttacctcatttagtcataagagtaaggcaacaaggtcatactcttgatcccggtgggctaggggaagtccccatatgctggtgtgggacctccaccccagccaatgtccaggctcttgacaccatctcgggaaggaacttgaggacaagtgggaaaatactgaaagtacaaagatgtattgcaaagtgaaaagtacacactcaacaaagaggagtacaggtggactccagagagagtctcctgcagggggggtttggggctgctaccttaatgggtttctctctttttgttttgagacagtcttgctctgtccccaggctggagtgcagtggcacgatcttggctcactgcaacctccgcctcacgggttccagcgattctcctgcctcagtctcctgagtagctgggactacaggtatgtactatggatttctttaatcaaggagtggaatattcatgaagattcctagaaaaaggagatttttgagaactgtggtgccacccacttttacaccaaatatgggtgttcctgtaaccgtcctggtgctggtgggtgtgtgtttatgttaatgagcatataacgaggtcctaggtgagacctaggtcatatgtagggccttgttgggtccaatgtgtcttagccaggttggtccacacctagggttttcaagagtcttatcagcccccacctgctgcaactatttcaacagtttccttttgctagtcatgtgaaactgctgcctggaattttctattctcctgtgactaccctgtgttattcctgtctcgctttttttttttttttttttttttgagatagagtttcagtctgtcggtaggctggagtgcagtggcgcgatctcggctcactgcaacctctgactccttggttcaagagattctcctgcctcagcctcccaagtagttgggattacaggcacgtgccaccacgcccagctaatttttgtatttttagttgagatggggtttcaccatgttggccaggatggtctccatctcctgacatcgtgatctgcctgcctcagccttccaaaatgctgggattactggcatgaaccactgtgcctagcctcctgtctcactctttttaatttttttatttttatttatttgtttatttatttatttattttgagacggagtcttactctgttgccaggctggagtgcagtggcgcgttctcggctcactgcaacctccgcctcctgggttcaagtgattcttctgtctcagcctcccaagtagctgggattacaggcacgtaccaccacgcctggctattttttttgtattttttttagtagagatggggtttcatggtgttggtcaggctggtcttgaactcctgaccttgtgatccacctgccttggcctcccaaagtgctgggattacaggcgtgagccaccgtgccctgcctttatttttttatttttgagatgcagttttgctcctgctgcccagggtggaatgcaatggcaagatcttggctcaccacaacctctgtctcccgggttcaattctcctgcctcagcctcctgagtagctgggattacaggtgcccgccaccatgcccggctaattttatatttttagtagagaccaggtttcagcaagttggtcaggctagtctcgaactcctgatctcaggtgatccacctgccttggcctcccaaagtgctgggattacaggcatgagccaccatgcccggctttctcactcctgtttgcaatttacaggcaaggaaactgaggcacggggaggttaaggaactgggctcagtgttacacaggaaggaagtgacagagacaccaggttctgccatttccaacgctcatgttaatcacttgtttcgcttctaacatccctaggtggaaaattccacaatctcaaacgatgggcctgagtagacataataagttacagaagagcatggatcacatagtcccatttcttttttataaaggcatacacatatgtcagaggcattccaaccacagcgattctgtcttgaataggagcttggtaaaataaggctgagacctactgggctgcgttcccaggaggttaaggcattcttagtcacaggatgagataggataggaggttggcacaagatacgggtcacaaagagcttgctgataaaacagcatatgcagtaaagaagtcagccagatcccagcaaaaccaagatggcgatgagagtgacctctagccgtcctcatggctcattatacactaattataacgcattagcatgctaaaagtcacacccaccagcacgatgacagcttacaaatgccatggcaacgtcaggaagttcccctatatggtctaaacgggggaggaaccctcaattctgagaattgcctacccttttcctggaaaactcatgaataatccacccgttgtttagtatataatcaagaaataactataagtataatcacagtgaacagcccaagccgctgctctacctggagtagccattcttttattcctttatttttattgcattttatttttgagacggagtttcgctcttgttacccagactggagtgcaatggcgcaatctcggctcaccgcaacctcggctcaccgcaacctccgcctcctgggttcaagcgattctcctgcctcagcctctcccgagtagctgggattacaggcgcccgccaccatgcctggctaattttgtatttttagtagagacggagtttctccatgttggtcaggctgatctcaaactcccgacctcaggtgatctgcccacctcggcctcccaaagtgctgggattacaggcgtgagccaccgcgcccggtccgagactgagcttttttaattcttccaatcaccaagttattgaaaccatttttgcaaaattttaacaatgagaaaattctgacatctcaaatctggccaggcacagcggctcacgcctgtaatcccaacactctggaaggccgaggtaggtggattgcctgaggtcaggagttcgataccagcctggcaaacatggtgaaaccccatctctactaaaaatagaaaaattagccggccgtggtggtgggcacctgtaatcccagctacaagggaggctgaggcaggagaatcgcttgaacccaggaggcggaagttgcagttagctgagatcgcggcactgcactccagcctgggcaacagagtgagactccatctcaaaaaaaaaaaagtaaaaataagcccggtgccgcagctcacgcctgtaatcccagcactttgggaggccgaggcaggcggatcatttgaagtcaggagttcgagaccagcctcgccaacatggcgaaaccctgtctctactaaaaatacaaaaaaatgagccgggcgtggtggcacatgcctgtaatcccagttacttgggagggtgaggcaagagaatctcttgaacccaggacgcagaggctggagtgagctgagatcacaccactgcactccagtctggggtgacagagtgagacctctccaaataaataaataaaaataaataaaactaacaagcagcacgactccaaaatcagaaaacttgtaacgaccaaaaaagtgcaaacgtgccttaaatcagtcatgtgcgacaagcagctatagctagggtttggccgcaggctcagagaagcgcatgaatgagctaaagccacaaagcgcggggctggaggtttggctcccaagaagcgaggaaatgggttcggaactcttctgccaagtcccagtagatctacccggtaaacttccggtgagtttccaacttccgtgcggggcagcagcttcggctggtcctaagcggaccggaagttcgtcaagtttcacgctccgcccctcttccggacgtgacgcaagggcggggttgccggaagaagtggcgaagttacttttgagggtatttgagtagcggcggtgtgtcaggggctaaagaggaggacgaagaaaagcagagcaagggaacccaggtaggtgcacccgagagtggggagacgcaggaggagccccgaacccggggcttctcggcgctccccgcgtactccgctctgcccccttctctccttccatttcctcccctcggtaattcgcgcctcccgcggctgtttccagggcaacaggagtagttcactccgcgagaggccgtccacgagacccccgcgcgcagccatgagccccgccccccgctgttgcttggagaggggcgggacctggagagaggtgcgagggcggagcatgaatggaggaggcggggcggggcatgatgggaggtgatggggcgggacctgcagcgcggtgcgggggcggggcatgaagggaggaggcggggctgggggcggggcatgatgggaggagatgtggcggggcctggagcgaggttgtgggggtgcagtaggaagggaggaggcggggcgggggcggggcatgatgggaggggatggggacctggagcgaggttgtgggggtgaggcttggagggagggatgcatatggggcggggcaaggtgttgggaggcccatgatgggggctttaggggctgaacctggaaggttgagggcggagcatagtaggaggaggtggggtcagaatgagaaatagggatgcttggggcagaagtgaggtagagtcttaagaagaggaggtggggggaaactacatggcatggaggccgtgaaggcagagcatgattaaaggagaatgggccctacctagaaaaagcaggtggattggacctgagggggcggggcctacagcaggggcggggcttaagaccaagctgaaggctggcgtggaacagaagggggcaggtcttgttagaaggatggggagggtttgtaggctggcaggaaccagggttgtggctgagagtagggtctttggagagat

SEQ ID NO: 8194 - DNA, 6000 bp, Homo sapiens
cctccctttcacccctccctttcacaggggtctgggtgcctcacagggtgggggccggcgcctgctaacctcattaccactgatcccttgatcccgtgggctgcagtctggccctaggctggaggaatccaattaggatccgtggccccctggttgctgccgtggagctgaagaggccagggacgccccacaagggactttccccagccccattctcttgcaggagctgccttccccaattacccccgactccagcctcagaggccagttccctggccctgacaccttggtgacctcttgtctgctagcgcggccaccgcgttctgaacaaggatttttttttttatttgatttgtttctcctccacccttcacccatgctttttgtttgcccaaggcaggaactctgcccgattaaggcaaagggcagcttaccctttcttctgaccccgggcgctgggagcaagagtgaggcccagctgtctctgctcaggggacccaggtggacgggcgtattctgggctgctgggcctagaactctgccaaacccccttagaattcaagtagaacccagagatttctgcatggatttctggggttcaggaatagaatctagcctattggacgagatctcctgtgctgggtttcaggttcctctggggactgtgtcgtgggccaggctggcagttctttctaatgtctaacctgagcctcccctgctttgaagtttttttttccttattttctttatttatttttatttttatttgagatggagtctcgctccatcttccaggctggagtgcagtggtgtgatctcagctcactgcagcctccgcctcccgggttcaagtgattgtcctgcctcagcctcccgagtagctgggactacagatacgggccaacacgcccagctaattttttttttttttctgagactgagtcttgctctgtcgcccaggctggagtgcagtggcatgatctcggctcactgcaggctccgccccctgggttcacgccattctcctgcctcagcctccggagtagctgggactacaggcgcctgccatctcgcccggatatttttgtatttttagtagagacggggtttcaccatgttagccaggatggtctcgatctcctgacctcgtgatctgcctgcctcagcctcccaaagtgctgggattacaggcgtaagccaccgcgcccggcacgcccacctaatttttgtattttgttttgttttgtttttgagacagagtctcgctctgttgccaggctggagtgctgtggtgccatctcggctcactgcaacctctgactccctggttcaagcgattctcctgcctcagcctcctgagtagctgggattacaggcacatgccaccacgcccagctaatttttgtatttttaatagagatggagtttcactatgttggccaggatggtctcgatctcctgatctcgtgatctgcccgcctcggcctcccaaagtgttgggattacaggcgtgagtcaccgcgcctggcctaatttttgtatttttaatagagatggtgtttcaccgtgttggccaggctggagtctccaactcctgaccccaggtgatccgctcgcctcagcctcccaaagtgctcggattataggcatgagccaccccacccggcagctttttttattttctagagacagagtcccactatgttgcccaggctggtctcgaactcctagcttgaagcgaccctcccaccttggcctcccaaactactgggattacaggaatgagccaccatacttggcgtaaagctgttgttttttggtctaggccttggtgggagaagctgagagaggcagctgaggggctttcttttaaaactgatcactccctgtggcccttttaagtttgggggtaactttcttgtccctgcccccataacatggattttgcctctacttgtctattttacctaaaatcctcatatatctcaagtcatggcctcagagcaaacagcctcgccagaagtctccaaaagcctcgggtggaaatatttatgatgacagctcatgctttaagcacacctgcctcgggtcctttgcacgggctcttccctctgcctggagtgcactttttccaggtccatacatggctccctccctaaccttgccttcaaggtttgctcaaacatcacctcctcagggaagccctcctgatccccctgtatttgacgccacctgtcttgttctgtaatttgcttacacccagaatgtccattccctgtgggcaggtatttttgtctgtcttgttccccagcgcctagaccagggcttggtacacagtaggtgttcaataaatggtccttggcttgaattaccatgtaattacctttcctgtgtggcaggcattattttaaggtatagattctcatttaattcagtgattggtgacatcgtttttgagacggggtctcactctgtctggagtgcagtggtgcgatcatagctcactgcagccttaaactcctgggttgaagtgattctcccacctcagcctcctgagtagctgagattacaggtgttcgctaccatgctgggctaatttcttaattttttgtagagacggggtctcgctatgttgcccaggctggtctcaaactcctgggctcaagcgatcttcctgcctcagcctcccaaagtgctaggcttgcaaatgggagccactgtctgcattttacagatgaggaaactgaggcacacagcagattggtgaggccatttgtcagagagcaacagagttgtgattgggatttgaacctccacagtctgggctgaagagctggggaggggtttgaggaagagtgaacagaaagtgcaaaggccggccaggcgtgggggctcacgcctgtaatcccagcactttgggaggccgaggtgggcagatcacgaggtcaggagattgagaccatcctggccaacatggtgaaaccccgtctctactaaaaatacaaaaattagccaggcgtggtggcaggtgcctctaatcccagctactcgggaggctgaggcaggagaatcactcgaaccccggagtcggaggctgcagtgagctgagattgtgccactgcactccagcctggtgacagagcagaactctatctcaaaaagagagagagagagagggagagagagagagaggaagaaaggaaaggaaagaagggagggagggagggaaaaaagaaaaagaaaaagttcaaaggccctggggtgggaatgtggccatgtgagggagtggtggttgctcacaacccagtgaacaaagcgggaggaagcttcctggaggaccggggaaccacttttgggccccatccacctatccccatttgacagttgactcagactcagggaccccttggagcgggcttcaacccatgccctggcttctccgcttagctctgttcgcccctggcttctgctcgcgttcccctccggtgtttgctctacacagagttgacctggagttcacggaggtgatgagatggggcatgccagctcattaaagctcattaattagtctgctggcaaccagcccagtcagccctgccatcccgcccaccccggcacaagccaggcaggcacatggccaactctcttcctcttcatgcctcagtttcccttttctcacccacctggtcactgcagacgtgcccaagccagcagcagggcctccccgcttcataagcaaggctactgatggcggctaatgtttactgaggacctatggcagcccccctgggacccctccttactgtaggtcccccccaacccttccctgcactgtagcctctgcagggacccagaccggccctcaggggtcaccatctggtggggagggggatggaaggtagagaaatgatccctgttccataggagagagccagtgctgggtgggtattgatctgttgctttggggaccaagctggccagggtccccaagtcctccatggcccatcctcagctctgggaaccccatgactatctgttaggaggctccaaaaggtttattagatgctcctccttgtccccaggagctgggggtggggggtggtggctggacctagacagggactcctggactcttactttctaaccagcctggcgcccatggggtggggttgggcattctgggaaaggctgggcctggaggctttggaggggagggcctgagtgaccccttgatgacttttgtctccctttcccgttattctccctacctgcccccccccacctgccccccaccccatgtctctatgggcacctacttggcccctcatcccccctcttccggccctctcctctctacccctcgcttcccttcctgtctctccaatctcctctcctcccggccttctgtgccccgccctcccctcccccatctcctgtccctcccccgtttcctgctgcccgccccccccccccccgcctcccctcccgcccccatgtccctcctgtccccgcctcccgcagcggtgcagcgcggccgcatcccgcactcgctgcctggtgccgtggccgcctcctcgggcagccccccgggctcggcgctggcggcagtggcgagcggcggagacctcttcccggggcagccggtgtccgaactgatcgcgcagctgctgcgcgctgagccctaccctgcggcggccggacgcttcggcgcagggggcggcgcggcgggcgcggtgctgggcatcgacaacgtgtgcgagctggcggcgcggctgctcttcagcaccgtggagtgggcgcgccacgcgcccttcttccccgagctgccggtggccgaccaggtggcgctgctgcgcctgagctggagcgagctcttcgtgctgaacgcggcgcaggcggcgctgcccctgcacacggcgccgctactggccgccgccggcctccacgccgcgcctatggccgccgagcgcgccgtggctttcatggaccaggtgcgcgccttccaggagcaggtggacaagctgggccgcctgcaggtcgactcggccgagtatggctgcctcaaggccatcgcgctcttcacgcccggtgagccacgctccgaagagggccgcgggatggggggacccaagggaggttaggaggagggcggcctggacccagactccggcccccatagcgccccgctcgctccctaggcctggggccctgcacgcgccgtgagtgaacgctcttgggtggctgtagaggggtgatgtaagcagtgtgacactgtgacacccccactccgtgatcccaggactctcggagaactctgaaccccggaccccagacccaaggctgggccaggaccagggcccagaccccagaaccctcttcctgttcccaggctccctgagacccctactccctcaccaaagggctcttcaggcttagtgagcactgatagcacaaggttggggggacgtgggagggaaggtcctgaccccctggttctggccccctcaggcccccactgggctcccagggcaacctccaggtagccagggttgtagggatctgggtaggggcgtggctcggaggcccctcccgttgaggggcggggcaaccccagaactttcttaaccatcagctatctagcagtggtagcccatcgtattccagcgactggcggtacagccaaattttttttttccactttatttttttatttgtatttccattttttgagactgggtctcaccctgtcacccaggctggagtgcagttgtccgaacacggttcactgcagccttgatctccagggctcaagcaatcctccctcacacttcagcctcttgagtagctgggaccacaggcgtgcaccaccattcccggctaatttttttttaaacgttttctgtagagacgtggtctcaccgtgttgcctaggctggtcttgagcttctgggcgcaaccagtcctgcctcagccacccaaagtgctaggattacaggcata

SEQ ID NO: 8195 - DNA, 6000 bp, Homo sapiens; identical to SEQ ID NO: 2030

SEQ ID NO: 8196 - DNA, 6000 bp, Homo sapiens
ctcaacctgacctcgtgatccgcttgcctcagcctcccaaagtgctggcattacaggcttaagccaccgcgcccagccctagagacagggtttcaccatgttggtcaggctggtctcgacctcctgacctcagatgatcctcctgccttggcctcccagagtgctgggattacaggcatgagccactgcgcctggccaggtcattcatttttctgcagtgagggggagatggggaaggggaggccggtgggagctggaccactcaggacctgggtgcctcagagccacctctgcagggcagggagcctgaggggaggccggacactccgccaggcaggcgtgtgagtggccatgcggcctcaggcccagtgcgtttcagggtccccatccgcacagtggaatgagtgccagcggggagtgagatgggcccgaggagagtgctcctgtagggagccttaggtattcttgtgagccaggctcccggacctgcgggcttagggccagccaggccgcagtgaccagcacacaccagctggcggtgacctccctgggaagaagcgagggtggtgcaggtccgaggcacctctacctgccgcggctcccaaattcctcccgttcttgccccgctggtcccgtctgcaggtgctgacctggaggggaagcggcagatgaaggtcagtaatcggcacctggatttcctgccgccggggctgctcctgtccgcctacctggagcagcacagctgatggcggccccgcggagaccccgctgccacctcgcccagccatcaagccctccgataccttcggctaaaatatctttcatatttttagaatttgtcctcggaaacctttttcgcttggggtggtctctctcactctgccccctcctcacgcagctcttggcagtcaacagacgctggcggctggggctgcccatgccatcccagctccaagcttcccactccgggacttgtgtttgggtggggagacctgacctgggcatgttcctgtttcttcatcgttgagcttttctggcccggtctgaagctcaagtgaggagggggaggctgggtttttatcacttttaatgaatttggtgtgatttgttgtagatttttaaatttcccttttggagagaaaaaccaaaaaaactcgccccactggtaaaacatgggtcttggtcccagcccctgctcagcccctcccagtttttagcttgaatgagggtggggtctctgggaccctgcccctcatgccagaagcatcttgtgttgtatatgtgtgcgcgcgtgtgccctgagacccaggacagaagccacggtcctaagagccggttttatcctcgtcattctgcgtgtcctcccccacgccacctgtgtcggggctcagggtctcctgctttatatgagcccccttcctttcctcccctcctttatgctgggggtccaggacttccagccagaagcctctgcccttgcactaccttgtctgtcaccccatcccgtgtcccctcgtcccccagcctgactcctgcctgatagctcctgtgtccccatgctggtcctcctggcccaggctgcaggagccaggctggggggcctccgcacccccttgctgcgtgtgggtaattgtgttttgggggaaagtggggaatttaataaatttctggtgctctggcctcgggctatgtgtgtttttcttcggggcagggccgggggcttagtaggtcctggccaccaagggctgcaggtgcccccctggctcctctgcccttggttgcctggattcaaaccctggctctgccacatgcctgccgtgtgaccttgggtgaggagcttgtaggagtgccttggggcccctgtagaccttgagtgagtggcttgtacgagtgccttggggcccctgtaatggagggtctcacacagggggcttgaaacgacagaaggccagtgcagtagctcatgcctgtgatcccagcaccttgggaggccaaggcaggaggatcgcttgagcccaggagtttgaaaccaaccagggcaacatagcaagaccttgtctctacaaaacatgagagaaattagcagggttggctgggcatggtggctgctcacacctgtaatcccagcactttggggatgccaaagcgggtggatcacaaggtcaggagttcaagaccagcctgaccaacatggagaaaccccatctctactaaaaatacaaaattaaccgagtgtggtggtgcatgcctgtaatgccagctactcaggaggctgaggcaggagaattgcttgaacccaggtggtagaggctgcagtgagctgagatcgcacctttgcactccagcctgggcaacaagagcaaaactctgtcacacacacaaaaattagcagggtgtggtgtgcgcctgtagtcccagctacttgggaggctgaggtgggaggatcacttgagcctgcagtgagctgagaccgtgccactgcacttcagcctgggtatggaggaagaccctaggtcaaagagaagcaaaagggaaatctatcctctcacaatgctggaggtagaagaatgaggtcatggtgtctgcagggcagtgctccctccagcgtctctaggggaggagccttcctgcctttcccggtttctggggacttcgtgtgtccatggcttgtggccacattgctgtggtctcatctccaagtggccgttttccctgtgtgttatgtcttgtcttgacatcgtcctctcctcacgtgtctgtgcccaaatatccatctctatgatgcccgtcattaggttaggcccatgctaatcacctccttttaacctgattacctctgcaaagaccctgtttctaaataaggtcacattctgaggtagtgggagttaggaattcaacctctcttttttttttttttttttttttagacagggtctggctctgttgccctggctggagtgcagaggtacaatcccagctcactgcagccttgacctcccagactgaagtgatcctcccacttttgcctcctgagtaactgggcctacaggtgtgcatcaccccacccagctattttatttatttatttatttattttgagacagagtcttgctctgtcccccaggctggagtgcagtggcgcgatctcagctcactgcaacctccacctcttgggttcaagtgattctcctgcctcaacctctagagtagctaggactacaggcatgtgtcaccatgcccagctaatatttttgtatttttagtagagatgtggtttcaacatgttggccaggctagtctcgaactcctgttctcaggtgatctgcgtgcctcagcctcccaaagttcagggattacaggcctgaaccaccttgcccagcgcccctccctccccaaccctgctaatttttaatttttttttgtagagacggggtctggctatgtttcccaggctggtctcaaactcaagctgtcctcagaccttggcctcccaaagtactgggattacaggtgtgtgccaccacacccgggccgctaagaacgttaaatccctacctgctgcctgggaatggggattttctgtaaggtcactgcgtggccctcttggagaactgaaccctgatccagaaaaaacactctgatatttgggccattgttaacctgtaattttagaacagttttatatttgcagaattcttgcaaaaatcatgcagtgaggccgcggtggctcacgcctataatcccagcactttgggaggccggggtggaaggagggcttgaggcctggagtttgaaatcagcctgggcaacatagtgagaccccatcgctattaaaattttgaaaaaacaggctgggcgcggtggctcacgcctgtaatcccagcactttgggaggctgaggcaggcagatcaccaggtcaagagactgagaccatcctggccaacatggtgaaactccgtctctactaaaaatacaagaatttgttgggcatggtggtgcgcgcctgtagtcccagctactcgggaggctgaggcaggagaatcgcttgagcctggaaggcggaggttgcagtgagctgagatcgcgctactgcactccagcctgggccacagagcgagaccctgtctcaaaaaaaataaaaataaaaatagaagagcaccacatccattgcattaaactggcttttggaggaggaggtgggaatagggttggaagtaggaatactcaacggggtcggtgacttcgcttacagtttccccactcttggacattagaaaatggaagaaaggccgggcgcggtggctcacacctgtaatcccagtactctgggaggccgaggcgggcggatcaggaggtcagtagatagagaccaccctggccaacatggcgaaaccccgtctctaccaaaatacaaaaattagccgggcgtggtggcgcatgtttataatcccagctactcgggaggctgaggcaggagaatcgcttcaacccgggaggcggaggttgcaacaagctaagatcgcgccattgcattccagcctgggcaacagagcaagattccgtttctgggagggaaaatggaaaaaaaaaaaaaaatatggaacgcttcacgaatttgcgtgtcatccttgcgcaggggccatgctaatcttctctgtatcgttccaattttagtatatgtgctgccgaagcgagcacgaatattgagttccaccaccagctatttaaagcccctggaacaaatgtctgtacacataggccgacttctcttaaatgacctagagatttaacctctatttatattagcccaatgtgtaatgcaactaacgtagttattgactggagttgagaaagtgctcgttgttctaccaaatatagctacggtggctgctgggaattactggaaatggtcgtatgcaaatagccccggaggcggggcagagcctgagccgcaccgccctcccagaagtctttgggaggcggccccacgcctcaggcgactggttgttaccgaggaagatggcggcgccagacccgaggcgctagggaagatcgcaccgcggacgcccgctgagcttggcgcacgggccgaccaggtgagtgcggggctgcgggggcccggcgagggcggacggacccctgaccgtgtccacggacccgagggaacgcggcgcagccgtggcggggcctgcggggtcgggggcgtggccgggagcaaaggctgctgggtaggcggcctggggcgcggggcgcggggcgcggggcgcggggcgcggggcgcggggcgcggggcgcggggctcggggctcagggtttgcggcggaaacctgggggaggcctgaggcccgcggggctgggttcggggcggggcctaaggagagtttggggcgaggctgaaggcgcttggtgggacttcgggggcggggcctggagtgggtttggggtcgccggggtggagcctggggactggggggctgtagaggcagggcctggagactgcggggttatcggtgcggggcctggagagggaatagggtccctagggtggagactggggactgcggagttataggggtctggagagggtagggggtccctgggatggaccctggagattgggggttataggggcggggcctgaagaggctatggggtccctgggatgaagcctcgtatttgggggcaataggggaagggcctggagagtacgtggggtccccggggtggagtctggggactggggagttttaggggttgggcctggagagctaagggcgttggaggctggacctggagagtacatgggacccctacggtgaagcctgagaatttagggtgaggccgtgggctcaaggggtgaaatgaagtgtgggaagcaaagggggtcaggggtggggctgaaagacttttagaggcttgtggcggagccttgggggtctggggcaggccctgaagaagtagggagccggggttagggtttgaggagaacctggttgcgg

SEQ ID NO: 8197 - DNA, 6000 bp, Homo sapiens
gtggccagcctggtagcgcccccaggggctggcacggcccaaagcagggcagggccaggcacggcccacagcagggcagggccaggcacggcccacacaggcaggtgggcgaccctccccttctccggaggccactggccatcccgcgcccccagcctgggcctgtctgcctgtccagggctggtctagggagaaggtcggctagagaggattctgcctctgttggggaggaaaggagaggagagggtgccaaggccccatccctgttggcatagcccctagcacacagaacaatcccgcccaaacgtccacactgttgaggctgacaaaccccttgtcgattatttggaaaatattgagttttctccctgctcacaccagacatcggataaacgccccatggggcagacagcgtaaaccagggggaaccccactgctgggattcacctcctttctctctccctgctcagggtgtggacttcaatgtgtgcagcctcccaggacctcaccaggtcagagcatcacgggatgcagagtttcttgggagggtccgtgaaatcccctaaaccagggggtctcaccccaggggagatcctgtccccaggggacactgggcaacacgtggggatatctgtggttgtcacgactaaggggagacaacagtctcaaaattctaactcagtcaggcgcggtggctcgtgcctgtaatcccagcactttgggaggccgaggcgggtggatcacaaggtcaggagttcgagacccgcctggccaagatggtgaaaccccgtctctacgaaaaatacaaaaattagccaggcgtggtggcacgtgcctgtagtcccagctactcaggaggctgaggcaggagaatcgcttgaacccaggaggcagaggttgcagtgagccgagatcgcaccactgcactccagcctaggcgacagagcgagacttcctctcaaaaaaaaaaaaaaaaaaaaaattctaactcagtcctgcctgcagaatccctttcacctaggaagttcccttggccatgccccttccaggatctgcatcccaaaagacgcccccagaaagaaacgaagggcttgttggggaacagatcagctgggaccagggcacagggcaccaggctccctgtgtccctctgagagccatctgggtgtcttctgggctccaccctggggtaataggaggaggaggagaggaagccaggtgaccggctgagtgctggcagggagtgggtggaggccagggacgctgctcagctccctgcagtgcccagggcggccccaccccagaggatgactgagccttgaacgtccacagggcgatggggaggaacccccggtggagcatccctagagccaggggtcatctgcctgtctctgagcttcctcagttttcccaattgctgcgcgagtttctttttttttgttgagacggagtctcgctctgttgcccaggctggagtgcagtggcgcgatctcagttcactgaaagctctgcctcccgggttcatgccagtctcctgcctcagcctcccgagtagctgggactataggcgcccgccaccacgcccggctgatttttgtatttttagtagagacggggtttcaccgtgttagccaggatggtctcgatctcctgacctcgtgatccgcctgcctcggcctcccaaagtgctgggattacaggcgagagccaccgcgcccggccattttttttgtatttttagtagagacggggtttcaccatgttggtcagactgatctcgaactcctgaccttgtgattggcccgcctcggcctcccatagtgctgggattatagacgtgtggcaccgcgcccggcccgcatgaggctcttgatggctcccacctgctggggctgtgggagaggacaggacctggggcagggcctggctatggtgccgggaacagacctgcccctctggcctggctcccagatcagcctttcctgtctggtgcctgagcttggctggacacagagcccaggcatgggctgagccttggttcaggtctgctcctcatggtcagggtgaatgttgaacccatgtcggtccacactgaaagatggacacagccccacacctgcaccaaggacagtgtgccacagccgcataccacgaaatggtcccacttactctgtggactgagctgagtctcccggaaaaacccatccatgtcctaaccctggtacctgtgaacgagaaactatttgaaaatagggtctttgcagatggaaccaagttaagatgagatcacactgagtgggccctaagccaatgactggcgtccttagaagaagaggagaccgggcgcggtggctcacgcctgtaatcccggcactttgggaggcccaggtgggcgaatcacctgaggtcaggagttcaagactagcctggccaacatggtgaaaccctgtctctactaaaaatacacacaaagaagttagctgggcgtggtggcgcgtacctgtagtcccagctatttgggaggctgaggcaggagaattgcttgaacctgggaggcagaggttgtgatgagccgagatcgtgccgttgcactccagcctggggaacaagaggaaactccatctcaaaaaaaaataaaaaataaaaagaggagacagcaggctcagtggctcatatctgtaattccagcactttgaaaagccaaggtgggagggtcccttgaggtcaggaattctagtgcagcttgggcaacatagtgagaccccatctctacaaaatgtttaaaaatcagcaggcaaggtgctgttgtcccatctactcaggaggctgggataggaggatcgcttgagcccaggaagttgaggctgccgtgagctatgaatgtgtccctgcactccagcttgggcgacagagtgagaccctgtctcaaaaaatagtaaaataggccgggtgcagtggctcacgcctgtaatcccagcactttgggaggccaaggcgggtggatcatgaggtcaggagttcaaaaccagcctggccaacatggtgaaaccccatctctactaaaaatacaaaaaactatccgggtgtggtggtgcgcgcctgtattcccagctacttaggaggctgaggcagaagaatcacttgaacccgggaggcgaaggttgcagtgagctgagattgtgccaccgtactccagcctgggtgacagaatgagactccatctcaaaaaaaaaaaaaaaaaaaaaggaaaataaaataagaagaggagacacacacacagaggaggaggcagagactggagtgatgcggccacaaaccgaggaccaccagagcccccagaagctggcagaggcaggaagcatcctcctagagcacttggaggaagcaaagctctgcccacacttctagacttctgggctccaggactgtgagagcacacatttctgttgttttaagccccccagtttgtggtcctgcattacagtggccccaggaagctcacacgaccacacaacccctacgtgcgcgtgtgcgcgtgcacacacacacacactcttatcctttcctccaagcactatttactaggcgccctctgtgagccaggcccaggcaagcaggtctagcagctccacccctagttggcacctggagctaacgtgtgtttgtgcgtgtatgtgttcacacgcacacacacgcacccacatgcacaataaggggggctgggggacctggttttctgtccccccattgccaagagtcagggcaatgccaggtgctgggctgggttctggctgggaattccccacaggcttccccccaatgccccgggggtggctgaggccaggcctcccagcccctgtggcctgagagctgtggccttgcaggcaggggccctccagcttcaggtcagtggggctccagcccctcttgagctcagggcctggttgggggatggtgggatgggctgtgcgaagcttctggaaacccctgcagaagaggagaccacagtccacccagcaggggaacccccactccttgtgtgccccaggcccggggcctggggagcactttgaaccaggatgctgtgggatgggggactggcagctcaggacaggctgattctatctaagcctggtttggggccccagccaaaatgggactgtgttttacttcctgtcctggcgaccatccaccccttgggctctttcccagtgggtctcaggtcccagttctccctgaaatgctattcgaggacagaggaagggtccttcacagacctcggtccccaccctctactctggttcctgccaaccacaaagcaaactcggggagctcagtgctccccaggcagggtggcccaggggaagaagaaagtaggtggcggtggctggtcccccagcactagaagggagtggctgggactccaagcgtgctggtggtgcacgagggggactgctggagccagcactggagaactgcaagagggagccatggcaggttctagagcgagggcatgaaccaagggagtcggggtatactaggcctgggttgacaggccaagggagttgccctgtgtggggccaggcggtaggacacggcccagggcctcgcaggtcccacgggccccgcgagcctcaggcggcaaaaacaggccagctccgggcgcgccgcagggtcgctgcctaggttccgcaccgagacccccgtgcgccgcactgcgcaggcgtgcgctagccgtttcggacacgccccaccgccggagcgcgcagccgcactgggttcccggagagcgccctcttctggctccgcccacgtcgtgcgcagggggtgaggccgggcggagcctgcgtcgggggcggggccagagcaggtccgggcctataaaggtggcggcggcggcgacgcgcccggctcctctcagcggcggtggcccaggtagaggggtccgcgctggcggcggcggcggcgctgttccccgcgcggtccgcggagcggggtccgggctgcgcgacgtggggcggcggcggcactgcggccccggcccaagcccgaccccggtgagtgcgaaccccagggcggccccgaggacaccgacccggtagcgggaaacgggccccgcggagccctcgccgcccccgcccggtccgcgctcctggcaggccgggctccgctcaccgccctccctttgtctgctcccgcccgcagggtcccctcctcggccgccccccgcccggccgcccgccctcgggcctccccccgggccctcggtcccctcccccgctggcggggcccggacagaagatggtgcagaagaaaccagccgaacttcagggtttccaccgttcgttcaaggtgaggcccggggtcggtttgggggcgctccgggctggaccaccggaatggccggcgtggggggcgcggggcccgcccctaagatcggctcccggggctcgtgcctggcccccgccctacacccggggctgcccgggccggccgtgcgctgaagcggggtcggtgtgcgaggatgggggttcagcaggccacagtcctctctccagccatggccgccgggtccttcctccaggacccccaagtgaggctgggagcaggagccccctccgggtcagggcaccaggctgtgtgtcccctgcaagcccccgccgggtatgttctggggggtcagcaggctgcagtcctgtcccagtcgctgcatgtggcttatggggggtgtcccctgcaagctccagctggttgtgccctggtggggacgggtcagcgggccacagtcccattcccacctccatgtggcttctggggactttctttcagaatccccaggccgggctggtcaggtgcacccacccccagggggcctgtgccgtgggggaggggatgggatgtcccctcagccctgcacttcgcagacaccccaggcccaagtgctgtttcctgtcggagcgggaagtttctgcgcagcccgggtggtgactgctgttgagt

SEQ ID NO: 8198 - DNA, 6000 bp, Homo sapiens
ccaggcgtggtggctcacacctgtaatcccagcactttgggaggcccaggagggcagactgctggagcccagaagttcaagaccagtctgggtaacatggtgaaaccccatctctatgaaaaacaaaaattagccgggcgtggtggcacacgcttttcatcccggatactcgagaagctgaggtgggcagattgcttgagcctgggaggtcgaggcttcagtgagccgaagtcacaccactgcgctccagcgtgggtgacagagtaagaaccctgtctcaaaaaaaaataaaaaagctaaggggatgccaaatacctaagtcatcaggataaacactattttgatgcaatctacttttattttttgagatggagtctccctctgtcgcccagggtggaatgcgatggcgctaactgaagaatcttgctctaaaacctcctgtggctccctagtgccctccaggtaaaatcccagctcctcagcccagcagcacgtgctgccatcgtgtcccggccagaagccacactgcagagtgctcaaaggcccaaggtcaagatcaaaggcctgggataacatcgtggttctgccccctacccacttggccaagtcacttcacttctctgtgactcactttccccattttttttcgttttctttttttttattttttatttttggagacagagtctcattctgtcgcccaggctggagtgcagtggcacgatctcggctcactgaaacctccgccttccgggttcaagcgcttctcctgcctcagcctccagagtagctgggattacaggcgcccaccaccacgccttaatttttgtatttttagtagagacggggtttcgccatgttggccaggctagtatcaaactcctgatcctcaagtgatctgcttgcctcggcctcctaaagtgctgggatgacaggcctgagccaccctgccggcctgttttccccccatctctaaaatgggtgtgacaactgtacctaaaggttaaagtgcttaaggcagcccctggtgcggagcaaaaacatacagacctgtgtggcttggttgattatttatagtgtgggccaccattctgggctgccttctatgcagaaaaaaaacctattttctaaaaacgatgatttcacaatgactctctccttcacaggcctaggtccctgtgggtggcccagccctcacctcaccgtgctcaaggtatctgtgtccagttctgcttcccctgacagtgtgggggcttcgaaaatggggctgtttggtcactgggcgggcacactgataccggaaggcgcctgcctaaataaacactggcaggtggcctcccaggagagggggtgtctggtccccacggcagtgggggtggggtggcaggggtgctagcggcaggactggcttcaggggcagtctaggaacgcagtctctcagggccctgcaggaaaaacaagggtgttgcggttggttgaaggcttggctgttactaagtagtattaatctctgtttctttgtttcttttttttttgagacagagtttcgctcttgtcgcccaggctggagtgcagtggcacaatcttggctcaccgcaacctccacctcccaggttcaagcaattctcctgcctcagcctcccaagtggctaggattacaggcgtgagccaccatgccaggctaattttgtatttttagtagagacggagtttctccatgttggtcaggctggtctcaagctcctcacctcaggtgatccgcctgcctcggcctcccaaagcgctgagattacaggtgtgagccaccacacccggccaccaagtagtagtaatcttaaaaatccaaaatcctaatcctttctagcctcatcttttttttttttttttttttgagacagagtctcactctgtcacccaggctggagtacagtggcgcgatcttggctcactgcaaccaccacctcccagcttccagcgattctcctgcctcagcctccaagtagctggaattagaggcgcccgccaaaacaccccggtaatttttgtatttgtagtagtgacgaggtttcaccatgttggccaggctggtctcgaactcctgagcttgtgatccactggcctcggcttcccaaagtgctgggactacaggcatgagccactgctcccggcttacaaaaaatgttaaaattagctgggcatggtggtgcactcctgtagtcccagctactcaggatgctgaggtcggaggatcacttgagcccaggagtgggaggctgcagtgagctatgattgcaccactgcactctagcctatgcaacagaggactgtgtctgaaaaaatttttttaggccgggtgtggtggctcgcgcctgtaatcccaggactttgggaggccgaggcaggcagatcacgaggtcaggagatcgagaccatcctggctaacacagtgaaactccgtctctactaaaaatacaaaaaattagccgggcgtggtggtgggcgcctgtagccccagctactcgggaggctgaggcaggagaatggcataaacccgggaggtggagcttgcagtgagccgagatggcaccactgcactccagcctgggccacacagtgagactccacctcaaaaaaaaaatttttttttaataaaaatattaaaacactgctttaaagattattaatcttgatcactgaaggctatcacccttacctgccaaggtaaggagcctggggttccaagtctattttacagatgggaacacccaaggcccaaatcaattgcattcattcaagggagcaggctgcctagtggatgacgatgatgaagagactgtgtttcgcacctgccaaagggggaccttaatgtcatagccttatttcagtagcctctttgggacctgttctctgcgtggcagagagagggatcctttaataaccgccaccaggtcccatccctcctcttcccacggctctccaggattcccacctcactcagagcaaaagcccaagtccagggccaggcgcagtggctcacacctgtaatccctgcactctgggaggtggaggcgggaggatcacctgatgtcaggatttcaagaccagtctggccaatatggtgaaacctgtctctactaaatatacaaaaattagccaggcgtggtgatgcgcacctgtaatcccagctactcaggaggcagaggcaggagaatcacttgaatccgggtggcagaggctgcagtcagccaacatcacatcactgcactccagcctgggcaacagagtgagactccatctcaaaaacaaacaaacagctgatcacggtggctcacgcctgtaatcccagcactttgggaggccgaggcgggcagatcatctgaggtcgggagttcaagaccagcctgaccaacatggagaaaccccgtctctactaaaactccaaaattagcggggcgtggtggcacgtgcctgtaatccagctactcgggaggctgaggcaggaatcacttgaacccaggatgcggtgagctgagattgtgccattgtactccagcctgggcaacaagagcgaaactccatctcaaaaaacaaaccaaccaaccaccaggtcccgtccctcctcctcccacagccttccagggctcctacctcactcagagcaaaatcccaagtcctccccaagacccacaagtccttgctggactggcctgcttcaccagctacagagttagcagggcccagtgcaaaagaaaactcaaaggccccttgttcaaaaatgattagaaatctcaaaatgcagcagtaaatattaacccaagcacaagccctgctgtggggtgggggggccctggacaaaagcacgaagcccccggccctgcctccctccggccttcctgacctccccccgggcactctgctgccaggcacagtcctgccccagggcctttgcacctgttggtcctgcctctgactacctctgtaccccatccccctgttctccctccttcttcaggtcgctttaggggtggaggaagccgtctctgatcctccctcccacctctttaactttgcaccttcctaccctgccattctcccggctggtttttctgcagaactgtccccaccatctgacctgccaggaattcagcttgtgaatttgtctctgtctgtctccaggcaccaccaccagggcagggacccacccccgccccgccccaccccagggccctggagcagcggggcctggcacacagtaggcgttctataaatgtgtcacaagaatggcttccctcaggaaggcggcattaccgctgcctttctgcagaaaaggaaactaaggctcagcaagaaccaccgcccagccagagccaaggtcacagagcacgtccgtggcacgcgtccaggtcgtgccacagcagggccggcggcttcgacgcgggcagccgggtcccttttctttgacagatggggaaaccgaggcccggccggctgccgggtaggagagggtggcgggggccgctgcccggggcgggggcgggccgggcccaaggtcaccgcggcgggcgggccacggggaggcgggccggcgtggggatccgcaggcctccccgggcgcgcgcgtcccccccctcggcggcgcgcacggggcacgggcggcggcaggtggagccgaagcctccgcagcagccgagccgcggccactgccggcgtcgccgccattagacaatagcggtggggccggggagcggggaggcgggcggcggggaggggcggggaggggcgccgggcgcgcaggaagcggggcccggggcgcgccggggccgggcgcgcggggagggggcgcaggaagcgggcgaggccgggcgcgggaggcggcggcggccccgggagctgccgatcggcgccgggacaaaggcgcggccgcccggcgcccccagcagcccgagccggggcgcacagccggggcgcagcccgcgccccccgccgcgattgacatgatgtttccacaaagcaggcattcggtaagcggggcccgtccggccggcgcccccaccccggatccgggccctacgcccccgacccccggctcccggccccgcgccccccaacccccaggcccggtgcctccggcccggcgccccccccaactccccggccctgtcttccctctccagctcccagcccggcgcgacccccctcccctcctgccgccggcccccggacaccccccctccagttcccgatccaccccagcttccgggccccgagcccccccgccgcagctcccggcttggcgccccccccccccaacccgccgggacagtcagggcctcggacggccttggcctcgggcctggggcgctccggaagccccgcgaggcacctctagcccggggatcctttgggggcctgtggtggggggggtgatccgaggcgcacccctcccggaagagcgtgtccccgaggaagggcgctgggaatctggggttgggcccccccggaagatttcgagcaccgagagagagacccctcccccaagaggactttgcagggaggaatcgctgccccccaacttggggagggggctccctagggcgcgtttctacccccctcggatgtgcactccctcccggcgctttggagggcggtagagggcgcaccctgccccccatctagggcgggccttaaaacgcacccccactgcctgggggtggcgggggacggggcggctccgggcgcacccacccgctcggcttcccccgggagaggcggggggcaggaagcgcgggtggggtcgcgccaggggccgtaaacacgggcccaggaagtggggcaggagggggggcgccgcagctgcgcggccgctccctcctagccggcccttgaggggggtccagcccacgcctgggcctgacccgggccgccccatccctacagggctcctcgcacctaccccagcaactcaaattcaccacctcggactcctgcgaccgcatcaaa

SEQ ID NO: 8199 - DNA, 6000 bp, Homo sapiens
tgagagtcactgcacctggctctcacccgatctttttcccaatcccatcagatagatgctattatctccagggaaaatgaggtgtaatccagagagcccaccctcagccccacctcagctactaatagctgagtagtaatttgaactcaggccaggcatggtgcctcacgcctgtaatctcagcactttgggaggccaaggtgggcaggtcacttgaggtcaggagttcgagaccaggctggccaacatggtgaaatccccctctctattaaaaatacaaaaattagctgggtgtggtggcacacacctgtaatcccagctactggggagtctgaggcacaagaatcacttagcccaggatgcaaaggttgcagtgaaccaagatcacgccactgcactccagcctgggcaacagagcgagactctgtctcaaaaaaaaaaaaaaaattggactcaaagagtcaagttctctccacggtgcttataaccaccacattttaaggtagcaatgcctgttttggaatatcatacatgacacatatgttgacttgtgaaagtgtcaaagatatattgacaatggaatacagtaaatttttttttttttgagacggagtctcgctctgtagcccaggctggagtgcagtggcgcgatctcagctcactgcaagccgcaccacctcacaggttcacaccattctcctgcctcagcctcctgagtaactgggacttcaggcacctgccaccatgcccggctaattttttgtacttttagtagagacggggtttcaccgctttagccaggatggtttcgatctcctgacactgtgatccgcccgcctcggcctcccaaagtgctgggattataggcgtgaaccaccacgcccagccgaaagtatttattgtctggtcctttacaacaaacagtttgctgaactctggcctatgcgaattaaaaaggaaaatcagatcgaagaatattcagtatcatgatcacggatctgtggatatgtgtgcaaaagtggaaaacagaggccgggcatggtggctcatgcctgtaatcccagcactttgggaggctgaggcaggcagatcacttgaggccaggagttcgagaccagcctggccaacatggtgaaaccccatctctactaaaaatacaaaaattagctgggcgtggtggcgcacagctgtaatcccagctattcaggaggctgaagtaggagaatcgcttgaacccaggaggaggaggttgcagtgagccaagatcgtgccactgcactccagcctgggcgacagagcgagactctgactccaaaaagaaaaaaaaaaaagtggaaaacagaatggatgggcttgtgggtggaggcttctaggggaggtggtggagagggaaagtaaaaaaaaaacttggacttttactggaatattatctttctttcttttttttttttatattttttctttgagatagggtttctctctgttgcccaggctggagtgcagtggtgcgatcatagctcactacagtctcaacctcttgggctctggtggtcctcccatctcagcctcccaggtagctgggactacaggcacgtgctgccatgcctcattttttctttctttctttttttttttttttttgagatggagtctcgctgtgtcgcccaggctggagttcagtggcgtgatctcggctctctgcaagctccacctcccgggttcataccattctcctgcctcagcctcctgagtagctgggactacaggtgcccgccaccacgcccggctaatttttttgtatttttagtagagacaggggtttcaccgtgttagccaggatggtcttgatctcctgacctcatgatccacctgcctcggcctcccaaagtgctgggattgcaggcgtgagccactgcacccggccctcattttttctttatttttaatttttgtagagatgggatctcactgtgttgccagggctagtcttgaacgcctgggctcaagcaatcctcccgcctcagcctcccaaagtgctaggattacaggcatgagccaccgcacccggcctgtttctttcactgaagaagagagggggcaactgcacctctctgcaagtggccaaattcacccatctgcagccctggaattctgaattcttcagccattaccttctctgagcctgttctctcatctgtaaaatgggaaccatcaaacccattttgatggagaaacggttgttttaagacattgatcaagccaggcatggtggctcacgcctgtaattccaacaccttgggaagccaaggcaggaggattgcttgaggccaggagtttgaaaccagcctggtcaacatagaaagacatcatctctacaaaagaaaaaaaaaattacattagccaggcatggtggcatgcacctgcagtcccagctacttgggaggctgaggtgggaggatcgcttgagaccaggaggtcaaggctacagtgattagtgatcacaccactacactccagcctgggtggcagattaagaccctgtctcaaaaaaaaaaaaaaaaaaaaaaaaaggacattgatcagttgaccagcaaagcccagtcacggtgattcatgtctgtaatcccaccactttgggaggccaaattgggacaatctcttaaagctaggagtcggggaccagtctgggtaacatagtgagaccctgtctctaaaagaaaaatgtaaaaaataattcaacacagtgttgcgtgcctgtagtcccagctacttgggaggctcaggcaggaggatcgcttgaggcccagaattggaggctgctttgagctatgatggcgccactccactccggcctgtgcgacagagtgaaatcccatctctaaaaaaaaaaaaaaagccgggtgcagtggctcacgcctgtaatcccagcactttgggaggctgagcgggtggatcacgaggttaagagatcgagaccatccttgccaacatggtgaaactccatctctactaaaaatacaaaaattagccaggcatgggggcatgcacctgtagtcccagctactcgggaggctgaggcaggaggatcgcttgaacccgggaggctgaggttgcagtgagccgagattgcaccactgcactccagcctggtgactgagtgagattctgtctcaaaaaaaaaaaaaaaaaaaaagtctgggcacagttttgcatgggtacaagcacctatgagacactccttgaattggtaattttggggtgggagacagagaggccaggaggatgtgtttaactttctctcccccaccagccctggagaccctgaagggtaagaccatttctgtcttccccgctactgtattcccagagcctagacgttcctggaacacagtcagtgctcaataaaatttctccctcactggagagaagtactcaataaggggaactgtgggggatttgacatcaacataacttccattgctatctccctacaagaacttttaggtgaacttcagcctggggtccctgagcctcttaggggtgttcagggtgtctgtgaattctgatggaggaaaaaaatttcacatctttattttcactgactctaactgataattaccattccctcaattattaatgaagacaaccacaggacctgggactttgtccgtttgtccctaataaaaaccacagatactttcagattgcattgcaaccagaaacacatctgacacttgtcaccacggcaaaatcactgtgattattagatcttatttaatgtggtgataaaaataatataggccaggtgcggtggctcacacctgtaatcctagcactttgagaggccgaggcgggaggattgcttgagcctggaagtttgaaagcagcctgggtaatatagggagaccccgtttcaaataataataattattataatcataaaattaggccgggcgcagcggctcacgcctgtaatcccagcactttgggaggccgaggcgggcagatcacctgaggtcaagagttcgagaccagcctggccaacatggtgaaaccccatctcaactaaaaatacaaaaattagccaggtgtggtggcacgtgcctgtaatcccagctactcaggaggctgaggcaggagaatcgcttgaacccatgaggtggaggttgcagtgagccgaggtcgcactaccgcactccagcctaggccacagagtaagactccaactaaaaaaaaaaaaaaaaaaaagggaggccggacacggtggctcacacctgtaatcccagcactttgggaggccaaggcaggtggatcacctgaagttgggagttcgagaccacgctgaccaaggtggagaaactccatctctactaaaaatacaaaattagccaggtgtggtggcacatgcctgtaatcccagttactcaggaagctgaggcagtagaattgcttggacccgggaggcggaggttgcagtgagctgagattgcgccattgcactccagcctgggcaacaagagcgaaactccgtctcggaaaataaataaaaaaataaataaacaaacaaacaaataaaataagagaaataaaataaaaacagctgctacatttatttcctggaaagcacctatcactaacggagatgatcccactttacaattgtgattactttctcatctgggacccccgcccagatgactgtgggctccccgagagcagatgcgagttcttctggccccctgcagacagtaggtgctcacacttgctgaacgtgaccgcaagggttgggaagagagcgcatgggtgcggggcgacccggggactttcccggtgctgcggggcaggactccgaaaccgtgacctcacgtcccacacccacccgggacgcggaaggggcggcgcgcttccttcccagggcgcgggccgcggggtggagccagcgccctcagcgcgctacggtccgcgggcaactccgcagaagccccagcccccaggaccccaggacccagtggcgcagccggcagccccggatccctggtaggtggggaaggggcgaggacgggcctgaggtggagaaggtgtcgggggtgtggggggtggccctgagcccgtgccgctcgccagggctccaggccacctggcctccctcttagggccccggtgcggaggagggggcctggcgccgcgcgttgggaggttgacgttcccctcaacctccagctccccgcgctggtggcccagatcctcccccactgtcgggatcctccccagcaccctggcttcctccccgacagcctgacccctcccccaaaccccagattcctcccggacaccccagattcctccccaacacccaggattcctacctgaaaccccatattccttctcaccccaaattcctgacacccaagcttcctacctcacaccccatatttctctcaacgccctgaatttctccctgacacccaaggtccctccctgataccccaaattcctccgtgacacccaggacccctctctgacaccctggattcttccccaacacccaggatccctcccgaataccccagattcctcccagacaccccaaattcctccctgacaccccaaactcttccctgacacccaggatcccaacctcacaccctgtaccaccacacaccttcttcctttctccccctcctaacggttatccagccacatgggcttccttactgttcctccagctcaccaggcgcagtcctgccccagggcctttgggcaggtggcttcaccttccagaagctttcctccctgatctccacccagcctcctccctcagctcctttaggtctcagctcaatgttacctcctgtccccaaaggcctcccttgaccaccgtggtcccctgtagccccttcccagccagtctctcagagccacacagcccccggctcatggctttcacgttacttttcattctctgaaatgatcttgggttattttctcgcttactgttgg

SEQ ID NO: 8200 - DNA, 6000 bp, Homo sapiens
tggtctggaactcctgacctcaagtgatctgcgtgcctcagcctcccaaagtgctgggatcacaggcgtgagctaccatgccgggtcacgtgttgctattgagctcttgaaatgtggctagtgggaccaagaaatgactttttaatcttatttcattctagttaacttcactttaaactttgttagaggaaaaactctggacatattaaatttcatggagtgtaactgagcaaagaacaattcataaatcaggtagctgccagagcaactccatcttgaataggggcttagtaaaataaggctgagacctactgggctgcattcccaggcggttaaggcattcttagccacatgatgagataggaggtcagcactaaagaccttgctgataaaacaggttgcagtaaagaagccggctaaaacccaccaaaaccaagatagtgatgggagtgacctctggtggtcctcactgctacactcccaccagcgccatggcagtttacaaaggtcatggcaacatcaggaagttactgtatatggcagcctgaaaagggggccgggcgcggtggctcacgcctgtaatcccagcactttggaaggctgagatgggtggatcacgaggtcaggagatcgagaccatcctggctaacacagtgaaaccctgtctctactaaaaatacaaaaaaattagccgggcgtggtggtgggtgcctgtagtctcaactactcgggaggctgaggcaggagaatggcgtgaacccgggaggcggagcttgcagtgagccgagatcgcgccactgcactccagcctgggtgacagagcgagactccgtctcaaaaaataaataaataaatacataaataagtaaaaagggaaggcatgaataatccaccccttgtctagcatatcatcaagaaataaccataaaaatgagcaacctggccaggcacagtggctcaagcctgtaattccagcactttgagaggccgaggcaggcggatcacttgaggttgggagttcaagaccagcctaaccaacatggagaaaccccacatctactaaaaatacaaaattagctgggcgtggtggtgcatgtctctaatcccagctattcaggaggctgaggcaggagaaccacttgaacccaggaggtggaggttgtggtgagctgagatcccgtcattgcactccagccctggcaacaacagtgaaacttctcccaaaaaaaaaaagcaaccagcagcccttggggctgctctatgaagtagccattcctttattcctttactttcctaataaacttgctttcactttactgtatggactcgcactaattctttcttgggtgagatccaagaaccctctcggggtctggatcaagacccctttgcggtaacagtacaaagggtctgattgtgagaagtggcagggatcactggaactccacttcagatcccatctggatcatcaaaacatcaaccctaaataaataaattcaggaaatatggttaaatatagagtttagtttagcacaaaagtttgaggacggccaccctggaacacagattccaaagaatggaaatcagcattccaaactgaggaagtttgggggtcatttatataggtaaggtttgggaagcttgacagcgtttctacatatttcacacaaggcaagtacatagttaacagtaatctgattagtcaaggcagtggtctttttgggaagggtatatttaacattcacatagaggacataacagtcacaggaccttttgcactatctggtctgatttaggtgcaagataatagaggaaaggtcagcaatgaagaagggcgatcttaacgctgatgccatttagtcttgaaatgaatctacagagcaagaacaggagagttaatctataatctataagcagaagttgtagttacatgctgtctggctcagatcacacagtcccgttttcttcaaggctcaacataattcttagggttcaaaagtgtatgattaagtttggatttttttttttttttttgagacgaagtttctgtgttgcccaggctggagtgcagtggcgcgatctcggctcactgcaagacccgcctcctgagttcatgccattctcctgcctcagcctcacaagtagctgggactacaggcaccccccaccatgcccggctaaattttcgtatttttagtagagatggggtttcaccatgttggccaggatggtctcgatctcctgacctcatgatctgcctgcctcggccttccaaagtgttgggatttcaggcgtgagccaccatgcccggcctttttttttttcttttttttcttctgagacggagttttgctcttgttgcccaggctggagtgcaatggtgcgatcttggctcactgcaacctccccatcccaggttcaagcaattctcctgcctcagcctcccgagtagctgggattacaggcacccgccaccacgcctggctaattcttgtatttttagtagagatggggtttcactgtgttggccaggctggtctcgaattcctgacctcgtgaactgcctgcctcggccctccaaagggctggaattacaggtgtgggccaccgcgcccagccaagtttggattatttttacaagatgatgctggagagtttctatggccaccaccattctagactctgatactggcacttaaagcctgcatgctacatttcctggacgccgttgccaattggcaacgttcctgtcatgctttattagaacaaagttgggaggcagaaagaggggagaaaccattttttcagacttctgccagtggcttaggtggtggtgacaacaacaactgtgactttcgcaatcatggtggaggcaactgtggctagcaagggtgaacacatctgggatccttctgtaggcacagtgattgtgggttatgggtcctcctgtgctttatttatttatttattttgagacggagtttcgctcttgttgcccaaactggagtgcagtggcgtgatctcagctcactgcaacctccgcctcccaggttcaagtgattctcctgcctcagcctcccgagtagctgggattacaggtgcccaccaccacaaccggctaatttttgtatttttagtagacacgggatttcatcatgttggccaggctggtctcaaacttctgacctcaggtgatccatccacctcggcctcccaaagtgctgggattacaggcgtgagccactatgcccagccacctcccctgctttaatctttcagctctagagaggctagcagcctcatatagttatgaatctttaggtaaacttaccttcctcttttgttcttccagtacttccaacacttttatactcagtcccctgtagtcgtttatgtattcatttatttttatttatttattttttagacagagtctcgctctgtcacctaggttggagtgcaatggtgagttctcagcttattgcaaccttcccctcccaggttcaagcaattctcctgcctcagcctcctgagtagctgggattacaggcacctgccactgcactgggttaatttttgtatttttagtaaagatggggtttctccatgttggccaggctggtatcaatctacctgtctcaactggattgctgggattacaagtgtgagccacagagcctggctcaatcccctgtattcaatatcctctgtttgaagtacctagaaggacttctcttttccttatggaatacgtactgataaagcactcaagactgttaaaaaccttcattactctattgatgtaacaaaagaagctgaggcaaagttaatataagtagagagtttgggccaaggttgaggaccgcagtccaggagacacagattcaagttgccctgaatgtatgctttgattagcaacagttacaagtgggttctttttgtttttgactttgttttgagacagagtctcactctgtcacccaggctggagtgcagtggtgcaatcttggctcaccgcaacctccacctcccgggttcaagtgattctctggcctcagcctcctgagtagctgggactacaggcatgcaccaccacacctgctaatttttgtattttttttagtagagatggggtttcaccatattgatgtttcaccatactggccaggctggtctccaactcctgacctcatgaccctcccacctcggcctcccaaagtgctgggattacaggtgtaagccactgtacctggcaacaagtgggttcttgtcttatttatttatttatttttgagacagagtttcgcttctgttgcccaggctggattgcaatggtgtgatcttggctcactgaaacctctgcttcctgggctcaagcaattctcctgcctcagtctcctgagtagcttggatttcaggtgcccgccaccacagccaggaggacgccttgcggggcagggtgaggggggcagggtgcgggtcccccaaattagcgcgcacacacacacacacacacacacacacacactgcgatcctaggaacagggcgctttgcggggcagggtgagggtcccgaccctccgcggggtgggcgaccgcctccccaggcgcactggcagggggacggcatccctaacagagaaccaggcctcggcatgggctggagggatgacacagcatggtcgactcggacagcggccagcggcatgagagtccgaacaacgttggaaggaggagtaggggaacgggcaagagagcacggaagacgcagatgcctcaggcccagcccctccaggctgcgtgtgggcggccccgcccctgcccccgcccctcccggcctgactgcacatgcgtggccctgtctacggccccgccctctcccgggacaggcggcctgcgcaccgccctcccgtcgtcccagtgcgcacgcgtggctgcagccccgcccccgttcccccggcgctcggagcccgagtccgcgggaagatggcggcgccgctcatccccctctcccagcaggtacgggccgggcgggcctgggggcggcgccggggtgcggggcgcgaggcgagcggtgcggcgaggctgaggcgctgggagactcagccaggcggcggcgggggcggcgcgtgctgaagggcttgcggcgggcgggtgggcaggcggccctgaaggtgacaggccgggacccgcggcctcccgtgcccgagcgaccctcgcgggcaccggcgaggcgaggaggtgcgcagcgcgtgtcctctccgcccagggcccggaccctgccgccgctgaagctcccaggccggggacccgcggaggcgctgggctgcatcccggaggggtgggcgaggggtgcgagcgtttctgtcggcgcggcggcccagcgagtctttgtctccctccggtcccggcgcccgggcgggcagggtcccgccggagcccggacccgtcagcagcagtgcgatctcagactgatcccctgcctccttggaagctgcttccgccacccctgcaccgggcgcagatcgtacgtctccgggcgcctctctgtgtcctcaaattcgcctgatgcgcttatgaaggggcagtatcgatagcgcgacacagacatgcgaaaaagagccatgcgtaggcagctctgttatttgggagagactttcattcattcattttctatccatccctcaaatgtgcgttgggtcaggtgctgggagcgctgcattcttccagacagacaaggtcgctgctttcctggaggtgacactcgtgggaactagaaactacctgtgttatgctaatcacagctgcctttatttgctgaatacctgtgttgtgcaaagcaccatataagcattttgctagaatgatctagcacagcatggtgattaagagtgaggacacagggtcagatcatgtgttcaaatcttggctccagccccgatttctctgtgcctttggttgaagctcttagccattccacccatcagttgcttcctttgg

SEQ ID NO: 8201 - DNA, 6000 bp, Homo sapiens
caccgcgcctggccagcttggtgaatttctacatgtacaaacaccagtgaggtcaccgctcacattgaggcttagattattgtagcacccacaaggctccctgtggcgccttctaattcataaccttcccattgtggggaactaatcacagtttatttacgtactcccctattgctaggcacttacattgcttccaatctttcactcttacaaatagtgcttcagtgaacttccttgtacatacacatttgtctacatctgattgcctccttcagataaacttttagaagttgtgaatttcagtacgctcatatccacagggtcagagggtatgagcttattgaaatgctcccagttggccgggcatggtggctcacgcctgtaatcccagcactttgggaggctgaggcgggtggatcacctgaagtcaggagttccagagcagcctgaccaacatgacgaaaccgcatctctactaaaaatacaaaaattagctgggcatggtggcatgcaactgtaattccagctactcaggaggctgaggcacgagaatcacttgaacccaagaggtagaggtgagcccagatggcaccatttcactccagcctgggcaacaaagcgagactctgcctcaaaaaaaaaaaaaaaaaaaatgttcacagttaatgacttttttcattcgttggtgtcccagccgtgttgtgtttgtacagtgcaattaaagtattgtattcatgaattcccaccccccaaccaggttccggggcttgcgttcagaactggaacctttctgtatccccatccctacttgaagatgggattaaaaaattgaggtcttctacctatctttgacatgtcaaggttagtcaaaaccaatttaaattggtttcacttttagagtaaacaagacttagtgcaaagccaagcagaactatgaaactcatctctaggtacttctgagataactgatagggttgaatgagttcatatatgagaaagggttttaaaaatttctgccagcggccgggtgtggtggctcatgcctgtaatcccagcactttgggaggccaaggcaggcggatcatgaagtcaggagtttgagaccatcctggccaacatggtgaaaccctgtctctactaaaaatacaaaaattagctgggtgtggtggcacccgcctgtagtcccagctactcgggaggctgaggcaggagaatcgcttgaacctgaaaggcggagattgcagtgagccaagatcacgccactgcactccagactggcaacagagtgagactctctcgaaaaaaaaaaaaaaaaaattccacccgcctgttaaagcaaacataggggtcaaaggagggtggttgtttttgtcacactggctttttctgttaatccctggagccctcacatcccttattagggtaagtttagtaaccctgtgctttaaatggcctgtctctcaggggcttgcttctgacatgtctgatgagcgcattcctgctgttgctcctggctattacaaggtgtcgctgtggaagactattcctgtacagctgtgtgaacctgcctcgtcacggcttcctctgcagtgctcttgaatatcccggttcctgcttaggccacagcagtgagtccagggagaagcatccttctactccctcactgtccaggttggctgaagatgctctgcacttgacctcctgacactaacttccttgccttttcccatggcaagagcaagtcatggactctgaactacttcctctcccttttttctatttattttattttattttatatttgtgatggagtctcgctctgtcacccaggctggagtgtggtggtgtgatcttggctcactgcaacctctgcctcccaggttcatgcaattctcctgcctctacctcccaagtagctgggaatacaggtgcccaccaccatgcccggctaatttttgtattcttagtagaggtggggtttcaccatgttggccaggctggtctcttaactccttacctcaaatgatccacccacctcggcctcccaaagtgctgggattatagatgtgagccactgcacccagcccttcctctccctttctctttggggttcccttcacaaacaggtgaggcagctttttcaagggcattccaagcacaaaagaccttgttgtacctaaatactataagggacctgtcattgaggacgaaccatcacagcaagaggaattatctcgtgccgcatcttcgcataactgacaggatccctggcaaggatgtctcaatgcagaaagttggctaagtgaactgcagtatctaccctggacctaaaagaacttgctaatgttttcaagactacaattcagaggctgtctgatttaatctttgcatttacaaaaacacccttttacgtacattaaatgtggaataaaactaaatatccgtgtgtgtgttgtgtatcctggtgtatatagtattatattttatgaagtatttcattcattccagaaatagctctccagacccatggtgtaccagatctgtagaaactgaaatgcattcatatgtctgggggtgtgtgtaacgctaccgtgtatttgatgaaacttttcattgacttactccacagatactatttttctatctactggggataccaaaaagagccagtgcccttgaggaaccaagtcatgtcagtgcttcttagtttttaaaaagtgggtaagttgagtactttccagatgtttgtttatttttcaagacagtcttgctctgtcacccaggttggagtacagtggcgtgatctcagctcactgcagcctctgccttctgggttcaaacaattctcgtgcctcagccttctgagtagctgggattacaggtgtgtgccaccatgcccggctaatttttgttttttcagtagagaaggggtttcactattttggccacgcaggtctcgaactcctgaccgcaagtgatctgcccacctcggcttcccaaagtgctgggattacaggcatgagctaccaggcatgagccaccgtggctggccccacattttgtttgagacagagtctgttgcccaggctggagtgcagtggtgtgatcttggctcactgcaacctccgcctcccgggttcaagcaattcttctgcctcagccccctctagtagccaggattacaagtgcgcgccagcatgcccggctaatttttgtatttttagtagagatggggtttcaccatgttggccaggctagtctcgaactcctgagctcaagtgatcgcccacctccgcctgctgaagtgctgggattacaggcttgagccaccacgtccggcccaaatgtttcttaaaataacctgacccatgcaaaataaattgcctcctatgtaatactttattaaaaaaaaaaaaagatactgtacatccgagttagaaattaagagagaggcaagaccagaatatgcctgaggaaggctttgcttattttgcttatcagaaatgagagaattatctccgaatgggccagtttccaacttggaccatgtacaccatgtacacaatgcaccgcattctgggaggggcgaggttgggagcagtaaatgacaagtgttttgcccgtgtttcttttctcctccaagtgtgatgtaaaacttttcacatgtgcagaagcacgcaaccatagccacgtgcagaagcagccgtttttgcaaatgaaaatatttcccagaagcacaacaaatacaagactaacaggtgtcgggcagctccaaggcacacatgtggttctcatcagctgtcttcctcctgttttaaatctaggtcttcctgtaacagtgggaaaaaaaagatttctcccgaggccgccgagcttgcctttccatcccgtctcacaagagcatttccaacagagctcccagagagaggggagcaattaccaaggcaataaacagggtggagggaggaggggcgcccttaaacttgacatctgcggttctgggcttaaccccgaagtctaggtgaccttgggcctccgtttcctcctctgtgacgtgtttggttaagagaatgagcatctcagttttacagaatctcaaggcagaggcgggtagaagggtctttcaatcacggggttctctgccggtgggggggcggggggactgtgcccccacaagggacggcggcaatgactgcagattgggggagggggcgcttcggaggccagagatgccgctcaacttccgacagatcgggggacccgccccgaagacagagcgatcccgcccaaatgccagtggtgccgaggtggagaagccgccgcgtagacgcagatttgcaacctccggctttcccagctacggcgggcggcttctgccagaggcgctttgccgcctcacgttttcgcgatcggggtcgcgcgtggcggtgcagacccccgccctgccaccacacccattcccacaccctctgaggggcgggggggccgcggcgacacccccggactccgatgacccttctgcgcgcagaatcacaacgtggacgtctggttccctcgccctcacaaaaaactcggcagctgctcagcctgcgactcccgtcccccagtcacgcgccgggaaggctctcccagaggaaggattttcccgccgccctccccgccccgaggtagccgctgcgagcgtccgggttcaaggactctttgcgcgcgcgcttccgtcagaaagccccgccccgtgacctggacgggggccgttgccccgcccaacctcctcccaacggctgcctaggccgggcggctgggcggggcgtcacgggcggacgagtgcgcctgcgcgcgcttgcgcggaggcgcggggcgtggcacacgggcagccccgcccaggcctggcgtctccgcccgccccatctcccaacctcctcagcgtggcgccgacgctgcgtgcggcgcggactacccagagtactccgcgcgggggcagctcactggagtttggttctcgaggcggcggcagcgagcggcggcggctccggcggctcctcctcctcctttggtggcggcggcggcccgggaccgagacccggccccggctcccctctccgccaccccgcgcgcccccaaccccccggcgccgcggggaacatgcggctccggctcccggaggccggcgagtgagtgacccccgtcccccgcctcagcccgcccgcccgctggcccggccgcaaccccccgcctcgcccaggcaatgacagcggctccggcgtctccgcagcagatcagggaccggctgctgcaggccatcgacccccagagcaacgtaagtacccgccgcgcgagctgggacggaggccgcatgggcccgggaccctccccctctcctgtacccctcgcccaccgggcttcgggggacccgtctggcgcccacctcccctcgagggccgctgccatccctgcctctcgcttctcgggcccgggccgggggcaggtcgggcagcccggcagcgctcggtacgtgaggccgaggcttccgtgcggcctgggcggaggaagcagacgggggagctgaggctagagtttttcctccctttctgctccagctctacgaccctcactgctctggacgaagcttctctgcctcgccctccctccgggacccgagacccccgggaagccctcccggagcgggaaggggagggagaagggctgtgaagcaactggtgtccggggtatgactcggggaacctatgtctcccatgtcttggcctcctgggtgatcagggaagtccttcttccccctcctctcggctggcagcaccttcctggcttcggagagaacccccagtctgttttgcccctggccgggtacctagggtacgtggagagtctgtctcccttctgtgactagacacgcctttgccaaaaccctcttggggtcgctgccgacgatagatgatctcggggagggtgggatccttcctgttgcctttctgggcctcagta

SEQ ID NO: 8202 - DNA, 6000 bp, Homo sapiens
aggctgaggcaggcagatctcttgagtccaggagttggagaccagcctgggcaacatagtgacaccccatctctacaaaaaatacaaaaattagccaggcgtagtggtgtgcacctgtagtctcagccactcaggagtctgaggtggaaggattgcttgaacccagaaagttgaggctgcagtgagccatgattgagccactgcactacagcctgggcaacagagtgaggccctgtctcaaaaaaaaaaaaaaaagaaaagaaaagaaaagaaagaaaaagggtgggcgtggtggctcacatctgtaatcccaatagtttgggaggccaaggcgggtggatcacttgagtccaggagttggagaccagcctggccaacatggtgaaacccctgtctctactaaaaacacaaaaatttagccggctgtggtggcgtgcgcctgtaatcccagctactagggaggccgaggcagaagaattgcttgaacctggaaggcagagattgcagcaagccgagattgcgccactgcactccagcctgggtgacagagcaagattctgtctcaaaagaaaaaaagaaaagaaaaagaaagaactcattggatccctacagtaaacctcagaagtgaacaccattcgtatgcccattttatggatggggaacctgaggcacaaagaagggaaagtgacttcttcagggtggcactgctggtaagcagcagggctgggattcactccctggctcacgtgattccgaaagccaagtcgaaagctggaacctggggatctcctactcctgaaagtgctcatagaaagctgtcacaggggccaagggcggtggctcacgtctgtaatcccagcactttgggaggccaaggcgggcggatcacgaagtcaggagattgagaccatcctggccaacatggtgaaatcctgtctctactaaaaaaaaaaatacaaaaattagctgggtgtggtggcgagtgcctgtaatcccagctactcgggaggctgaggcagaagaatagcttgaacccaggaattgaaggttgcagtgagccgagattgtgccactgcactccagcctggcgacagagtgagactccatctccaaaaaaaaagaaagctgtcacaggtcaggcttgttctaggtgcagggacaaatccatgtaagaggtgaacagtaaccaaatcatgccataaacaataaacagacctgaagtagtcaccaagaccttcactgggaggtgggcacccagctttcgggaagagcaggtggactgtccctgctctggtggcacagaaagtctctggagaggagagactgtttagcctcactccaaaggctaggtcagatctaactaggcagagaccagagcctgagccataaaagccattctgcaaatgcagttttcttagtgctgaatgagctgttcaggctcccgcttggtttcccctttaaggtgggaagctcattctcccacaccatttttcagccccaaaggaaagttgctttcctagtcagacaccttggggtggcctctgcctgccctgcaaggacatctcaagtctgttccttccttccttcctccctcccccccacccttttttgtttttgtttttgagacagagtctccttctgtcacccaggctggagtacagtcacctgatctcagttcactgcaacctctgcctcctgagttcaagcaattctcctgcctcagcctcccgagtagctgggattacaggtgtgcaccatcacgtccggctaatttttgtattttcagtagagacggggtttcaccatgttttgaccaggctggtcccaaactcctgacctcaggtgatctgcctgcctcagcctctcaaagtgctaggattacaggcatgagccactgcacccagcccagttctttagaagagaggcctccagacctaggaagaagagggcccagactggggtgggggcagcagctcagggcagccctcgttagagacgaggtctcactatgttgcccaggctggtctcgaactcctgagctcaagcgatcctccagcctcggcctctcaaagtgctgggatgacaggcatgagcccagcccctttctgtgactcttatgttacctgtttattatatgaccaggtctaggtgctcctctagggctggcccatccatcctgaagcctcagtctgacccagcataagagtgactattcatcccagcagggaaactgagacacagactctgttttcccagctgcagcaaagagtggcagggcctttgcccacgaacctaatggcaggcaccccagaggacagctgctgatattgactaaatccttcatgtttctccctctactagaagccctgcaagcatcggcccattttccaggtgagaaaactgaggcccacactgaggaagccagtgcctcagtgtagacttggctagtccagcttcaggttggggctgctcaaggccagccctgtcccagcccctcccagagaccggagagggtgttcaggaaagcaactcaacccttcactgtctctttcactgttgctttctgcccacacaaagggcaaagtctgcctgggcccctcgcccagccgcccctgtaaaatagccacagggccccacttgtgcacttggcaaactctaagcagcttccagaagccttggccatgccagcacctttcccagatacttttttattttttccattattttgttggtaataaggaaaagtcattttttgcacagaacagacggtattttctttgctccccacaatgttcaagcatttcgtggcttccggcctgagaacagagccaaatccttcccttgtgcagatgcctcgtgaagttagaagcagccagggaaaccgagtctgtgcctcagtttcccctgtgggatgaacagtcgctcttgtgctgggtcagactggggcttcaggatggatgggccagccctagaggagcacccagacctggtcatgtaataaacaggtaacataagagtcacagaaagggtctgggctcacacctgtcatcccagcactttgggaggccgaggtgggaggatcacttgagcttaggagtttgagaccagcctgggcaacatagtgagacctcgtctctaaaaataaactttaaaaaagaaaaaaaaaagagtcacagggattgggacaggggagggcaagatcccttccaaggccagggtagtcagagaggcttcctggaggaggagacagggtggtggcgctgagcctggaaggacaaggcagaagagatgcctgcagcgagggcattccaggtggaaggaacagtttgggcaaaggcctggatgggggaagactcagatcttggcgcaggagtcaatctccaaaaacaacctgacctggaattcacctaaaggtaatttgaatgtaatgtaaccgccagctcagatatactattcttcttagaaggaaacagaaataaaggaacagggaaaggagacaggagcagaggtcttggagatgaaaagcaaaagcctctctgaagttgtcaaaacactcaagtgtcggccaggtgtggtggctcacgtctgtaatcccaggactttgggaagccgaggggggcagatcacttgaggtcaggagttcgagaccagactggccaacatggtgaaaccccatctctactaaaaatacaaaaatcagccaggtgtggtggcatgcacctgtagtcccaactactcgggaggctgaggcaggagaattgcttgaatctgggaggcagaggctgcagtaagccgagattgtgccactgcactccagcctgggcaacagagtgagactttgtctcaaaaaaaagaaaagaaaagaaaagaaaaactcaaatgtaagatcagagctttagggcgccacaggccttggttccagggagctgcaggacctctgtccacaaacgaaccaacggcgccgcaccgtgtgattttggagacggtgccagagagggggcggcaccaggattgacaagtgggacacatgggcttggggctggggaggtggatcctagttcaactccggaaggatgctctcctggcaagtgtgggaagggggtgctccctgtgaccagaggtgacaaacgcaggccagtggaggctgaggggatgcaaccatgcgttggagacatttcctcagcctttggattttggaaccctcaaacaacagcaaagataaccttaatccaaccattgtgggcatttttaccatcgtcttgggagggacagaggtggacagacgtccctgcttagggatgggacgggcaggggaacagaggcttctctctctttgtcttgcttcccgttccctcccgaagttgatctcttccgtttcctggcaacacccattgagcacttactgtatgcagaccctgagacccactgccccctccccaacctcactgggccacccatgtcagcccgggagggacctgacctccctcacaggcccaaagttatgacctcaggtagtggggacagaggcagctgtctcctgagaaggtgacaggagggtgaggtcacatcgctgtccgtgcaactctctccatctgcttcctatctctccgcctgtctcccccgtgtctctgtttctgggtctctttctcatcccagatgtccctctccgtctgtctctctgtccccaccctctgctcccaacccgaccccacgcaacccccccccccactccccctccaccgcccctaaccccctccctcaatcctccgtcccttccccagtcccggcccccgcccctcccccttatcccctcccccataccctctcccagtgcaaaaagccggcagggggcgcagcggggcggccttggcggcccggggaggcggggcgggcggcggccgcgtcgggaccggccgcgatgggaccggaggcggcgcgggcggcggcggcgcagacaaaggcacgggcggcgtggagggcggcgcggagggcgcgggcccgggagccagggagcgagcggggcgcccggcagcgcggagtcagcgccgcgggggccgcacccgactcgcgcctggacactcgcggggcgccgacctggcagggtgagcccggcctgccgagcctgcgctgggagcgcgggggcctcgaagtcccagggccaaggggagggcgtgggggttccccagaagtttcggacccgggactgggagcggcgcgaggggtccccaagttccagggctggagggagcgcgggggtcccgaagttctggattcagggtctgagaggggactgcgtgggaggttcccaaagttctggacccggcgttggaggaggctgcgaagaggtccccaaagctgcggacctggggtggggtactggggtgggaggggtccggacgtcccggacccagggactggaggggtggcagggggtcctcgaagtttaggagtctaggacaacgcggaggaccggggtcccggacccagttagaggaggagtcacgaagggagtccccggagttaccgacctggggttggaggaggcagaagaggtgtcccccgaagttctggacccagagacagggggcgtcgcgggaatctcggaagttccagggtcagagcccgcgtcccggagttggggcgtgcactgggtgtcctgcctcgggtggggatgggatcctgaattaatattaacccccccgtcccccgcactcgggtgcatgggatggggcctcatccaccggccagattggggatcccgggcaccgggcggtgtcggacccccctccgggagccccgtggccggcggcatccgaggcgcatgactagttggtgagtaactttccccaaacgctgcaagtcgcagcaggagctgccggaccggaagggcctgggttccggggacccctgtgttccccaactcccacccggcgcaggacccgcccccagtccaggccagagctgccgccccacccccactcaggggctccggtttcagac

SEQ ID NO: 8203 - DNA, 6000 bp, Homo sapiens
gggattgggcacccctccccagccctgagtgccttctctgtccccaccaccccactggggccctgggccaggggctgctgccagtgggggaggggtgggggatggtactggcagaccagagcagaggtggggagggaggctggaccctccaagagagctgggtctcaggggtggacagtgcctccaaagtgcctctgaacatgcccaaggtgacacatgggtaagtcacacacaatgccaccaacaaccactgacacacacagtcacaccccagccacaccccagccacactaacagcacaggtggctcacatgcaacctcacctggccacacacaggtctcacccaccacacatgaccaaacctgaccatacacaatgacacccagccatacacaatcatacctggtcatgtacaaccacacccagccatacacaccacacccagccatacacaaccacacccagccatgcacaaccacacccagccatacacgccacacccagccatgcacaactacacccagccatgcacaaccacacccagccaatgacaaccacatccagccatacacaaccacacccagccatataaaaccacactcagccatacacaaccacacccagccatatacaaccacactcagccatacacaaccacacccagtcatgcacaaccacaccgggccacacacaggtttcaccaaccatgcacaggcaaacctggccatatacaatcacactcagccacacacaatcacacttggtcgtgcacaaccacacccagccatacacaaccacactcagccatgtacaaccacacccagccatgcacaaccacacccagccatacacaaccacactcagccatgtacaacgacatccagccatgcacaactacacccagccgtacacaaccacacccagccatgcacaaccacacccagccatgcacagccacaatgggccacacacaatcacatacacaatcaacctggtcaggccacacacaaccatacctggcctgggccacacacaagtcacacttgctccacaaccgaaggcaaagctatgagctgggctgcaccagtgtccctccacatgcaaacacacccactgctgctcacacccacaacaccttcgccttcctgccagcagcaaagagcctacgttggccccacattgctcacacccaaccaggtttctagtcacagacacacccacaggtagtgagcacacaaccatgttcacaccaacaccaccaatgccaccaaccccgagatctgtagccctcccagccactgttacaacagccacacacacgcagctcctggtgctcccatacacacccacctgaatcctttcacacccagacacccctcccactcccactgtcacctccagtgggacccaggcttgcactgcaccaggactcataaccccagctgctactgtgtgaacatctgtctcctcggagaggggtcctgatgggctccggtagataaatcagacccagacctgccggatgggggtctccaggctcagggaatcccatcaaaccctcccttgcagatgccccaggctaagaccttagggaaaaggttacatccatctcccagtggggaaactgaggcttgaagctatctgagggccattccctgccttgttccaggataatgaaatcatggacagaaggacctgttttctgcatgggtggggctgcctccccagacaccaccaaggcagagagtccccactgacccaaacttgctgtgtgactgccagcaagtccctgactctctctaaacctccaatttctccccagaaaaatgctaacccaagcccagttaggggaactccagagtgagactggggtttgcatcccagttccccttggtgatcttggccaaatgactttgcttttctgtgcctcagtttccccaagtgaaccagaggagctgcttttggaccttctagagccctccctgccccattccctggggtgggggtgggagctcttagtctttcctcactcaagcgaatgaatggaccacttttggctgccctgctgggagcccagagctgctaattccctggagaaacaggaggctctttcatgcccaggcgccagtggggtgaggaggcgggaagagggtatggagctggcctcatacccgtgggcaaggaggccgcatgccaaagccaggagtggtgtggagagccctggagccatgcatatcctcactggggggacttggctaagttgatgtgtcctcagctataaaatgggaatgacagggaccagccacagcaggtttaacgagccaatgggtggcgacagaacatggcttcaagtcagacacacggtggactctcagtgaaagtcagctactgttactatgtgtcaacctgaagaacccagagagtcctccaacagtgccgttaatagaattccccccatttcacagatgagaaactgaggctcagagaggtcaaggtgcttttctaaggtcacacagccaatgagtggtccagccaggatttgaaccagatctgggctctccagtgtccttgctctttctaacttccttccgggggtgaggttgggggcacagtttcctgtcacctccagccccagccctgagaccagcgaagttgggtttggatggcaccagactctgtctaaatgcggaaagccctggcaggcaggggctgaagagacaggccttctgctggtgacccagtttccccgccagcccccacccctgctgcctggggtgggtttgagcagacactagtaggatgccggaaggaccattcctccagcccttgaagaaaggggctggctgccagaccattcagctaaagccaggaacaacagcctcttgccagtggctgctctgtcttggaaccctccattcatgcagaacggatggtgtcctgccctttctccaacaccttccatgactgctccgggcccagcaggatgtggctccacatattttattcaaattcatggtctttcacccaactaggccttggcttatgctaagctccctgcctgggacaccctccccactccagattttctcacccttgtgaattcctggcgcctgaccccctattaaggtgcagttctaacatcccctttcccaggaagcccttcctccaggtagagcccctgctcctccggccccatctctcccttggggctaggagtgtctatgtctacctctgtcttgcccagatcaggggctcctctgggacaggcctggagctgaggcctcttgctgtccccagcatcatccagcagaaggctggacatgacagtgtgacagtagagcttgcaggaggtgtctagtgaatcagtgaaccaaatcttcagcttggtatctgaggctttgtttggcaaactcctgttcatgcttcaaaacccacctcacagcctgggtgcggtggctcacacctgtaatcccagcactttgggaggccaaggcgggcagatcacgaggttaggagttcgagaccagcctggccaagatagcgaaaccccatctctactaaaaatacaaaaattagccaggcatagtggtgcgcacctgtagtcacagctactcaggaggctgaggcaggggaatcacttgaacctgggaggcggaggttgcagtgagctgagatcacaccactgcactccagcctgggcaacaaagtgaggctccgtctcgaaacaaaacaaaacagaaacaacaaaaaacacccgacctcgcatgctccctcctccaagaagccttccttgacgtcccagcagcattttctgggaaagacaaacttggaggccagggctcctctgtcccaacaagaacaaaaagggttgatgaggacttcagatactcccaacatcgtggccttttccacaactctgcctttggcctccgggaggcagtgaagttcggggattcccaggctgcatttagtggttagggtagagtaggttagagtaggttagggtagccgttagggtagagtaggttagagtaggaagaaagacattgtcataggaagtctctctggccgggcgcggtggcttacgcctgtaatcccagcactttgggaggctgaggtgggcggatcacttgagcccaggagttcgagaccaatctgggcaacatggcgaaacctcatctctaccaaaaaacaaacaaacaaacaaacaaacaaaatagcctgccgtggtggcgcgcgcctactagttccaactattcgggaagctgggtaggaggattgctggagcctgggaggcagaggtcgcagagagccgcgatcccaccattgtactccagcctgggtgacagtgagaccccacttcaaaaaaaaaaaaaaaaaaaggccgggcgcggtggctcaagcctgtaatcccagcactttggaagccccggcggctggatcacgaggtcaggagatcaagaccattctggctaacacggtgaaaccccgtctctactaaatatacgaaaaattagccgggcgtggtggcgggcgcctgtattcccagctacttgggaggctgaggcaggagaacggcgtgaacccagggggcggagcttgcagtgagcggagatcgtgccactgcactccagcctgggcgacagtgagactccgcctcaaaaaaaaaaaaaaaaaaaggaagtctttcggattccaaaatcagtcaaaatcagtgctctacaccttcgggcgccgagggacagcgccccgtgcgcgcagccagccttttccctacagcttcaagggaaccaaggtaaattcaatcatcgaacccgggccctttaagaagcgagcatgaaggggcggggtcgaaccaaaccccacctctggagcgtccgcggtcggcgcctgaattacaacacgcatgcgccaagcccacgcggttccgggtcccaagatttggctccaagagctattcgcagagaaacagcctcgcacaaaaagccaccgcccccgaaacccgcgggaaatctgtttcctgtgaaaggcctggcctccgggcattggcggtttccctgatcctctctcccaaattttccggcaggggattgatcgaggcgacatttaggactggggtgggcgagggagtggcggttctcgtcccaagttacaggtgaggacgttcaggccaaggcgtagccaagatcgcgccgccctgtagcttgaggaggcgccgggattcgaaccaaggctgtgcccaatcctaagccctgcgaggtcttgtggaaccgacatgacccactctttggtttgtccagagacagtgagcaggtaagagtctgtggggacaggcagtggcgaggccctaagcctggggtcgagccctcagtggacagatctgggggtcaggccctccgcggagctgagagctggtctcagcccctctcttcgccttgatcctggtgcctccagggtgagttcagtgctgaatcgcaacactcggcagtttggaaaaaaacatcttttcgaccaggatgaggagacatgttggaactcagaccaggtgaggcgcctccctcgaccctccatctctagggtgattcagattcagatctcatgccttgagaacgtcagggggccctcatgggtggccaggaaaggaacatgtgccgaatttccttcttcccctccattccaagaactatgtgaatgagacaggcatagcagggctctgtgcctgcagtgagcttgcgcctcagtttccctgtctgcttccagggcccctcccagtgggtgacgctggagtttccccagctcatccgtgtctcccagctgcagatccagtttcagggtggcttctccagtcgccggggctgcctggaaggtactagaaggccctgggtggcaggggttccaggggtcaccccagacactcattgcctttctctgctgaaggttcacagggcactcaggctctccacaagattgtagatttctaccctgaggacaacaactcg

SEQ ID NO: 8204 - DNA, 6000 bp, Homo sapiens; identical to SEQ ID NO: 824

SEQ ID NO: 8205 - DNA, 6000 bp, Homo sapiens
gtaatcccagcactttgggaggctgaggcagctggatcacctgaagtcaagaattcaagaccagcctggccaacatgatgaaaccctgtctctactaaaaatacgaaaattagccgggcacgctggtgggtgtctataatcctagccattcaggaggctgaggcaggagaattgcctgaacctgggaggtggaggttgcagtaagccaagatagcgccattgcactacagcctgggcaacaagagggaaactccatcttaaaaaaaaaaggaaaaataaataaatccaggcaaatgcattaattcattcctttttatggctgagtagtattcaactgtatatatctaccacagtttctttatccactcattgattcatggacatttgggttgttaagcatttttgcaattgtgaattctgctgctgtaaatatgtgtgtaccagtatcttttttgtataatgacttattttcctctagatacccagtagtgggattgctggatcaaatggtagttctacttttagttctttaaggaatctccacactgttttccatagcggttttactagtttacattcccaccagcagtgtagaagtgttccctgttcaccgcatccacggcaacatctatttttttttccattatagacattctttcaggagtaagatggtattgtactgtggttttgatttgcatttccctgatcattagtgatgttgagcattttttcttatgtttgttggccatttgtatattttcttttgagaattgtgtattcatgtccttagcgcactttttgatgggattgtttgtttttcttgctaatttgagttctttgtagattctggatattagtcctttgtcagatgtacagattgtgaaatttttctcccgctctgtgggttgtctgtttactttgctgactgttcctttagccacgcagaagctctttagtttaattaagtcccaggccctttgtttttattgcgtttgcttttgggttcttggtcacaaaatccttgcctaagccaatgtctagaaggctttttccaatgttatcttctagaatttttacagtttcaggtcttagatttaagtccttaaccatcttcagttgatttttgtataaggtgagagatgaagatccagtttcattctcctacatgtggctagccaattatcccagtgccatttgttgaatagggcgtcctttctccactttatgtttttgtttgctttgttgaagatcagttgactgtatttgggtttatttacgggttctctattctgttccattggtcgatgtgcctatttttataccagtactatgctgttttggtgactatgaccttatagtttgaaatcaggtaatgggatgcctccattgctttgtcttgctttggctatgcgggctcttttttggttccatatgaattttagggttgttttttctagttatgtgaagaatgatggcagtattttgatgggaattgctttgaatttgtaggttgcttttggcagtatgatcatttttacaatcttgattctacccatccatgagcatgggatgtgtttccatttgtttgtgtcatctatgatttcttttagcagtgttttgaagtttcctcgtagaggtctttcacctccttggttaggtatattcctaagtattttatcttattttatttttgcagatgttgtaaaagttgttgagttctggatttgattctcagcttggtcgctgttggtgcatagaagagctactaatttgtgtacgtcggaaactttgccgaattggactacatttctagaaatggattcctgaattaaaagagatgcttctcttaaatatttatgtaaagttactctcagaaaggttgtaagtggattcctcccaccaaaagtattgtgaatgaatatcttcttaaaatttacaattgttttgaccatttcccagtccttaaaccaatgataacattttattttctttttcttttttcttttctttctttcttttttttttttttttttgagacagagttttgctctagttgcccaggctggagcaatggcacgatcttggctcaccgcaacctccacctcccaggttcaagcgattctcctccctcagccttcccaagtagctgggactacagacatgcgccaccaagcccagctaattttgtatttttagtagatatggggcttctccatgtgggtcaggctggtcttgaactcccaacctcaggtgatccgcccacctcagcctcccaaagtgctgggattacaggcgtgagccactgcgcccggcctttattttcataatatttccatgtcttttatttctcataagcttacatatgcattcaagtatttattggtcattttcaatttttccttctaagagtctatattctttacctatttctacacatttttgtattcatctatatgttgatttgttttaaatttattatctgtttgttgtatctgaaatattttcccttagtttatttgctacttaaatttgagggaggcagggaagtttactgaaacatactttatattttctataatttattaactatttacttcataatttgtgttttggctgtcaagcctacagaccaaaattataataacatcaatttgtaatttgataagcactctggtagtctatttttaagttatacatgtcgtgaacattatttgttttaatgtgtgagggatggaagttactttatttttccaggtggttaactagttaacacagattattgcttttctgtaatacttttactgagatataattcatatactctaaaactcacccatttaaagtgtacaattcagtagattcttttttatttctttgagacagagttttgctcttgttgcccaggttggagttcaatggcgtgatctcagctcactgagattattgcttttctgtaatacttttactgagatataattcatatactctaaaactcacccatttaaagtgtacaattcagtagattcttttttatttctttgagacagagttttgctcttgttgcccaggttggagttcaatggcgtgatctcagctcactgcaacctccgcctcctgggttcaagcgactctcctgcctcagcctcccgattagctgggattacaggcacctgccatcacgcctggctaatttttgtattttttagtaaagacaggggtttcaccatgttggccatgctggtcttgaactcctgacctcaggtgatctgcccacctcagtctcccaaagtgctgggattacaggtgtgagccaccgtgcctggccgaattcagtagtttctagtttattcaaagagctatgcaaccatcatcacaatcaattttagaacattttcattgcccaaaaagacaccaatacccactagcaatcatcattttcagccactccatgggctacagggatcttttctgttattgcacttgttctatattcatatttcatgtaataaacatgcattgcttttgtaattacaaagtaaaaagaaaaacgttttaaaaaaaacttatgttgggattttaaattgatccaactgatttcactttttctgatgccacaatcaatttcttattgttttacttttaatcactcaagtaattccatgttctaatgcttttcggaccagatcgggagcattcagagtggtatagctgtagagatgttctaatgcttttcagtgaggagataaaacagaaatgagggaggtctattaagctaaagtagttcagtatttcaagaaagagtacgtcgctgagatagtagaaggcagccaaaaatctttcaaaataagtaataaaaatatttatttggatttagcaacattcagttaattgttgcagtttttaaatattcaaataactgatgataaataatgtcagaaatgaaagtgtccccctactcattccctatctacagaaatgaccaaagttaatattttcaggtattcttccagatttttctgtacactgaatgtatgtataaagacacagctattttatacagaaatgggatcatgctatccatataattctgccatttgccctttccacttcaacacattcttctacttcatttcatgtcagttatagatttaattcattccttttaacgttgaattattacctaacccagcactgttcaatgtagctttctgtgatgttagaaatgtttatatccctcttgtccaatacagtagccactagctgtcttggctaatgagcctttgaaacatggctagtgtaagaaactgaatttcgaattttatttaattttaatagatttaattttaaatagccacaaatagctatcatattggctagcacagactaacagtgtctcaaaaaacgaacattgaggttcttcagtattacaatgtgaattcttcagtattacaaacacggctttggtaagcattactgtacccacatctttgtctttcatgccagcatttttgtaggctagattcttgtatgtaaaaatgctggttgcttaggggtttgctttcacacttcgtgaatgctactacacaaaactgtaaaagagctgtagtcatttccacccactacgtgtgaaagctctcatttccccacattctcaacaatattgtgtaccatctacatttttagtttttgaaatttgataactgaaaacgaagtatgccatctgtttccgttatcagtttattgctctcacctccgcacgcactcttcaatatacgctccctgctaaagggattcccccgaagggttcctgcgcctacgcactcggagcacaggttacaacttccagaaacccttgggacgcgccgtcccaaacttgggtttctggcgtctcctgcgtttccggcccgggactacaattcccacaggtcactgggccgaatgagcgtgcgctcctgatccgctttgcgcatcccagtgattcttgggttccgcgtgtagtttcggaaggagacatcgaagcagggcgaggcgcagagggcgttgcggactcatgccccagtcggcagtgcgggtaagggtgggagaagcaatgaggcgaatgcgagcagccgaagaaggcgacagtgtggctgggtatgaagacttgagggagggggtggggcaaaacgaggtcaggcgtctccctggccgcgtgtgatggaccgtccgtggtggtgacagacatggtgtagggggtgtgtgcaatattatgtgcgtgatagagccaaggatgtgccctaccgtgcgaatggtgacgttgcgtctgtatgagagtgcacgtgccacggctgggatgtcttgtgacacagggaatggggtgtgtgtgcatctgtgcacatgaaatggccagggtatgtcttcgtgactgcatgtgtgctcatgacacagcaggtgtgtttctctttgtatgacagactgtgtgtatgtgtcaaaaagaagaaagtgcttggtgtatgacaggactggaatgaatctgtgactgtgacacaagtgtgtgggtttgtgtgtagagtgacagctggagtgtgccctagacaatcgagctttcctacaggaatggtgaagtcttttccttctctagctacacagtattgtccaataattgaagtttttaggacccagaagttgctaatttgggccttctgaactggaattgggtcaggaactggatcagtgggcaccaactctctagcttcccaaggccatcagtctcccatagtggttccctcacatacataacagaaagtaacattgaggaaatgagctacactttccgctagctggagaaacaagttcttttgtcctttttggaagctctggtgttggcagattcggctcatcataaaaagtttgaaacactggtttgggagagtgcctgtgtacctcccctcaaactaaaaaggcaacttgggggtttagccctgacccatcgatctccagggttacacgttctcctttttt

SEQ ID NO: 8206 - DNA, 6000 bp, Homo sapiens
gacaggagggtttaaaactcttttttggggggttaagtggaggtaggggttggagcctaacactcacagatacgtggggcctggaggaggcagcagtggggttggtcatggaatgagcacgtttgagtgtagggtcatcatggagcatcctgggggtagtgtcatgggactgttctggagaaatcaagactgttacaaatttggccgggcacagtggctcaagcctgtaatcccagcactttgggcggccaatgtgggcggatcacctgaggtcaggagttcgcgaccagcctggacaacatgatgaaaccccatctctactaaagatacgaaaattagccgggcgtggtggcaggagcctgtaatcccagctactcaggaggctgaggcagaagaatcccttgagcctgggaggcagaggttgcagtgagcccagattgtgccattgcactccagcctgggcaacagagagagactccatcaccaaaaaaaaaaaaaaaaaaaagccttacaaactggaggagaaagggttgcacaaacaacagtcactgaccacagtccatttagggtgggagccaggagtcctgggggatggggtacagttcataaaaggaatgttctaggccagtgctgtctgacagatggtaagagccaggtatataattttatatcttctagtagctacagtaaaaataagagatacagatgaaacaaattttaagaaacatacttggatgggcgaggtggctcatgcctataatcccaggactttaggaggctgagacgggtggatcacctgaggtcaggagttcgagaccagcctgaccaatatgatgaaaccccgtctctactgaaaatacaaaaacagccaggtgtagtggcatgcgcctgtaatcccagctactaaggaggctgagacaggagaatcgcttgaacccgggaggcggaggttgcagtgagccgagatcaggccattgcactctagcctggacaaaagcgaaactccgtctcaaaaaaacaaaaacaaacaaacaaaaaaaaccatagtacatccaaaacatcacttcgccatgtaatcaacaaaagattattggtagtttacacactctgttatactaagtttttgaaatccagtgtcttataccacctcaattcataccagcaccacttcaaatgctcagtggccagttgtggctggtggctgccatactgaataagtgttcagaaccttaacctagtgcctggctggtggaccagcagtactgacaagacctgggaactcttcaaaaatgcagaatcccatgccccaccccagacctacagaatcagaacctacagtttggccgggcgcagtggctcacccctgtaatcccagcactttgggaaggcagatcacttgcggtcaggagttcaagaccagcctggccaacatggtgaaaccttgtctctactaaaaatacaaaaattagccgggcgtggtggtgctcgcctgtaatcccagctacttgggaggcggaggcaggagaatcacttgaaccctagaggcggaggttgcagtgagccatgatcaaaccattgcactgtagcctggaagacagagcgagacgccatctcaaaaaaaaaaaaaaaaaaaagctggccgggcgcggtggctcacgcctgtaatcccagcactttgggagaccgagttgggaggatcacgaggttaggagatcgagaccatcctggctaacacggtgaaaccccgtctctattgaacatacaaaaaattagccgggcatgggggcgggcgcctgtagtcccagctactcgggaggctgaggcaggagaatggcgtgaacccggaaggcggggcttgcactgaaccgagatcgcgccactgcactccagcctgggcgacagagcgagactcagtctcaaaaacaaaaacaaaaaattagctgggcgcctgtaatcccagctactcgggaggctgaggcaggagaatcccttgaacccaggaggccgaggttgcagtgagccgggatcgcgccactgcacttcagcctgggtgagagtgagactccatcgcaaaaaaaaaagctacattttaacaatcccccgcccccatccctgcaggaactccggtgctaattaaagtgtgagtagggcagttccagggcagagggcagagattttcaatcagcaaggcacattgggatcatacggggattttcacaagacacagattccccagtcccacctccacccaagccaactcaattcagaatgggggagaggaaagatgaaaaggaggaggaggatctggacttttttttggtgctcaggtgttaaggcataagcagggttgagaacgtctcatttagaggggttaagagcgtattgggtaggtggagaggaacgcggggggcgatggtggagaggttataatgggtatggggatagataaggggatgccgtgggggtgcagacacactagaggggacccgagggcggcgatagggctttaggggtacaagatggagggatgtagggggacgggggtggacgatgcaagtttgcgcctggagcactcacgcaccgaggcccccgacgacgaaggacacgaccagcactggctccttgtcccaggcattcttgaggaaggcgccgactcctgaaggggtggcaagaagcgtcacccctgcaagtagctgcccccggtgacctctaaccctctcgtgccacccctgccctggaggagccccctcgtgacttctgcgttcccctccagcacggaccccatcgcttccacccctgccctgccgcacctcagtcccaggaccgcccagaggttcccagaactacccgagccccgtgcgccaccggaacctgcacttactcgcagccatctttgtctccgcggcggcgacagcggcgaggacgcggagcaccctgggagttgtggtccctatgcgcgagaacccgctcccagggctgcgcgtgcgccctggagcacaagtagaggcgaaagcaaggacgcggagcactctgggagttgtggtccctctgtgcgacggcccgctttcggagcctgcgcgtgcgcactcgcgcagaacaaagatggagccgtggaggtaaaggaagtggtgtcaggagcaagcgcaagcctgactttgcggacctgcgtggaatctccttagtctcagcctagaagtcgctccggagtgactagtcctcctgctgcgacccacctaaggcggaacaaaatagtccccattttatagtttatgtatgaaagcccattttacagacgaagaaactgagcccgggagaaggtgaatgactaacctgtccttcgaggtctcagctcaacatcggctcgtcctggaagcgctaggtctcatcccagatgggttaggagctttctgcgggctctcacagtgctctgttaccgccattatagctcagatcacttaagaaactgacctggtctgggccgggcgcggtggctcacgcctgtaatcccagcactttgggaggccgaggcgggcggatcacgaggtcaggagatctagaccatcctggctaacatggtgaaaccctgtctctacttaaaaatacaacacaaattagccgggcgtggtggtgggcgcccgtagtcccagctactggggaggctaaggcaggagaatggcgtgaacccgggaggcggagcttgcagtgagccgagatcacaccactgcactccagcctgggcgacagagcgagactccgtctcaaaaaaaaaggaaactgacctggtcttggtctttcagtcggactggtagctgctgcttgagagcagtaacggagtctgagttccctctgtgcctgccaacatggcacagcgagggtctggcacgtaataggttctaatttttttttttttcttctgagattgagtctagctctgtcgcccaggctggagtgcaatggcgcgatctcggctcacagcaacctccgactcccgagttcaagcgattctcctgcctcagcctcctgaatagctgggattacaggcgcgcgcctccacagccggctaatttttcttttttaggagagacgggggtttctccatgttggtcaggctggtctcgaacttcccgatctcaggtgatccacccgccttggcctcccaaagtgctgggattacaggcgtgaacaaccgcgcccggcctagaggggctaatttttatctatctatctatctatctatctatctatctatctatctaacacagtatcacaccaagagcctggcacataataggtgctaatttttctctgtcaaccaatctatcaatcgatcaattaatcacagcaagggcctggcacataattggtgttaatttttatctatccatcaatcaatcacagcaagggcctggcacttaacaggtgctaatttttatctatctatctatctatctatctatctatccatccatccatctatctatctttcaatcacagcaagggcctggcacataataggtgcaaatttttatctatctgtcaatcaatgacagcaagagtctggcacataataggttcttatttttaaaacagacagatatctttctatctgtctatctatatttaaagacatggtctcactctatcacccaggctggagtgcagtggcacaatttatttattttttagacagggtctcgctctgttgcccaggctgctcttgaactcttgggctcaagcgatcctcctgcctccacctcctgactagtatttgtttctagagttaaataaatgaacaccacaggttatgactgaaccccctgctaatttttccacagtgccatagggctatgacacagtcacccacaggcccccacctcgatactctcttccgtaaatgaggatctgggtctggttttctgatgttgcctcatttcctgggaggggagagggtgcgaccaagccctggctccagctctagcgggtatctgcccaccatggccctggtgctgatcctccagctgctgaccctctgtgagtcacccctttcttctccctgggttcctggctggggttgggggcagagagagaggcaatggagacccagacaccctgcagggggaccaggcagcaggtttgggattctaggttcaaataaagaacagggctggggcccagacccctgggtcctaaagcaagagaacacagattcccgaaagaggaaggaggtggggacaggtatctctggttcttgaggcaggaagaggtcaggagacagggaggactcccagattcttatatgggagggggatggaagccaggactcctgattccctgggaaaagggggctgggaacagggctcttagctcctgagagaagagggaaatggggacccagattcctgaactcgtgagaggagaaactctacgatcattgttccctggaaaggtggagttcaagggcctgaactcttggttgcccaggccagaggggtctgcgttcagacttcttcggtaggtgggcaatggatgtccaaatttctgcctactgagacaggaggagggagggataagattctcatttcccagaggagataggagctgggaactcagattcctgggttaccaatgagatggggctggccacaaagggttttgaaaagaactcgctgttgggcgcagcggctcatgcctgtgggagccgaggcccagcactttgggaggccgaggcgggtggatcacctgaggacaggagttcaagaccagcctgaccaacatggcgaaacccctctctactaaaaatacaaagattagcctggtgtggtggcgggcacttgtagtcccagctactacggaggctgaggcaggagaatcacttgaacctgggaggcagaggttgcagtgagctgagatcacaccactacactccagcctgggcgacagagtgagagtctgcctcagacaaaaaaaaaaaaaggaaaaagaaactagtccctcaacctc

SEQ ID NO: 8207 - DNA, 6000 bp, Homo sapiens
acggctgcatcagttcacgttaaggaggatctctggagagccagacctggggaaccgggaggcccgcgccttgggaaatggagtccaagcgggcatctctcctgccttcaggtggagctggaggagacagtggtgcggcgccaggctgcggtgcggacgctgggccagcaagccagggtttggttggtgcgggtgctgctcaacctgctggtggtcgcgctcctgggggcagccttctatggcgtctactgggctacggggtgcaccgtggagctgcaggtgcggacggtcttggaagaggaagccagggggtcctggaacctacatttccaacggtggagggaggggacggaagtttgggatgccagagatcttagagaggaagtatgggagagggtatgttcggaccctggacttagggattttaaaggaaaaagagaggctgggcgcggtggcttacacctgtaatcccagcactttgggaggctgaggcgggcggatcacgatgtcaggagttccagaccagcctgaccaacatggtgaaaaacagtctctactaaaaatacaaaaattagacgggcgtggtggtgggcgcctgtaatcccagctactcaggaggctgaggcaggagaatcacttgaacccgggaggcagaggttgcagcgagccgagatcgcaccgctgcattctaggctgggcaacagagcgagactctgtctcaaaaaaaaaaaaaaaaagaagaagaagaagaagaggccggggggaggaccttaagcttggctcctccaggaccccaagcctctactcatggtccatcccgctcccaggagatgccccttgtccaggagttgccactgctgaagcttggggtgaattaccttccgtccatcttcatcgctggggtcaattttgtgctgccgcccgtgttcaagctcattgctccactggagggctacactcggagtcgccagatcgtttttatcctgctcaggttccagcctcacggggatggctgggaatgatgaagggtgggggcggtcagagggatgttggcgctgacaggtaagacacggaaatcctgctgataccgaatccagggattcaaatcctgactctgttggccaggtgcagtggctcacacctgtaatcccagcactttgggaggccgaggctgaggtcaggagttcgagaccagcctgacaaacatgatgaaaccccgtctgtagtaaaaatacgaatattagcccggcggtagtggcttctgtagtcccagctactcgggaggctgaggcaggagaatggctcgagcctgggaggtggaggttgcagtgagctgagatcgcgccactgcactccagtccgggtgacagagtgagaccctgtctcaaaaaaaaaaaaaaaaaaagaaagaaagaaagaaagaaatcctgattctgtcactgggcctcagcttcatctgtgagatgggttgaatgcgggcgcgttccactgagaagggaactgccacatggtgggtaccgggtcagggcccattctctgccttccccccttcaggaccgtgtttcttcgcctcgcctccctggtggtcctgctcttctctctctggaatcagatcacttgtgggggcgactccgaggctgaggactgcaaaacctgtggctacaattacaaacaacttccggtgagaacggcatgggtgtgcgtgggactcttgggtccctgaaggaaagatggagctgggtgggtccagactcttggtttgggcggagaggggagcttggggtgctggaacactctcccaagggtatgaaagtttgaaaaacgaggacccccagagaaagtattgacagggtctcataggcttgcgatgtggagactcggacgcgtgggcctccaggtgcccgggtcccgagttctttctgatatatttcttccttcttcagtgctgggagactgtcctgggccaggaaatgtacaaacttctgctctttgatctgctgactgtcttggcagtcgcgctgctcatccagtttcctagaaagtgagagccccgccccttgctgtggccccgcccctctaggacgaggccgtgccccatcgcgctgttcttttcaccgcgcacctttttaccattcccgcctctgcctgctccctttgcttgccctaggtccgcagatctccccgctccccgcccttgttttagtgggttacttccctctggccccgacggcggcgacatctgggtcccttctagtcctcaggacccgccctctggacacaccccctccacgtggagtcctgaaagtcccgcccccccccccccaaccaatacgcatgcttcctattggcgggcggggcggtggaggcggggaaactccaggccgccactcccctgactccggcccggccccgccccgtccttcaggctcctctgtggcctctgtcctggggcgctgggtcgtctggcggggacccaggagttccaggtgcccgacgaggtgctggggctcatctacgcgcagacggtggtctgggtggggagttttttctgccctttactgcccctgcttaacacggtcaagttcctgctgcttttctacctgaagaaggtaaggggtaggggggacccttgggtctgaggcaggaggtattggggcccgcactcctgggtcaagggcaaggaagatcctgggggcctggattactcggtcctgagagaggagggggttggaggacagactactgcatctgagaggaggggtctagggcattctgacttatatgtctgaggatctggggactcagactccggggtcctagatgaggaaggggctcagactcctggttcggaaaaaaggagaggcaggtaggccgggtgcagtggctcacgcctgtaatcccagcacttcgggagactaaggcgggtggatcacctgaggtcaggagtttgagaccagcctggctaacatggcaaaaccccgtctctactaaaaatacaaaaaaaattagccgggcttagtggcaggcgcctgtaatcccagctactcaggaggctgaggcaggggaattgcttgaaccagggaggtgaaggtcgaagtgagccaagatcgtgccactgcactccagcctgggcgacagagcgagactccgtctcaaaaagagaaaacaaacaaacaacaacaacagcaaaacaaattagccgggagtggtggtgcacacctgtaatcccagctactcgggaggctgagacacgagaatagcttgaacccgggaggggaggctgcagtgagagccactgcactccagcctgggcgacagagcgagactctgtctcaaaaaaaaaagcctgggcgacagagcgagactctgtctcaaaaaaaaaaaaaaaaaaaatggaggcacagactcttgtgtttcagagcccttttctccgtgccttcccccaccagcttaccctcttctccacctgctccccggctgcccgcaccttccgggcctccgcggcgaatttctttttccccttggtccttctcctgggtctggccatctccagcgttcccctgctttacagcatcttcctgtaagtgcgagaggctcccgcctctctccctccctctctccccattcagtgttcagactcctggcactatgtgagcccagcctgtcttgacttcaggatcccgccttctaagctttgtggtccattccgggggcagtcgtccatctgggcccagatccctgagtctatttccagcctccctgagaccacccagaatttcctcttcttcctggggacccaggcttttgctgtgccccttctgctgatctccaggtgagacggcccagacttctgggtctgggtttgaatgcgtgtgatctgggggccaccacctgcgtccaagagaggagaggcttgggcgtgggagcaggcaacgtactgagtctgagggaggaggcctaggctcctggactgctgggtccgaaggaggaggtgggcgggacgtaggactcctggatctgaaggcggaggggctgggagactgaactccttgagcccagacgaggaggggcttaggcgtccacatccctggcttcgaaggagccagacgtttggatataatggaagagcgtgtcaggagtggcttccgttcctgtctccttcagcatcctgatggcgtacactgtggctctggctaactcctacggacgcctcatctctgagctcaaacgtcagagacagacggtgagccaggcgggtccctgagagggcccctggggaacatggaaaggggttggggaagaggattgtctcacctccacctctctttgccccaggaggcgcagaataaagtcttcctggcacggcgcgctgtggcgctgacctccaccaaaccggctctttgacccccgcagcccacgtcccgctttcagaccccaggcccattgtaagcctaggtcacaacatctgtaaactaggagaactggagaagactccacgcccttccagctttggtatctggagatttccagggcccctcgccgccacgtcctgactctcgggtgatcttccttgtatcaataaatacagccgaggttgctgagcgcgctttgaaatctgcgtcctgaaggtgggggcagggctacagcggggcaggagccaatcaaatgtacgggcatgtttgtcggtgcagagcgctcttccgcaaggagacttgtcggtcatgtcggccaatcgacggccgcatctggtagcatcaggggcgggccaacttatgattggttcagatctgtgacaagaggcggttgctaggggataccacgagccgaacgcctagcattcgctgtgataaagggcgtctcagccaatcacctgtcgctacaggccagggggccgtaccaactaattcggaaccaatccgcggtcgaagtagggacaagaaaaaggggggcatcctctcgccaatcggaagtgcaaagaggcgggcgtgccagtccctggacagctacgacgccatgaatatcttgcccaagaagagctggcacgtccggaacaaggacaatgtcgcccgcgtgcggcgtgacgaggcccaggcccgggaggaggagaaggagcgtgagcggagggtgctgctggctcagcaagaggtaagctcggaagccggcagggcggcgctccggggcccagcgcgcaggcgccgcggttgggggccggaagcggaggcgttgcgcaggctcaatgtgccccgtgtgaaattcgggaccaggcgccgatcccactttcgaggacgttgccccgcaaaccttgtgcccacttccacgaaaccttccttgatctcgccctcgtcttagtttttcccccactgatgtatttcacatggctggaacagtgtctagcacaaaagagaagcttaacatttaatgaatccgtgaacccttggacagttcaaggaaattcggatcactttttagtttgcctgcacagcctatttattgagcatctactgtatgctaactacatgccgtgcacctgacttgcggaatccccaataagcactgttcgttcttagaggggcactgtcatctctgttgcacgaagtgagatggcttcagtgaggggaaggcacattttaaggagaggcggacagccaggctccacgccatcgggcgagccctttcgtgcaccgccccctagacacatacacacaaacacgggctttccgtatggctctttaaatctgtttggtgtacacccaactttcatttccttagctagtctgatcctccgccgtgggtgggaggtagtctaggtttttagaatctcagtaggctgctgagcgctgtttgaaatccgcgtcctgaaggcaggggacagggcttcagcagacttggggtagtcacttggagccatggctagaattcagatcgtctggcctaatgcatacctttatggctgttttaattgtctcacttgaggttaggaacccctttggtttaggccag

SEQ ID NO: 8208 - DNA, 6000 bp, Homo sapiens
atccaaaaaagagtctaaaatataaatatacagtatcaaaaaaattctccaccactacccaggccatgaaaaagcagaacgccttccagagtccttcctttctccccaggctctgaactcctaaaattacaatactcatttcctttcataatatatatatatatacacacacatatatatacatacatgtgtgtatatttacatatatacacacacacatatatatattttttgagacaggttcttgctctgtctcccaggctggagggcagtggtgcaatcacagctcacagcagcctcaacttcccaggctcaagggatccctggctaatttttttttaaattattttttgtagagactgggtattacaatgttgccagagctggtctcaaactcctgggctcaagcgatccccctgccttggcctccaaaagttctgtgggattacaggtgtgggtcatcgtgcccagcctatatttttatttataacgtttgtatgcatctgggaaatttcatagaaatcttttcaagaggaagtttagtgaggtagaaagagtgcagatttaggagtcagaaaaaccaattttgaaaggccaggcctgctatttactaagtgtgtgactttgggcaagtcagtcccccccctccaggcctttttctcacctgtacatgcagatgagaccatccacgggttccaggactgtcgcaaacattcaaatcatgaacatttatataccaagtttattgagacctcctgagacttaaaccctgtagaaaacagatgaatcaaacccaggccccattctcgggaagctcacagtgtgaaaataggtaactacaaaaacacagccaataagtgctttgaaacaaggaagaacataaaaaagatgtagtgttcgaaaacctggaatcaaaaactaaccgcggagaaaggtaggaggatgttctagactcccagagaagagctggggaacatccagaaaggctcttgctgccgacacagccacatcccctaggtctctggagttcactgcaggctggcccattgcagggaggtgtagaccaccttaccatcaggctgcggagaacagaggagcagggtctttctgacgctggttccaaggcgcccagcagcaaccaggtcttggagtgggatggtgtcctcgggggcccagcactgagcgatataatgggcgtggaagcggagggggtcacctgggggaaggagagaggcactgaagcagtgaccaatggcagacggctggacgccacgggaacgaccactgggaggagatctgagatcatttcagccatcactatagatactctaaaacagatgctcttggacacaactattccacttctaggcttttttttttttttttttttgagacaaagtctcgctcttgtcccccaggctggagtgcaatggcacgatcttggctcactacaacctctgccccctgggttcacatgattctcctgcttcagcctcccgagtagctggaaatacaggcacccaccaccacgcccagttagttttagtatttttagtagagatggggtttcaccatgttggccagactggtatcaaactcctgacctcaggtgatccacctgtcttggcctcccaaagtgttgggattacaggcgtgagccattgcgcccagcctgatgtctaactacttctaagtgaatcttctggatcacagtaatcatttaataaaagtcgttaaactgcttgcccaatgagttcaggagctcccaaatgtttcctgtctgtctatgaatttcagaggctaagagaaagtgagacaaaaaagaaaaatgcagctgggcctataattccagcactttggggggccgaggtggaaggattgcttgagcccaggaatagggaccagcctaagcaacaagagaccccacctctattaagacaaaaaaaaaaaaaagaaaaacgcagaatacattgggatcgtatggaaaggcacagcaaccagaggccccaacccatactcaccaggatagaccaggaagtcacctccgaacttgccagccgcactgaggaagaagcctcgctcccacaggtctctgtagatactgtagcgcagctcgtgggcagggcggccggcgtggggccagtctttagactggacacgccagtccaggggcctggccttgaccggtcgaggcctggcagtggccagctggacaaggagagcagatctgggcaagggggctaccccatttgagggtcctgcttgggaagacgaggggcctggtggggagtacagagaagagtttggtaaattcaaggggtaaagtcttctcaccctcagggagacccaggcactggattcccagctaaaattcctaaaagatctctcctctccttcccgtggtccctggactccacctcccatgctcaccagcttcctcctgctctcccgaagcctggccatcactggtctcatcctctttggcagcctggctcgagccggcctcctggcttgagctggcccctgaagcctgttctagtttctgcttcttagcagcctggccctccgtaatcttctccaggagctcctgacgacgggtctcccgggcctcagctgccaaggcgctctgctcctggaagctctcctcttgctggcgcttgaaggatgtcagggcctgagaagcacacttcgctggaacctccaagcttatggtcccttcagaagccaggaaacttgactcccaggtcccgctcccaccgaacccgagttcgagccccgcccccttaccaggctgtggtgccgagagtctggacgcggggcgctgaccagagtcacggcgccgatctcggccaagagccgcgcctcttcgggcatcagcagcagcgggaggcccaggcgcgagttctggcggggcccgcggggcagggcgcctaccgtgcggccccccacacccaggcgctcccggagggcctgcaccgcctcggctccccacaccagggagcggccgttcgccacctccaccaccagcatcctcctgcgggagccgggaggcaaagcagttaccgaaacagctgcgcgccgcagaccgctgcagcgcacccaaagcctccggggtctcggcgaagccccgcccctaggcctcagggggcggggcctcgctcagccgccgttcaccacctgctgggcccgagcgccaggccccgcccccgggcgatcccaccaggcctcgcggccgccggagacgagacgccggagacaagcccccgaccctcgcccctcgccaagcccccagggtcccgctctacccttgtgaccctgcggtcggcacccgctctgtgcccgcactgccgtacctaccattgcgccttggagcgtgaaaaacaaacctccgcaagcgcggcgacacgcccccttacaaaggtccattttggcaccaccctcttgcaaagtgggcgtcccccttcgggtgttcccgtcagcggtcagaagctctggaggctaaggcaccgccgaggccacaccctcttccggacgctcgagccttcgctcctcctctttccgaacgactgtgattcggctttcggacctcctcgctctcagactcccacagtacaaaaccctgccccctcccgagcacaggaagttcggcgttcgggcgtcctcggctccaccgaatccgcagccccgcccccttcccgaacgccagcaatttgacgttcgggtgttctcggctcggccgaatccgtagccccgcctcctcccggacgcaataggttcggcgttcgggcgtcatcggctcccggcagcctcgcggcctgtggccccgccccctccgagcgccagcgcaccccagttggggagttcccgccctacgaccgaaccccacagccgaaagccccgccccctggacacccgccgtccactctccgctcgggcgggctcaccccaattgggagcgctcagtccgcctccttgcctcccttcagaatgtcccactgtccaccgatagaaccagcgagtcacctcataaacagtaattcgcagtcgaggtggagccacccactgcgcaccgcgccacgcgctccttgctccaccccctcatgccgacaccctcgtcaacttcgtcatcccgccccatcagcgccgcgggaagtcaggtcccgcccctcgcaggaccgaagccccgccctcctcccgcgggggccaccttggctccgccccactgagcgcacctccctctgccgcttcctctcctctacttgggaacttgaggatcgtcaccctggcccggtcccgtaggcgcacgccggccctcggggttccgcccctttgagggcaagtcgctttcgccccgcccccttgtaaatactcatgggtatctggcgaacctgttgactccgcctatcatcctagcgtcacttgtacccaactatctacgaagtaaaccgaagcttgtggccccacccacatccggccgagtctgtggccccgcccacatcggaacagtgaccctaaggactcgactacctccgaagaaagccgaaacatgtggctccgcccacactggcctcagctctccgttctcgactattgccgaagtgagccgaagtttgtggccccgcttccggagaactcaagctcccgattgtgcccgaaggaacccgaagggagaccccgcctcattcctcacggcgagctccagaccccgcctcctttccggagcccgtctgttccccttcgggtccaaagcttttggctcctccttgttccgagcccgaaggcccgccccttcacgtactcggagctcggatcccagtgtggacctggactcgaatcccgttgccgactcgcgctctcggcttctgctccggggcttcttccctgcccgcccggggccctgaccgtggcttcttccccggcctgatctgcgcagcccggcgggcgcccagaaggagcaggcggcgcgggggcgcgctgggcgggggaggcgtggccggagctgcggcggcaagcgggctgggactgctcggccgcctcctgcccggcgagcagctcaggtgggccagggtggcggcgcccagtggcgaggcgaggttacacggcggcagggtctctgcgggctggcgggtgcggggcggccccggaggcgcgttggaactcggggctggcgcaaccgcctgtggctctgccggggatgcgctggggtgcgcgggacgggttggggctgggcctgggcctgggcctggggaggggagggtgttcgatccccgggttctcagtaggagaggggtgtggagctccgaaggaggtgcaggttggagacccgggctcctctgggtggtctcgaagaagggctggggggtccggatatctggtttcacaagggccgggggatgggggatccaaagagggggtctgggttcctggatcctcgctggaagagggggctcggaggtctagattcctgggctgtcgaagaggaagggtccgggaggggtgccgtttctgggtttttaaaagaggggcgtcttcaaatctgggtccccagtatgggtgcggggagtagctttgatttctgcgttcgcaaaggaggggcttgggtgctgggagatccccacactttcctgggttctccaaggacaggagagctggaggcctgtgcgctcaaaggaggggctgggggtggattcctgtctcctccaaggaggaaggggctggagtccgggttgctaggttctcaaaggagaggagctgaggctcatactccatcatcctcaaaaactggggtctagaaggctgggttcctggatcctcgaagagggaggaggcagggggcctggattcctgggttctcactgtgaatctctgcccctcccccagaccatgtcgcctgaagaatggacgtatctagtggttcttcttatctccatccccatcggcttcctctttaagaaagccggtgagtcaggctccctccccagtggaaaataaagggggggg

SEQ ID NO: 8209 - DNA, 6000 bp, Homo sapiens
gtccggtgcggggactggtaacccatgggcctgtcggttggagcgggggtctcacctgcttgcccatcgctgagctccaccactatccaaggaaagatgaaggcgccaaaagcaaagcctttggttagtgtgacagctctgcagtattagcagctgtttactgttacagcctgtgtgaccgctcttggagccctgatcacagactgccccgccccgctgtctctccgactgtctcagcaacctctcgctgtctagcccagtgccacctctccgtgtctttcacccattgccacccctccgctgatcactgtcaccatctctgctgtctagccatctcgcctctctcctaattgtccctgcctctgcggaaagtctctctgcctctcactcgctgtctccgtcatcccttcctggtaactagatgatgcggggaaggggagctcccaaatcggggcatagcccagaagagttcttggctttgcctaagaaagaatttaggccggtcgcggtggtccacacctgtcatcccagcaccttggaaggctgaggcgggcagatcatttgaggtcaggagtctgagaccaacctggccaacacggtgaaaccccgtctctactaaagactacaaaaattagcagggtggggtggcgggtgcctgtaattccagctacttgggagctgacgcaagagaatcgcttgaactccggaggcagagattgcagcgagccgagatggcgccattgcacttcaacctgggtgacagactaaaactctatctcaaaaacaaaaaaaaaaggaatttaagggtgagctggtgttacacaaccccttaagggttacggcaacctctagtcaagtggccgagcacagcagcagcagaggtactgctcctagggtggcagggctgccccacaggcggtgtgcccagaatagcagctcagaaacacacctgcagccactcttgtacctgcttttaattatatgcaaattaaaggtcaggtatgcagaaattcctagaaaaagggcggtaacttccggtcagtgggtctttgccgtggaaaagggcggtaccttccgggggttgccatggcaacggtaaaccgggatgccacactggtgggcgtgtcttaagaagagctgcttccaccctctgccctgttttagctagttctcaatctggcgtggtgtctgagtccccgcctccaaagtcccacatcctacctcagaacttctgagaaagccttttccccttccgccctggcctttcccatccgaataagaaggagctgcctggaagtgacccccaaagccctttcatttctgaccttctggggcatctgggttgcggctcatcctagacctgctgccgtcccccagccctcccttggcctggtcagctcctaccaataactgtgtgttgcaagggttagaaagccaggagaggcagctgcaggtacatgtaattgtaattgtatccatcaatgttggggtctgagattcgtgagatgaagccacagtattaggagaaagcaaagatttgtaaaaaccccactgtttagaatctcccctctctcacacatcacacactgtttcagattttctactaaaagcaacacccagcacagctgtgcatgactcccaggcccctaccctgtcctgcaggatatgtgatgagcagaggaaggagagcaggctggatcaggaggatttggggtccagccagactcagacatggggaagacgctggggctgatggaggaggaagagaggcaagcaagttggagagaggacagatggacgctcccttgggagctcttatttctcatttccaagagcccctgaggatgaagcccctcacccacacctgcggggtccctgggtcctcttatgacaggagaggaggctgctcgggcctcggtgggatctgactgggatgaggctggagtccgccccagacctgctcctttagagagaagcaccccacttgtgggtgcacctcacaccgcccctcctgtgctcacctgaaggcctctgtgctcagggaacccctgagagtaaggaggggccacgcacctgctccctggatgagttagggagttattcacagcgcggcttgtgtgtcattcatttctaccctgccttttctgtgcacacttgtctattgttactctctgttcttctgaaacatttaaagcaatacatgaatatataaacttatcattttaatttgggacatgatttcatttatatatttgctttagaaaatagtttcttatttatgttaagttttcctatcctaaacttttaaaattgaggtttattgatgaacttaagaagtgtcttgaaattttatttataagaattttatatatttatttcaatttaaacaattattcaatcacttgaataatctgtaaatgaggtctttgattccttataaataaaagctaggtatacatgatacagtaattggtttgagttcatttactttattttataccaacttactacagaatttcttaattccaattattttcaattgatcccctctaatttactaataaaatgtacataactcacacaaaagttgaaatttcactttatttctaaattgcattccaattgctgtctcccaggctggagtgcagtggcgtgatctcggctcactgcaagctccacctcccaggttcacgccattctcctgcctcagcctcccgagtagctgggactacaggtgcccgccaccacgcctggctaattttttgtgttttcagtagagacagggtttcaccatgttagccaggatggtctcgatctcctgaccttgtgatccacccgcctcagcctcccaaagtgctggaattacaggcgtgagccaccgcgccgggcggattattctctagttcttttagttgtgatgttaggttgttaatttgagatcacccatcaccacacctggctaattcttttgtatttttagcagagacggggtttcaccatgttggccaagctggtcttgaactcctgacctcgtaatccacctgcctcagcctcccaaagtgctgggattagaggcgtgagccactgcaactggcctatatgtctatttttataccagtgtcatgctcttttggttactatagccttgtaaactttgagtcagttaatgtgatgtctctagctttgctctttttgcttaggattgctatggctgtttgggctctttttttggctcaatataacttttaaggtttctttttctaagtctgtgaaaaatgaaggtatttttgtaaggactgcattaaatctgtagattgctttgggcaatgtggtcattttaatcatagtaattattctgatttatgagaatgggatgtttttccatctgtttgtgtcttctacaatttctttcatcactggtttgaagttttccttgtagaaatctttcacctccttggttaaatatattcccaggtgttttatttttgtgcacccactgtccatgggattgcctccttgacttggttctcagcttcgtcattattggagtacagaaatgctactgatttctgtactttgattctatatcctgaaactttactgcatttctttatcaaatctaagagtgttttggctgagtctttagggtttttgaggtataagataatatcatcagcgaacagaaataatttcactttttttttttccaatttagatgtgttttatttctttgtcttgcctgattgctctggcaaggacctccagtactacgttgaagagtggtgacagtgcacatctttgtcatgctccagttcttagggggaatgctttctatttttccctgtttgcgatattggctgggatttcgtcacctatcgcctttagtattttgaggtatgtccctctgtaccttgtttgttgggaatttttatcatgaagggatgcaggattttatcaaatgctttttctgcacctctgtgacataatcatagagactgaaaccagaatcctctcatgtcccaacccctcatgtcttaatctagtctagacattaaccgtgattgagcctctcccatgacccaagcacggctgacccccacatccgctgtgatgagtgaggttcatgacaacaggctccacacagggaaactgaggctcagagatgagacattactgcccaagatcacacaagccgtagataataatcgggaattacatagaaatcaactccccaccagccgggcgcagtggctcacgcctgtaatcccagcactttgggaggccgaggtaggcggatcatgaggtcaggagatcgagaccatcctggctaacatggtgaaaccctgtctctaataaaaatacaaaaaaattagccgggcgtggtggcggacgcctgtagtcccagctactcgggaggctgaggcaggagaatggtatgaacccgggaggtggagcttgcagtgagccgagatagcgccattgcactccagcctgggcgacagagcgagactcggtctcaaaaaaaaaaaaaaggaaagaaagaaagaaagaaagaaagaaatcaactccccactcagcaaaccagagcccaaacctaagtaatgtacccacaaaaattaaaaaataaatagatacataagaatgaaaattttaaaacaaagcctaagtaattactccaaaaatgttgaacatggattgaggtatagagggaagcccaaagaaacagaaggcacagtggaggcagaaaagattcagaggtttgttactggaggtggggtggaggtggacgctgttgcaaaaaaaaaaaaaaaaaaaaattaagggaagtacaagaaagagagtactattggttagaaagaaaacactccagggccactaaagggtcatgatttcctcccctatttccctgcatttctcctctgtgctcattgccacatgcagctcagcctgggctacacagccaggtgtcagatgtgtctctgctgatctgagtctgcctgtggcatggacctgcatcttccctgaagcatctccagggctgaaaaatcactgaccatggtaaggaccccgcaacgctgagctcatggacgggctgaaggagggagggagaccccatggggaggctctgagagggaggaggtcaccctcgcctgaaaggggctgactcgggaaggcaccgggtctatttgctgctgtgtcccggctctcagtgagataaagataaatcaggcagacagtggcccggggaagggagaccccacttctgtctgaaatgtctgcagagagcctggtgcctgtagtctcaactacttcacttcagccctggggaaatgagagccaggctcctggggagagcagttcccctttctgtgggctgagaatgagaaaatcctatgacaagaaggacccagcctccgagctgccacaccctgtgtgtctctctgtcctgccaggcaccatggtctcatccatctgcacagctgcagccagtgggaggagacgccgtgagccctgccctcatggttctgctctgcctcggtgagattggaagcctcagggaaggggcaccctagtctgggagggaccccaccccataacgaggcccttgtctatcaggaaactccagggttttaggaggttcccaggcaggggaggacctgctcaggcttcagaggcaaatctctcacagggaactctcttccagggctgagtctgggccccaggacccacgtgcaggcaggtgagtctgtccccagctgtcccaggtccctcctcctcaatggggacaaagggccacccatgggcagctggaggtgaagaccgcagttctgggtgattgatggggacgtctggagggtcctggggctgagagctgggatctgaggggtggggaggtcttggagcccagactctgatttccttccagggaacctctccaaagccaccctctgggctgagccaggctctgtgatcagccgggggaactctgtgaccatccgg

SEQ ID NO: 8210 - DNA, 6000 bp, Homo sapiens
gacatttcacattgcatcttgtgtcattttatttctgtagatgttgtctttccacttgacatttaattggtgtttaatttaagttgcaaatattgtgtatgtatctgagtctagtgtgagaatcactactctatgcctgtgcatcccacatcaagtaacgtttttgagtgagggagctgtgccatgctgaatctgcagcatgccttggacataagcatgtagcttgtcttctccagcttggaggagagtctcagaggaaaggtcttagaggaatgcaaaggtggaggggtcctcataatatggaacaacgacagctctgtatcacccttcttatggaaaaacccagaataactgcccatgtgttctgtgaccttggattgtggaggaacagacggatgtcgattctgccagccactccttccccagtgggcagcacatccttgccccccaaccttcctgggcacctggagttcagatactaggggaatattaatcagggtccaaccaggaaaacagaaacccttctctgcagttaacagagagggaagtaaatgcaggacggtgcccctgcattggatcccagcacaggcaaagaacgttagtggaaagatgatgaaatccaaagaaagcctgtcagttaattattgtaccagtgttaatttttttttttttttggcggatgtgctggggtcgtgtaaagcatgaacattagagggacctggatgaagggcatatgggaactctctgtacctctgcaactcttttgcaagtttaaatttattcccaggtaagaagtgtgtttaaaaaatgaattagtcggccgggtgcagtggctcacgcctgtaatctcagcactttgggatgccaaggtgggcggatcacctgaggtcgggagttcgagaccagcttgaccaacatggagaaaccccgtctctactaaaaatacaaaattagctgggcatggtggtgcgcacctgtaatcccagctactcaggaggccgagacaggagaatcgcttgaacccgggagccaagattgcaccattacactccagcctgggcaacaagagtgaaactcagtctcaaaataaatatataaataaataaataaataaataaatcagtcaacaaatacatatcaaaaaggaaccagtggccacatggaggcaaaggagcatgaggaatcttctgagcagtgaagaaaatcttggatatgttggtggtttcacagctgtcagaattcactgaattgcacagattaagtggatgcagtttgtgtgcaaaggatcctttgataaagctgaataaaaatcactaatgaagacctaaagtgaaaagaggcagggaggataatctaatgcatagaaaccattatgccagtaaaagaagagtcagaagcaggaaagtcattctcaggagccactgtgttttggcctcatgttcaatgctaagtttcaaaacaaatgtagtattccttgcaaccatgagaagttggtgagtgatttgaaatcattcttatgatgaggtggaagcttttggaatctgtacccctgcactttatccttgtcctcatgatttacaaaaccatgaaaataaagctcagttaattcatcatcatcaaggtgagctccaggttcagtattcagcttgaggctggggactccatctttctttaacttttgactgcatagccttcacttagtttttatatctcttaggcattacaaaaaattaggccaggcgcggtggctcacgcctgtaatcccagcactttgggaggccgaggcgggtggatcatgaggtcaggagatcgagaccatcctggctaacaaggtgaaaccccgtctctactaaaaatacaaaaaattagccgggcgtggtggcgggcgcctgtagtcccagctactggggaggctgaggcaggagaatggcgtgaacccgggaagcggagcttgcagtgagccgagattgcgccactgcagtccgcagtccggcctgggcgacagagcgagactctgtctcaaaaaaaaaaaaaaaattaaaaaaaatatatatttttttagatggagtctggctctgtcacccaggctggagtgcaatggcacgatctcggctcactgcagcctccgcctcccgggttcccaccattctcctgcctcagcctcctgagtagctgggactacaggcgcccaccaccacgcccggctaattttttgtatttttagtagagacggggtttcaccgtgttagccaggatggtctcgatctcctgacctcatgatctgcccacctcggcctcccaaaatgctgagaagattacaggcgtgagccattgcacccggcctaaaaaatctttaacatattatattaagcagttttagttggtttattgttattttttagatggattgctgtcttatggactcacagaaaattggattagattggaaggatataccagggactgtaacatgcagaactctttgaggaccagggtttagcttgaattcccctgtctgtccacgagatccaagtttgtgatcattactgtcaccacgtctcaggaggaagactggtcagcaaggcagtgatcatgctggaatgtttttgaaacgtttggactattctgatgcaaactcatcttttaatgacatttcacactacatctcatgtcactatatatgtttttaaatttttaatttttgtgtatacatagtaggtgtatatatttatggggtagatgagatgttttggtacagcacgtgactccctcttagttatgcaaatttctccagcaagtcgttgcccagcagcctacttgaattcctcccctgaaaacggacttttcttttctaccatgtggctagtccgcaaatttttcgaacttttacactttgcttctcttttaaatataaactctacctttaggtaatttctttgctcccacatctgagcctaggttggtacaagaagccatgccacttgaacactttgttgcttagaaatttcttctgacttggccaggcttggtggttcacgcctgtaatcccagcactttgggaggccgaggcgggtggatcacgaggtcaggagatcgagaccatcctggctaacacggtgaaaccccgactctgctaaaaatacaaaaaattagccgggcgtggtggtgggtgcctgtagtcccagctaatcgggaggctgaggcaggagaatggcttgaatctgggaggcagaggttgcagggagccgagatcgcactgcttcactccagcctgggcaacagagcgagactccgtttaaaaaaaaagaaaagaaatttcttccgccagacaccctggcgtggtatctctagggcatggacagaatgcagccacgttgtttgctaaggcgtaacaaaggtggctttcgctctagttccaagtaagatccttatttccagctgagaccttgtcagcctggacttcgctgttcacatcactatcagcattttggtcacaaccatttaatccatctctaagaagtttcaaacattcccttctcttcctgtcttcctccgggccctccaaataacatgaggtctattccgttaacaaatttcaagtgaacaagacgttattgctgacgatgggtcgtatgtggtgcagcagatctctaggcctgtttgttaataactccccatttccccctcctcccagcccccgtaaccaccattccctgctgtgatgttgtgactctggtgactttgcagatctcctgtaagtgacatcatgcagtacttggtctctgcctctgcgtcgcttggcgtgatgtcctcaggtttcgtccgtgttgtcgcccatggcagaattttcttccttgtttaaggctgaatagtattcccctgtgtgtgcaccacattttctatatcaattattctatcaatggacatttagatggttttcacgtcttagctattgcgaatagtgctgcagtgatcaggggagttcagacggctctttgacatactgattttttttttttttttagacagagtcttgctgttgttgcccaggctggagggcaatggtgcaatctcagctcactgcaacccctgccttctgggttcaagcgattctcctgcctcaaccttccaagtagctgtgcccaccaccacacccagctaattttttgtatttttagtagagacagggtttcactatgttggccaggctggtctcgaatttatggcctcaggtgatccacccacctcggcctcccgaagtgctgggattacagctgtgagccactgcgcctggcctgtttcttttaaatacagacccagaagtgggattgctggaccatatggtagctctatttttaattttttgaggaacctccccactgttctctatagtgattgcccaatttttaattcctactgtggtatgcgagggatccagtttctccacatcctcaccaatagtctccttaaaaaaataatatgctttgtaggatatttttaacgtgttaaataccttgtcgggattttagcatagatcacaatattaaaaacttggggaaggatttctatggctcccatttgtaatacaaggaaatgtcagcttctagttttgtaacgtcttgcccaagagctgcgaccgttaacttgtggagttgggacggcgtccaagtcaattggttgcccgacctttattctgccttgtcccatagatttagaaagaggctgacacatctggtaactagtttacggtcatctgcctctaagcgacatttagggtaagcgacatttttcagaaaccaaggccctccctctcgtctcactagtgggaagggtggaaagaacaggacagaaagctcttcctcttgtgtgaggcagttgctgtggaagccccataggcaggaggcccccgggcagcacatcctgtctgcttgtgtctgctgcagagttctgtccttgcattggtgcgcctcaggccaggctgcactgctgggacctgggccatgtctccccaccccaccgccctcctgggcctaggtgagtcctggaggcagccgggaggctggaaagggggtcgggaggtctggaaaattccctgctcaagcctgactctagtccagaagattctggggaggaaagtgtcctcctcctcccaagactgccctgctgctctccctggggcctaagtctgatcagagaagatcttgtcctaaaaacaggggcccgggtgtggggatgaggtcagctttaagaagggctgggggagcaggagcctttttggaggaggagactttgggatttatcttgaaaccattttgcagcaagaaggattacatggagacagtgatgtcgaggagggttggcttggtcgttatgaaatgctgaatgccccccagctccatcgagcccccttttgacagcagccccgtaaggagactgggcactgggcatttttctcactggggcttctcttccagtgctctgcctggcccagaccatccacacgcaggagggtaagtcatgccttcgtcccgtcttcccagtcccctctgtcaccccaagggcagtgctgggtgggagtgatgttgattcttagagggcctggagagatccctttaaatataccctagattgcaaactcttccaaatgtaaaatgcataaccaaccctcacccagttctctctcgcatcctccacctgtcttattttgcttttcttattttcaaaaattttatttttaattgacaaataattgcaatttgcggggtacagtgtgatattatgacgtatgtacacattgtggaaagattaaataaagctgattaacatatcagccccatcacatacttattgtgatgagaatattttaaatctccttttagcaattttgaaatatacaataaattattatgaactactgtcattctgctgtgccatagatctgaaaaattcactcgtcctggctactcgaaactttgtatcatttgatcagtgtctctccca

SEQ ID NO: 8211 - DNA, 6000 bp, Homo sapiens
actacatggtagcatgagcctgtagtcccagctactcaggagtctgaggtgggaggatcgcttgagtccgggaggcggaggttgcagtgagccaagatctcaccaccgcactccagctgggtgacagagtgagaccctgtctcaaaacaagacaaatcttgtttcttaaaatttttgtttccattatggggaaggagagagtggagattgtgtgctaggtaacgataaaaatatatttattcatctaggttgaggtcagagaaatttgataaatgctgcagaggtagtaaatcaaaactggtttccccatggaaatcaatgtaaagagtgtgtgtgtgtgtgtgtgtgtgtgtgtgtaggccagtcttcagaatctagccatctacaattattttaaatccctttggctttcattttcctccatattatcaccaatacttcccagggtgcctgttacggtgaaaacaatgtcagcggctttgtctttctcatagtgttctatccaacctaatttttgttccacaattattgttagggaaatattttccccccaacgctagcattacccattggttagcactattacaagtatagttttctttgatcagacttttctatgtatcctgaaaggaaggtagtgttattttatttatcttacagatagaaaagtaaacagggaaataaagtaatttattgcagttcatacagctggcaaagggtagggcttcaactgaaataggtttttattattgcgataacagtgactgttaaaacaaaagtacaaggtcatcaaagtccctcccagaagttccacacaaaacatgcaatgaccaggatatgggcagactctgtggctgcgtttctatttcatattgaatttaggccgggcgtggtggctcatgcctgtattcccaacactttgggaggccaaggcaggcggatcacctgaagtcatgagtttgagtccagcctggccaacatagtgaaacctcatctctactaaaaatacaaaaatttgcagggcatggcagcgcacacctgtaattccagccactcaggaggctgaggcaggagaatcgcttgaaccccagcctgggcaacagaacaagactccgtctcaaaaaaaaaaaaaaaaagaatttggtgcagctatgggcaataaagcacctagtttacaatgcagatgctgccagcttcaaatttatgcaattcttcccattttttttaacatagggctttttattttttttttgagacagagtcatactctgtcacccaggctggaatgcaatggcgcgatctcagctcaccgcaacctctgcctcccaagttcaagcgattctcctgcctcagcctctcaagtagctgggattacaggcatgcaccaccacaaccagctaattttgtattttttttttttagtagagatggagtttcaccatgttggtcaggctggtctcaaagtcctgacctcaggtgatccacccgcttcagcctccgaaagtgctgggattacaggtgtgagccaccatgcctggctagggaatttatattattattttagaaaacataagacatcatattgttaggttgtagtctcaagatcaggtacagttggccaggcgtggtggctcatgcctgtaatcccagcacttcgggaggccgaggcgggcagatcacgaggtcaggagttcaagaccagcctgaccaacatggtgaaaccctgtctctactaaaaatacaaaaattagcgtctcaaaaaaaaaaaaaaaaaaagatcaggtacagttgccccttggtagcagtgatgggactggttctgggacccctatggatacccaaatatgcagatgtttaagtctcttatataaatgccctagtatttgcatataacctatgtacatcctctcctatactttaaatcatctctagattacttataatgcataatacaatgtaaatgctttgcaaataattgttatattgtttgaaacttgtactcattttttattactgtatttttttccccagtattttttatcagcagttgattgaatctgctgatgcggaacccacagataccaaggactgtaattcaaatcataaaatgcaccctaggcaaagcccacctgggcctcttcctcgtgtgcgtggtgggctctaggcaggatctgctttgcttaatggacagagtcagccctgtcttcagaacaggagcctgggaatttccatttttgacaagctggagttttctttttctttttatagagacagggtttcactcctgttgcccaggctggagtgcagtggccaatacagtgacacgatctcggctccctgcaacctccgcctccggggttcaagcgattctcctactttagctgggattacaggcatgcgccaccatgccccgctaatttttgcattttttatagagatggggtttcaccatgttgctcaggctggtctcgaactcctggcctcaagcgatccgcccgcctcggcctcccaaggtgctgggattacaggagtgagccaccgcacccgggccaacaagctggagttttctatcagtcaagtctgggaagcactctgaagggtttgtgaaatatttgttacttgacctctaggaaggctcaagtattcgctctcaggaggatcggcatagcatggtgttcataggcattctggagtcaggttagatccaaatgtgagctcagcagctgtgcccatgggacctcctggagtctcatcttaccccatctgtgaaacgggaggccgggcgcggtggctcacgcctgttatcccagcattttgggagactgaggcgggttgatcacctgaggtcaggagttcaagaccagcctggccaacattgtgaaaccccgtctctacaaaaatacaaaaattggctgggtatggtggcgggtgcctgtaatcccagctactcgggagactgaggaggaagaatcgcctgaacccgggaggcggaggttgcggtgagccgggatggcgccattgaactccagcatgggcgagactccgtctcaaaaacaaaaatcaaaaaacaaaaaacgggaaccgtcccccatcgtcctttgagcagtcgcgtggctgcgagccccgggctggggccgcgctgaccctcccgtgcccctcgcagatgcccgtgctgaagcagctgggccccgcgcagcccaagaagcggcctgatcgcggcgccctgtccatctccgcgccgctcggcgacttccggcacacgctgcacgtggggcgcggcggcgacgccttcggggacacctcgttcctgagccgccacggcggcgggccgccccccgagccccgggcgccccccgcgggggccccgcgctccccgccgccgcccgccgtcccgcagtccgcagcgccctcgcctgccgacccgctgctgtccttccacctggatctggggccctccatgctggacgcggtgctgggcgtcatggacgcggcgcgcccggaggcggctgccgccaagcccgacgcggaaccccgccccgggacgcagcccccccaggcccgctgccgccccaacgcggacctcgagctgaacgacgtcatcggcctctaggttccctcattccccgcgcccttcccgcccggcaccccacttctgtatacataaacggccaaggtgtgtgcccgggctctgacttttcactttgcacgtggaaagggatgaatgatagggtcctggcgcctctgagagccggatgtgtcacccggaggcctggtccgggtccgatgattgccctggggtgggggtgcggctcctttaagagagcccgagggcgtggccaggcggtgccccttgcagaggcggcggctcccgcagtcccattcgtcaaatactgtgcgccaccgccggccggacgtggtcctggggccgggccagactcagccaccgcggggccagccgaggcggggctgcagagtgctgcagccccaggagtccttctggccctgaacgcctcaggtggactccgacccggcggagccgccgtttactctgggagcggctgcagagggaagtgtctgagaacacttttagagcagtaggggcctggtctccgtgggggaagggtccgcaggcatcttggttctttaaggcccccgagggatggggccgaacatgcaaatgatttggactgaggggccaggttctcgtaagtttcccagaggggcggggccgcaaatgtaaatcacttggactgagggcgggtccaggttctttaaagacgtcccctcatgggcggggcacacaggtatcaccgggaaaggggcggggcaccacatgtaaatcaccgggaaagggatgggacacaggtaaatcacccggaaaggggcggggcaccacatgtaaatcaccttaaaacggacagggcacacatgtaaatcacttggggagaggcacacacgtaaatcacccggaaagaggcagcacaaaagtatcactgggaaagggccagggcacgcatgtaaatcacccggaacggggcgggacacatgtaaatcacttgagaaggggagaggcactcgtaaatcacccggaaaggggcggggcattacatgtaaattaccctgaaaggagcggggaacatatgtaaatcacttgggaaggggagaggcacacataaaaaaaaaaaaaaaatcacctaaaaggggtggggcactcgtaaatcaccaggaaaggggcggggcaccacatgtaaatcaccgggaacggggcggggcactacatgtaaatcacctaaaggtcgaggcacacgtaatcatcccgaaaggggcggggcattacatgtaaatcacccagaaagaggcagcacacatcaatcaccgggaaaggggcggggccaggctcccaagagctccgggagaccgagactgccgcagcctttacgcagcttgctttcctggcgctgggggagggcgcagccgggaagtcccagagcagcggtgtcaggctctccaccaaggagggactgggccagagtcctcgcgagggcacgcggcgtggtccccagagctaggccggagcgcgggccgctgacgccactgtcgggtgaggctcggtgcatccatggggagccgccctccgtgcggggcgacctcgtctgcgcggcgggcgtgccagttccccgcacccatggcagcggccagagagccggagttgccgcaggaagcccccgccacggaacccgcgcccccgccggcctgccgcttcttcctggaaggccgctgccgcttcggcgcccgctgccgccagccccaccctggggcgccggcgccgcctggccgcgaggcgcagccggaggccggggccaagaagccgccgctgcgcacagccgcggacgtcatccagcgcatccgctgggacccgcgcctcgaccccgccgacttctcggtgggctacgtcgaccgctttctgggtgtgcgcgaggagcccttcagcgccttttgctgggaccagccgctggcggcgctcgggccgggcgtgctggcagtgccccagcaccgcgtgcgcttcttccgcttccatggccgccttgtgtgggaccgcgcctcgcgcaccgacctcgtctttggctctggctcggcggcgggacgcgggcccaccatcctggacgcaccgaacaccgagggcgcccacggggcagagggtgccgagtggacactggcggggacaggtcaggaggcccaggctgcccccaagcgagggagcacaaggccgctctgcacagggcaccaggaaccaggcgtggaggaacccggagagctggaggcggcccaggagagggcgctgggcacagctgctgatttgggaacactggccccaagaggacgcctcgccggagtgactgaggaggcactgaagccaacagcagccaccaggaccacattgctggggggcaaggaagcacaggccctgggagtcccggggggctccgctgagacgacaga

SEQ ID NO: 8212 - DNA, 6000 bp, Homo sapiens; identical to SEQ ID NO: 2014

SEQ ID NO: 8213 - DNA, 6000 bp, Homo sapiens
cctgtgttctcagggcgctgcccctcgtggaacctgcccttctggtcaccaggacattgcctaaaccaggcctggccagtcatctgggaggggccaatgccagacaataagagactttcctgggattttatagcgatcctgggagagaagagctctgttttatttgggggttgctaaactaagccacagctgccaccacggacggaagaagcttggagtgaaagaatgaagccaaggcacagagacggagagacaaggagagggagagagagagggaaaggtagagacagagagagatgtggggagggagagagagacagagagatagagaggtagagatagagacagagggatatagagagggagagagagacggagacagaggatgaaagagacgagacacagttggagatagagggagagatgcagagacagagagagatagagagggagaaatagagacagacagagctaggaagggagagagagacagagagaggaagagaaagggagagacacagagacagagacagagagcttgagagacagagagagaggcagaggaagaaagaggcagaaagacaaatagagagacagagacagggagagacagagacatagacagaaagatggcgagcactccagcctgggcaatagagcaaggttccatctcaaaaaaaaagagagacatagagacagagacaggaaaagacagagagatagagacagagagagagaaaaaagagagagagagagacatgaggacaaagagaaaggtccacaggcactgagcttgagtcacccctggttgcagccatgcctgaaggcagctctgcccgaccgctgagttccacagcccagcatctgtgatgggctgcacctgtgtattagcacgttactgataaggcccagctgctttaacaaatcggcccgcctggcgtagcggctccggcacagtggacgtttacttcttgctccaggccggcgacccaggcagctccacaggtgacctgaggactcacggtccctcatctgggctccatgaccccccagggccccatgtgctcctcctcctggggttggaaggggaatggaggcccagggtggacagcaggaagaagacacgtggctggaggcacaagcccgcggcggcctcagcaacaggacccagctttccttcctgcgaggcatgagtctggcccctgcccccgggctcctgaccctccagccaacccggcctcagaatgagtggccccgagagggccccgggccacagggctgtggggacacctccagctgtaacaggcggcaggaccaggaggtgagcaaggggggaaaagcttccagaagttttcccagacgctgcgaccctgaggctgggccttcaaggatgaatggggcgagagtgggagaagggcttcctgggcagaggatgtgcggctgttgggacagtggcatctctaacaaaataccgtaggtggggcagcttagacacaacaaatttacttctcacagctttggagagcgtggaggttcaagaccaaggtgtgggcagctttggtatctgctgagggcctgtttttgttttttcgttgtttttgaggttagagtgcagtggcataatcttgactcactgcaacctctgcctcccaggttctagtgattcttctgcctcgtcctcctgagtagacaggattacaggcgcccaccaccaagactggctaatgtttgcattttttgtagagacggggtttcaccatgttgaccaggctggtcttgaactaccgacctcaggtgatccaccagcctcggcctcccaaagtgctgggattacaggcgtgagccaccgcgcctggccctcactctgtatttttagcctcactaaggctgatcttgaacacctggtcttacgcgatcctcccacctcagcctccctaactgctgggattacaagtgtgaacgtctctttatgtgagtataggaatagaacagaagggggcacttcctgcctgcctcctcccccaaacctacgctgtttgggatttactgggaggctgggagatcttctctctagaggatgggatgggcgtggacaagttgttatctttataatgttcttattagattaagacctccaaagggtgctgggcgcattggctcaggcctgtaatcccagcactttcggaggctgaggtgggtgctattgcttgagctcaggagttggagaccagcctggggaacatagcaaaaccctgtctctataaaaaattagccgggcgtagtcgggcacggtggctcacgcctgtagtcccagcactttgggaggccgaggcggggggatcacaaggtcaggagatcaagaccatcctggctaatacagtgaaaccccgtctccactaacaatacaaaaaatgagacgggcgcagtggcgggcgcctgtagtcccaactactcgggaggctgaggccaggagaatggcgtgaacccgggagatggagcttgcagtgagccgagatagtgccactgcagtctggcctaggcgaaagagcaagactccgtctcaaaaaaaaaaaaaaaaaaaaaaattaggcgggcgtggtggcgcgtgtctgtgatcccagctactggggaggcttaggtgggaagactgcttgagcctggggaggtagaggctgcggtgagccgagactgtgccactgcactctagcctgggtgacaaagtcagatcctgtctcaaaataaaaaagacccggctgggcgcggtggctcaagcctgtcatcctagcactttgggaggccaaggcaggcgcatcacctgaggtcaggagttcgagaccagcctggccaacatggtgaaaccccatctctattaaaggtacaaaaatcagctgggcatggtggcgggcgcctgtagtcccacctactcaggaggctgaggcaggagaatcccttgaacccgtgaggcggaggttgcaatgtgccgagatcatgccactgcactccagcctgggcaacagagcgaaactctgtctctaaataaataaataaataaaaaccctcaaaggggctagtctcacccccccaccagctgtccccaatgacatcctcatgattaaagctgaaatgaatcaggaacatgtggaccacatttgaagtgggttaaaaatgagaaagcaaggttggccacggtggtttacacctggaatcgcagcttttttacagttttttttttttttttgagacggagtcttgctctgtcacccgggctggagtgcagtggcacgatcctggctgactacaacctccgcctcccaggttcaagcgattctcctgcctcagcctccagactagttgggattacaggtgctcaccatcacgcccgcctaatttttgtatttttagtagagacgaggtttcgccatgttggtcaggctgtctccaattcctgacctcaggggatccacccatctcggcctctcaaagtgctgggattacaggcgtgagccaccgcccccggccttggccttattaagacagtcttgctctgtcaggcaggctagagtgcagtggtgcaatcacagcccactgcagcctcgacctcctggttgaagcaatcctcctgcctcaggatcccaagtagctggggccacaggcatgcgtcaccacgtcccgctacttttattttttgtagagacagggtctctgctactcaggctggtcttgaactcctgggctcaacgaagcctcctcctccgtcagcctcacaaagtgctgggattacaggcgtgagcaaccgcgcccgccccacaccctaccttataacatcatctgaaatcattacacagggctctctcctccccctaggaccgaggactccctaggaaacgatgccaagagtctagctcactgttctattctcagagccactggcaggcacttaatacatatttgaatgaatgtgtctccttcgactttaaaaatgcccccaccgggaagtgcgtgggggatgtgggaaggccggaaaccatttctgcagctgccagtccccttccaggccctgtcatgggatggagcagggcatcactgtgcggcgccttggcctgtggatcccctccccacgtttcttgcccggtgcaggccggaaggcaggcaggtacaagcaaggagtcggctctacgcgcagagccccaggggagcggcccgtgctgggcatggcagtcccagcagtgcatttgtctagctgccggccgcgggtccggggccacttcctctctgctccttgctgatgtcacggtggatgaagacaacggggcacccacgtcaccgctgttctccccctgaacacggagcagttattctagaactgttttcccctcctcgcccaggaaagccagatggaaaaaccctcttgccctgaaccagctcattttctggccagtcgccccttccagcgcctgtcccggaaacctcgcggcctagcgcgcgcagcccgccgcctccccgcgccgcgcccgccaccgccccacgcacggaacatcccgcggcgccgcccgtccgtgacgtcaggtggcgagactgtgacgtaacacacggcggcagggcggtgccaggacgaccagccacgcgtcgccatggcaacagcgggcggggaggggcgggcggcggaaggcccgcccctagaagggtgtggaaaccgttagaccccctttcctgcccgcgcgcgccctcgcggccacgcgctttcggtgtcccccgcgggcagcggcccggcggcctcgtagcggccgcaaaacgccgtggccgtcgcgcggcgccatccgttgtcgcaaagcggcgcgagaaacgcccagccgggtgttggccccgccccgcgctgtgacgtcggcggcgcgcgcccccggcgccgtggccgcggctgcgcagtggggcgcgtatggctgccgccccccgctggcagacgctggcggcgtaaggcgcgcgggccccggagcgggcgcggcggagcgcggcgagcccggcgcctcccgtcccgaacatgcggaggccggcccaggcggcgcgggagccggagcgggggcccaagcggcaccggagccggagcgcgagggggcgcggggcccggagcgggggtccgcgctgcgctgctgaggccgggccggccgcccagacgctgcccgcgggcccggccacggcggagccaaggtaacgacgcgcgcgcccgccccggccccttcgccccctgcaccctggccctgggcgcccccagtgacccccggcgcccccgcccccacactcggtgtccactgccctcctgcgccctgccgaccccgtgctccggaccccagcgccccccaacccgtctaaccgccccgcaagctgacccccacactcagggccccaccgccgcaacaccccgttgaccctgcactcgggaccccagcgtcccccaccgccctaacccgcgctcaggacctccggacacagccccacgctgacctccacactcaggagtctgccgccccagtgaccctcacactccagaccctgcccccgccgctccagtgacccccccactctgcaccccggtgactgtcgtgctccaactctcctgccctccgctgagcctttagtccccaccccacctcccgccttcttcccccacccagtgctcaagcccaccgcccactcacccgcgtccctcacgcctccccgcgttctggtcccgaggcccctgcccacctggccccatcgcctcctcctgtcttggcctggcccctccccacgcagctgtgtccccgtcctcactttgtggtcctaaagctcttgagggggagagcagggggtggtgggggggaggaaggtggtctgatccgcagggacctgttgcggcactgcctgggaactcccggctgggctcgctgccccctcccccttccgctgtggccaccggctttgttttccggaaacgcacggatcagggagggagggtgagatgtctga

SEQ ID NO: 8214 - DNA, 6000 bp, Homo sapiens; identical to SEQ ID NO: 810

SEQ ID NO: 8215 - DNA, 6000 bp, Homo sapiens
cataaaactggctagggctcccatcaattcgctggagtacttcagagaccttccttatattgattgccttttttccaccttccctcaatcattgcagctgtgcttcttagtacctttgcaggcgctgaagctgggttgcgtcatttgggtcccagttgggatctgtttctgggaattggccctgagcatatgcctggacattaagggtgccttcaggcacactggcttctagccagcagagagctgcctgggctatcctttgacactccttcgtgttaaacagcgttaggaggagattcctgcaatctggccaggttggattgtgcattaggaagatagactgcattagatctatgaggtcctgggggttctccgtgtaggagggggtatgatgtttccagtttaggagattagtggtagaaaaaggctggtaaataaaagtctgttgccccccttggacctggccctgttcatcataataaataggtccctgtgttttctggaggggcatctgcaaagctctggtgtgggcaaattgaaggtggcctgcttgatcatcttgacttccttcttcacctcctgggacaggggctcagatttgcccctttagggtgtagcctggggcatgataccatctgagttgggctgctcagtggccagccttggtaaaggtgggtagattggtgcatagggagggggggtttctatctcctccggtggttcctccaaaactggtttctcctgtctttcctgtggctttccctttgtctctgtagcttccagcaaagctgatttttttttggtggcttaggctcagcttgagcaaaaagctgccaggcaagtctgcaaccatgcaggtcgagtctgtactatatttaaccatgagtcaatacaagggaactggtctaggtgccctgactgtcctctgaccccagttaccaccttaaatacatagccaattgtttccttatctacatttccttcagctggccatctaacatcaaaagagggccattgtatttcacagagagttctcagcctctgggggtcaacttaattccatagtccccgaataacctttcttaaagttccttaacatacatgctaatcgggtgggttttggtgacttccctcccatttcctccccaatacagcacaacacattcattcttccttttgattcagaccaattaaaccatcccccttgcaggagttttcagacactgcttagctttggagtttgttaatcccctcacaattactaaattgtggggcacctccataagccgtatgtggattgccactagtcctggttggtcccacaattctctcagagcgcacagtctatactaagagacctgtagcccccacatgtcactgtctgcattggttcctcccaaaaccatctctttcacacacagtcacacaccgtcctactcccagttttctctcctaactgacttcgcgagccactcttatgccctagtcacttggggtgtaagtttccctgagtttgcaaaccattcttgcatcctgtgtcagtctactagttacaccttggaaggtgatcaggctccccttccatccttatgggacggttcctgccttgggccccaaaaccttaccgtggtcctgtagtgcactgttcctggaatcatcctgtagccccttagattctgttgtgctgtctgggaggggcattgggttgtgggatagctgatcccttcttcaggtttaagttctcctgagggcacctgaggtcatgggtctctcctggcttggggtctcacacctaaaggcaaagtagacagcaaacctgtcatctccatctcctggctggctcaccaaagtgttgcagaaaacaggaggcaggagaggccagtgggtgaaactagaggattttattaaggtgcacactggctcagtggattcacacacaaaaagctgagccctggacaagtacagggcttgtcttttatatgtgcatggtggccatctagtggcacaaggctcctggtgcaagcaagcaggctcacagaagcagaacaaaggcagttaattaaacagtgacaggttatgctgaccttgcagctgcattgggaggaaaacaggaagttaacaaactaaagctgaccttgcagctgcattgggaggaaaacaggaagttaacaaactaaagcaggccttgcagctggtatacgtcttactcaagctcgtcttgtgaccttgtcatgttgcccagaacagagaaactggagttgttgtgaagtaaccttgagtttcactaaggaaaaattactaaagagacagggaagctgggagaggaggaaaacttgtttttcacatccttgctctttgggagaagaggggctaaggactagttttctctacatcctctacttcagttttatgatggtgttcattattattttatttttaagcaaaattgactcattatagcatttctttttttttttttttttttgcagagtctcagaatgctcttaaactcttagtctctagtgttctgacagccttgacctcctaaaactaagattacaggcatgagccatggtgcctggtcaccatgtacctttttttgtagaactgtgctagtggtgatgaacatcttcaccttttattttggaaattctttattttcatcttctttttaaagggaagtaaatttaaatcaagtattattggttagaaatttttttttattacatcaaaatttgggaagttttcacccttttttatcttcaaataacctctgtattttttttcttcattttcttcttctaagatttcctaaatctagttgatggttatctaataagttgtttgttttgttttgtttttgtttttgtttttgttttttttgagatggagtctcgctctgtttcccaggctggagtgcagtggcacaatctcagctcatggcaaactctgtctcctgggttcatgccattctcttgcctcagcatcctgagtagctgggagtacaggtgcccgccaccacgcccagctatttttttatatttttgtagagactgggtttcaccatgttagccaggatgggcttgatctcctgacctcatgatctgcctgccttggcctcccaaggtatctaataagttttacattccatgttttaactttgttttgcaattatagatttttgtgttatatattttagggtatgccaccacacattcattaattgtgttttgattttttagtatttattataattatgcatgctaatttttaacatcttataatttaaggcagtgtggaagaaagtcaaatatgaatgagctatacgtctttttccaatagaattatctctgtgtttgttttcctgtatacaaaaataaatgttatccttgtattttttttctaacttgtatatttgttgtgtaggtttgttgtgaatggttttctaattctgcgtagatgagtcatcataaaattctctttttttttgagatggactcttgctcttcttgcccaggctggagtgtaatggcgcgatctcagctcactgcaacttctgcctcctgggttgaaatgattctagtgcctcagcctcctatgtagctgagattacaggcatgtgccaacatgcctggctaatatttttgtatttttagtagagacagggtttctccatgttggtcaggctggtcttgaactcccaacctcaggtgatctgcccgcctcagcttcccaatgtactgagattacaggtgtgagccaccatgctcagcccataaaatttttataatttcaacaacctatttatttgtaaatctatatgatttctgtgtgggagaaacacttttggatttgaatataatttaaaactatcataactctgtatctcttttagttattattgtttatttcttgtcaaaaaaaaacaaaatttaccacaaaatatttttaaatatttagtcatatcaattatcttgacattgtcatgcaacatattgctagaatgtttttatcttgcaaagctaaatcttaacacatattaaacaacaagtactaatttttaattttttctttttttcttttttctttttttttttgagctggagtcttactctgctactcaggctggagtgctgtggcatgattcacctcactgcaacttccacctcccgggttcaagcaattctcacgcctcagcctcctgaatagctggaattacaggtgcccatcaccatgcctggctaatttttgcatttttagtaaagatgcagtttcaccatgttggccagcgtggtttcaaactcctgaccttaggtaatctatctgcctcagcctttcaaagtgctgggattacaggtatgggccaccatgcctggccacaattttttctgttttatagcgttttgcaaacaccactctgttttttgtttttaacagtataactacttcatgtatgtcataaaatctgtgtctttttgtgattggctcatttcattttgcataatgccatcaagatttatatttatagttggtagaatatttcctgcttttgaatactgagtatattccagaatatatatatatattttttgagacagtcttgccctgtcacctaggctggagtgcagtggggcgatcttggctcactgcaacctctgcctcctgggttcaagcaattcttttgcctcagcctcccgagtagctgggattacaggcacgtgccaacacgtttggctaatttttgtattttttttttcagtaaggacagggttcaccattgttggtctggttgatctcgaactccttaccttgtgatctgcctgccttggcctcccaaagtgctgggattacaggtgtgaaccaccgtgcctgggaagaatttttatatttcaaattatatctactgaatgatttattgaaagatatttgcattgcttttacctatttgcttacagtaacaatgctgcagcttttccgcgctacctgcagaggggtccatacggcgttgttctggattcccgtcgtaacttaaagggaaactttcacaatgtccggagcccttgatgtcctgcaaatgaaggaggaggatgtccttaagttccttgcagcaggaacccacttaggtggcaccaatcttgacttccagatggaacactacatctataaaaggaaaagtgatggcatctatatcataaatctcaagaggacctgggagaagcttctgctggcagctcgtgctattgttgccattgaaaaccctgctgatgtcagtgttatatcctccaggaatactggccagagggctgtgctgaagtttgctgctgccactggagccactccaattgctggccgcttcactcctggaaccttcactaaccagatccaggcagccttctgggagccacggcttcttgtggttactgaccccagggctgaccaccagcctctcacggaggcatcttatgttaacctacctaccattgcgctgtgtaacacagattctcctctgcgctatgtggacattgccatcccatgcaacaacaagggagctcactcagtgggtttgatgtggtggatgctggctcgggaagttctgcgcatgcgtggcaccatttcccgtgaacacccatgggaggtcatgcctgatctgtacttctacagagatcctgaagagattgaaaaagaagagcaggctgctgctgagaaggcagtgaccaaggaggaatttcagggtgaatggactgctccctctcctgagttcactgctactcagcctgaggttgcagactggtctgaaggtgtacaggtgccctctgtgcctattcagcaattccctactgaagactggagcgctcagcctgccacggaagactggtctgcagctcccactgctcaggccactgaatgggtaggagcaaccactgactggtcttaagctgttcttgcataggctcttaagcagcatggaaaaatggttgatggaaaataaacatcagtttc

SEQ ID NO: 8216 - DNA, 6000 bp, Homo sapiens; identical to SEQ ID NO: 2032

SEQ ID NO: 8217 - DNA, 6000 bp, Homo sapiens
gagaaagagaatagacaaaaaaatctgtaaaaccaaaagttggttttttgaaaagattaacaaaattggcaaacctttggtgagactgatgaagcaccaaagagagaagacgcaaataactaaaatcagaaatgaaagtggcaataccactaattttaaaccacctagcaaagaaaaatcttaaaccagatggcttcatgagttagttcaaccaaacatttaaagaagaattcacacaaataattttcaaacttccaaaaaattgaagagaaggaaacactttctaactcattctgtgcagccagtattaccataataccaaagccaaataaagaaatcactagaaaagaaaattacagactaatatcccatatgaatatagatacaaaaatcctcaaaaaaattagcaaatcaagttcattagcatattaaaaggattactcaaatatccaagtatgatttatgcaggaatgcaagggtggttcaacataagaaaattaatcaatgtaatacatcacattattagaatgaaggtaaaaaacacacacatgatcatctgaattaatacagaaaaggtatttgacaaaattcaacacaccttcatgattaaaaaaaaaaaaacagaaaactaatcatacagggaaaattcctcaatgtgataaagggtatttatgaaaaactcacagctatcatcatactcaatggtgaaagattgaaagctttccccctaagatcaggagtaagacaaagatggccattttcaccatggctattgaacactgtattggaagttccacccagagctatcagacagaaaaaggaaataaaagtcattcagattggaaagaaagcagtaaaactatctctattcacagatgacacgatctatgtatagaaaatccaaaagaattcacaagacagctactacagttaataaacaagttgcagggtaccagatcaacacacaaaaatcagtcatgtttctatgcaccagcactgaacaatccgaagaggaaattgagaaaacaatttcatttacaacagcatctaaaacaattaaatacttaggaataaatctaaccaatgaggtgaaagacttgtacactgaaaatgacaaaagattgctaaaataaggcctggcacggtggctcaagcctgtaatcccagcactttggaaggccgaggcgggcggatcacgaggtcaggagatcgagaccatcctggctaacacgatgaaaccccatctctactaaaactacaaaaaattagccgggcgtggtggtgggcgcctgtagtcccagctactcaggaggctgaggcaggagaatggcgtgaacctgggaggcggagcttgcagtgagctgagattgggccactgcactccagcctgggtgacagagcaagactcagtctcaaaaaaaaaaaaaaaaaaaaaaaaagattgataaaataaattaacaagtatctaaataaatggcataaatggcaagatgtgttcatggatagaaagacttaacattaaaaatgtcaatactacccaaaacaatctacagattcaacacaatgctgatcaaaattccaacgtcttttcccaaagaaatggaagcagatcctcaaattcatatggagttttaaggggcccccaataaccaaaacaatactgaaagagaagaataaagttagaggactcacactttccatctgtgaacttactacagagctatagtaattaaaacatatggtacttgcataaggataggcgtatagatcaatgaaatagaatacagaaccgagaaacaaaccctcacatatatgattaattgatttttgacaaggaagccaagaccacttaatgggaaaaggacagtgttttcaacaaatggtagagggaaaactgaatatccatatgcaaaaaaatgaagttggacccttctaccacatactaaaattaaaatggcccaggccgggtgcagtggctcacacctatgtgagcactttgggaagccaaggcaggtagattacttgaggtcaggagttcgagaccagcctggccaacatggtgaaaccccatctcttctaaaaatacaaaaattaacccagtgtggtggcatgcacctgtaatcccaaatactcgggaggctgaggcatgagaatcggttgaacccggcaggtggaggttgcagtaagcggagatcacaccactgcactccaacctgggcgacaaagtgagactcagtctcaaaaaataaaatgaaataaaataaagtggctcaaagactcaatttaagagttaaaactataaaactcttagaagaaaatattgttgaaaatcttcatcacattggacttggcaacaactgcataaataggataccaaaagtacaaggaagaaaaaatagtaggtaaattgaacttcatcaaattaagaacttttgtgcaccaaaggacactatcaagaaagtgaaaaaacctggagaatggaagaaaatatttgcagatcatatatctaacaagggattaatattcaaaatatatatagaactcctacaacttgacaacaaaaaaacaaacaacccaattcaaaaatgggcaaagtacttgaatagacacttctccaaagaagatatactaatggacaataaattcgtggaaatatgctcaacatcgttagtcattggggaaatgcagattacaaccacaatgagatgccacttcacactaaccaggatggccataatcaagaaaatggataataagttttggtggggatgtggagaaattggaatcctccgtgcattgctggtgggaatgtacaatagtgcagtcattggggaaaacagtttggcagttcctcaaaaggttaaaaatagaactaccaagtcacccagcaattccattcttaggcatatattcaaaagaaatgaaagcagatatttgtacaccagtgttcacagctgcactatttacaatagtcaaaaggtagaaacaacctaggtccatccacaaatgaatggataaataaaacgtagcatatacatacaatggtacactagtccgctgtaaaaagaaattttgatcttactgcatgctacatggcttcgacatactacaacatggatggaccttgaaaacattattctttgtgaaataaactagacacaggacaaatgttagacgattccacttatatgaggcacctagaatgggcaatttggtaagcaaagtagaatagaaattactaggggcacaggtagcagggaatggggagttactgtttaatggtcacagagtttatgttggggatgatgaaacagtttcggggataaagagtggtgattggtacacgacattgtgaatatacttaatgccactgaattttacacttgaagtggttaaagcgataaatattatagtttgcatattttatcataaaaatatttttttaaacgatgaagggacgtgaacgggttgaaattttataaaaagtggccagggaaggtgtcactgcaatggtgtcctacaggaggaggaagatcatgtggacatctgcgggaagggtgttctggcagagggagtagcacgggcgatggctctgaggactgtgagaagtatagttggaaacagcgaggaggccagggtgtccgaagctgagtaagccagagagagtgggaggaggtgagataagagggggaaggtcagtttctgctgagagtgaggaggagccacaggagggctgtgagcaggtggacgtgatctggcttgagttttaacagggccagtagaacaaagcacgcctgggtaccgaaaccagccactggccagttggcaacctgggggagtctaacgcgaggaagcgcccagggttcccccaggatgcgctttccctcgccgccacctggagacagcagagtcacgcccagcgctgcgcaggctgatcgccgcgccgcgcccccgccctcggtcgcaggtggctcgttccgggaattcctaagcggaaaccggtcccaagccccgcgccttcgctcggcccctttaagagccagaatttccggagggctgacccgggggctagggatgcccaggggccgaaccacaagttgggaacgggtgggggaggtggcgaaaacttccgaagtggaattccaacttttcctggccctgattccccttgggcatccctgagggggcagagcttcccttccggggactttagagggttcctcaggtcatctaactgggagacacaggaggcccgaagcgccccccctccacccggtccggaggaaccccagtggaagtggagaagtcaggcgccaccaacaagcctctcccagccaggactttgcttagactcgctcctcccggcagggcgcacctaggcgggtccatcgccagccggggagaggggtttgggcagggagggaacaggtgcgcggcgggacccgccctatctcaacaggtgaatcgctccaagtgggtctcggttgcatggatctcggtgcgcttggtttggccggagcagatgggggccggaagggacctgtggtccgcaggcgccctcccagcgggccagtcacttggttcgggccctgggggacggagcgcacctgggtcagcccacttccggggagggaggcagaggaacccctccccgccgctcacccctaagcccagccctcggctcccacccttgtgtacctgggccgaaccattcaccggagcgcgcagcgggtggagtgtggctcggaggaccgcggcgggtcaagcacctttctcccccatatctgaaagcatgccctttgtccacgtcgtttacgctcattaaaacttccagaatgcaacaggacggacttggagtagggacaaggaacggaagtgggaaggggaggagcgtgcacccctcctggccttggtgcgcgccgcgccccctaaggtactttggaagggacgcgcgggccagacgcgcccagacggccgcgatggcgctgttggccggcgggctctccagagggctgggctcccacccggccgccgcaggccgggacgcggtcgtcttcgtgtggcttctgcttagcacctggtgcacaggtacggggcacggggcctctgacgctgcggaacgccggagggaactgtagagggggatggatggagttggaggcggcgggaagcgggaagcgggggtctcagaggctgggaccttccgatcccctgggtcttgggcgatctgttgcgcgcgggagtgagaggaattccccatttgtgccggggagcgctccccgcgcccttatctggaagatagcaggaagtgaaactccctggacggtgagacccggagcggcagggagaatggaactctttgtggggagggagtggaagaccgcccgatctctgggaaaagaaaagccgggatgggacttgggcgcacccggggatttctaagttttggagtaacggggagagggcacgggagggctggatcagacgcttcctagagggacagagacgaaggaacaatgcctaggcctcgggtgggtgtgggactggggactccccatcccccgcaccccacccacctcccgcgggctccggattatacgtgcgtaagagtctggtgggatggatttacggacttgaaaccgacttctgctggcaggctttcacctggatgggatatttgggtggtgatgaggtctttcccgagacacttttggttcagtcatttgaaatgactttagagtagggtgaggtggtgggaggctgatggagatattgtgggggctttagtccctccatggcaaagcagttcaggcaaacaactccatggttttccctccaaattcaaaaggccccgggtaacctggaatccttcgtagtcggttttgaagtggggccttgggcgctgggggcatcaacatggccatctgggcttgcctgcccaggccacacagaggccccttgttgtgggtgaatggcaaagggaagaggggactggtgtgg

SEQ ID NO: 8218 - DNA, 6000 bp, Homo sapiens; identical to SEQ ID NO: 2036

SEQ ID NO: 8219 - DNA, 6000 bp, Homo sapiens
tgggcccaagtgatcctctcttgcccttgcctcccaaagtgctaggattataggtgtgagccactgtgcctgcccaaccaatagaatattcttattatatatgatgcactctggtatttgccgttctgtgctattctgtttgaatttaaaaattggtcaagacccaccaaactgatttccccaccaaggcagtgacacacattagaatgacctggagaattttaaaagatactgatgcccaggcctcaccctagagattctgaagtggtttcaggactttttcttaattaaaagataaatagagatgaggtctcactatgttgcccaggctggtctcaaactcctggcctcaaacgatttctcccaccttggcctcccaaagtgctgggattaaagacgtgtgccaggctgggcatggtggctcacgcctgtgatcccagcactttggggggctgaggcaggcggatcacaaggtcaggagatgaagaccatcctggcttgatctgtagatcaagtgaaaccccgtctctactaaaaatacaaaaaaaaaaaaaaaaaaaaaattagccaggcgtggtggcaagtgcctgtagttccagctactcaggaggctgaggcaggagaatggcgtgaacgcaggaggcggagcttgcagtgagcctagatcgcgccactgcacttcagcccaggcaatagagcgaggctccatctccaaaaaaaaaaaaaaaaaaaaaagatgtgagccagccagttgcaggatttctggaagctcccaggtaatgctatatacaaccaaagtgagaaccactaacctaacgttgtctccccagcttggggaacagtgaaatgagacttagagccagggtgatccaggaacatagagggacacagaaagatacaaaggcaggttcattttatttatttatttatttatttatttatttatttatttaaattttttgagatggagtgtccctctgttgcccgggctggagtgcagtggtgtgatcttggctcactgcaacctccgcctcctgggttcaagtgattctcctgcctcagcctcccaagtagctgggactacaggcacctaccaccacgcctggctaatttttgtatttttagtagagacggggtttcaccattggccagggcggtctgaactcctgaccttgtgatctgcctgtctcggcctcccaaagtgctgggattacaggcgtgagccaccgtgcctggccgatttatttatttatttatttatttattttgagatggagtttcgctcttgttgcccaggttggagtgcaatagtgcaatgtcagctcaccgtaacttctgcctcctgggtttacaagattctcctgcctcagcctactgagtagctgggattacaggcatgtgccaccacacctggctaattttgtatttttagtggagatgaggtttctccatgttggtcaggctggtctggaactcccgacttcaggtgatctgcccgcctcggcctcccaaagtgctgggattacaggcatgagccaccgcgcccggcctatttatttttttgagacagtctcactctgttgcctaggctggagtgcagtggcacaatcttggctcactgcaatctccacctctcaggctcaagcgatgttcccacctcagccccccaggtagctgggactactggtgcatgccactacacctggctaatgtttgtatgtttttgtagagacggggtttcgtggtgttgcctaagctggtctcaaactcctgggctcaagcattcctcctgccttggcttcccacagtgctgggattacaggcgtgagccactgcgtccatccagattcatgatatttagatgttgaaatgtggctttacagactcagacagctctctgaggcaaacaaagagggagatgcaggtaccctcagcacaagccccaaattacctgcaggggagaggcggaaaatcagacaatgtagaaaccgggagaagaaaggtatggacagaccgatgcagataggaggggaaggaaatacctggaaatgagatagagaccggctggacagaccccggggaccctgcaggtcaccacacccttctctttcagctcacctgttctccaggaccagccctgctggggcccaggcccaggctctgagaggccgtgtcctaacctgccctggccccggagaagctacgttgccacctgtcccccttccctggcctggtggggcctggctttggggcaagactgagccacgggggaagggggaatcccgtacctgctgctgcttcctctgtcttggctaacgtctgtccccctgaacccctaaccataccccaagagctcccaaagcctgagaccagggtcatttgtccccaactccccatctggccctgctgttgctagtacctgttatttattacctggaggcctgtccagcacccaccctacccccataaagcattgtttacacctgtgtcttggcctccattattgtgagatggcagggagatggaagaggtccctgatggaagaatcatgtgtcatggtgtttgggggccttgtttctgtttttttgttgttgttgttgagatggagtttccttcttgttgcccaggctggagtgcagtggcgtgatcttggctcaccacaacctccacctcccgggttcaagctattctcctgcctcagcctcccgagtagctgggattacaggcatgtgccaccacacttggctaattttgtatttttagtagagatggagtttctccatgttggtcaaggttggtctcgaactcccaacctcaggtgattcgcccgcgctggcctcccaaagtgctggaattacaggtgtgagccactgggcctggccttgggggccttgtttcctgattggacgtggtgtggggtataccaagcatgatgactcaggtgcctgttgcggagggagggaatttgttactgtgtggacagtttgtgacaatctgtgttctaagctcacgtgtgtaaacacgctgatgtccctgtgtttgtgacatgtgtacatgtttccagtacctgcatatgggatgatgtctataggatataatgtgtgctggttgtgtgtgatgctgacagccgtaactgctctgtggccttggtcattgtattggtgaggctggtattgtttgggacatcaaggccaggggatgggaatttggacctataggtgggcctccggtgtgtgcatgtctgatgcctgagagtcagaggcagtgactcactactgcgtgtgtgcctgtgcatgtgtaccccgaggtctgtgtgtgttttggtgtgaatttggctccttttaaacacccatgtgtggccaggcgtggtggctcatgcctgtaatcccagcacttcgggaggccaaggcagatggatcacttgagcccaggagttggagactatagcctgggcaacacagagagaccctatctacaaaaataaaaaacagaaaaagttagccaggtgtcgtggtacacacctgaagtcccagctattccggaggctgaggtgtgaggatcactttagttgggaggttgggcctgcagtgaactatgatcatgccacagcacttcagcctgggcaaaagggtaagaccccatctcaaaaacaaaactaaactagaaacacccttgtgtggccatgaaccctgtgtgtgccctgaggactgcgggcttttgtgcaatcctcacgcatgtgtggataccagtatgcatgcccttgtgctcacgcgaaccgccctacgccctcaggtggcctgcaggggactggtgcagccccgaggacactcccagttgctcgtcgccctcccatctccacgtcggccttcaccgacccggcgggagccttgagtcccagctctccagagcaatggtggagcgggcagggcattcaaaatgaccttatctccttagtctcctaaagtgttcccagctggccatgcaaatgtcttctctgtgtagcgttccgtggatttttttttgtttcattttttaattttgtgtaaagataaggtctcactccgttgcccagactttccctggttctttattctgattcccacaatcgtcccgagggggcaggccggagcgggtcttgaaaatacacatttgcacatcccttctagtccgcgttcccttttctcaagggcaacccgcacttttttgcctccgttataaaagatacttatgtaaattactgacgtgcgaatttacatacatttctcaactaactgcgtagccatttctccgtctctcacctccgttcctggacggcgagaaggaggaggagctgaccatgtaaatgaagtcacgcgcaccgcgctgccgaactcggtgccccgcgctgggcggggggcgggtaggcctgtccatgtaaatcacatcatttgcgtgccccgccccgccgacgccacttgattccaacatgcaagaaacgccccctcccagacccggcccctcacactgcgttccccctcccgcgcaaagggggcggggcggaggatgcaaatgaacctcgtgtaggccacggaccgctgtttcctttctccttggtaggggggttgtcccgaacttcctcgccccgctccgccccgccccgcgcggctcgggcctgcgcaggcgccgtcccctccgcggggcgcggtcacgtgcccaccgggcgaggcggggcggggcgtcgcgcgcggtgggggcggggtatggcgcgctgtgcggcgcagggcggctggcacaaacggcggcgccggggccggaggaaaaagctcggtgaggaggtcgcggggcgagaagggagcgggaggagactaagccggagccggggcgccggcgcgaaccgggcggggtgtgggggcgcgcgccggggcctgccggggcgaccccgggaagggggatgtgggtgcggcgcgggggaggggacgcgcgccggttacgttgggtgccggccgttgtgggggttggggtgggggcggggagcgcgcgccgggcggaggccgagtggagggggaggggagggggtccgagcggcccttaggccctgcccctgtcgcctactgcgctcagaaggggcctcagggcctgccccgggttgggggcgttggggtgccctggatgggggcacctttatctctcgtcctgtctccgggtgcgtgcaccctcctccgtcctttcctctgtcgccgcggaccctctccccgagggcccctcccgtcggtcagtctcgggacctcccttccgtctgggcgtgtgtccgcccccggccggcttcctcccgtcgggctcgggtcgaccccaccgtcccgctccgccccgggtcctccctcccagcttccctccggtctatttttctgtctctgggcccctcgttctctttgtttttggactccccagtttcctctgtcttttgacccccccgcccccaccctgactctccctggaacccccacgtttctcgttgtctttctggaacgccgaggcaggtccctcctattttccaaaccccctcctttcccactcctccacaccacccttttctactccagccctccttcttctgtctttggttaccgcgtcccacaacctgcaccacagtcctctgtcttagggtcatctacccagcccctggcctccagcctctccctatcactgcctcttatctgtcagcggactcccgcacctccagattctcagggtcctctccccgacttggcctcaggttttggggggcctctatagtcaagtctgtcctggtcgtcttccccactcctgcccataccatcccggctttcccctgcctgcctgtctctagtttctctcacatccctttttttttttcctttctctagccaccctgaagggtcccttcccaagcccttagggaccgcagaggacttggggaccagcaagcaacccccagggcacgagaagagctcttgctgtctgccctgcctcaccctgccccac

SEQ ID NO: 8220 - DNA, 6000 bp, Homo sapiens
gccaccctggactctgcggggtgtccgactaggcttcggccgtcctccccggactgtgcgctcggcctcactccgccgctctccttgcttctctgcgtctcggggtctctgacactcggggtttctgcgccccgcccccgccccgcagacgtgtcccgggcggttgagctcctcgagcggctccagcgcagcggggagctgccgccgcagaagctgcaggccctccagcgagttctgcagagccgcttctgctccgctatccgagaggtgaggggcgcgcggcgcaggggcgcgagctggtggccgtcgtcctcctcctcctcctcctgcttgtcccgagcccggagactacgcctcccggcagctcccgaggcggcccgccttggggtgccaacgcttcagctcaggggttcttcgggagttgtagttttctcggccttctgttgcgggggcggggcggatccttgcgtggtagcgggagagggtctagaggcctgaactcctgcgtctagggctggaggagctggcgactccctgatgccgctgcctcctcacccaggtgtatgagcagctttatgacacgctggacatcaccggcagcgccgagatccgagcccatgccacagccaaggtgggccccgcaccccattgctcctggtgtctatttaactgcctagtcgaactcaatatctccttcatgccagtcatttctgtttcctccctcatgatttttgctaaatctatgtgccaccttactattagtaaataatcgcacatttttaacttaaatgtcatactaaggcatctttagcaactgcaaatggaaacagtatggcatggttggtagaagataaccttcaacatctgtacagtgcaaaccaggaaactcatggcgctctgacctctcactgcacaatagttagatgctgctacctcttgctgctgtccggaggctcagatctccctccaggcctggctttcctctgtttaaaagtaagattgaggccaggcacggtggctcacgcctgtaatcccaacactttgggaggccgaggcaggtggatcagttgaggtcaggagttcgagaccagcctggccaacatggtgaaaccccgtctccacagaaatacaaaaaaaaaaaaaaagaaagaaaaagccgagcgtggtggcgagtgcctgtaatcccagctggattacaactccggaggctgagacaggagaatcgcttgaacccaggaggccgaggttgcagtgagccgagatcatgccattgcactccagcctgggcaacagagtgagacttcatctcaaaaaaaaaaaaaaagtaagattggcaagtatggggtattcaagacacacaccaaatggacactttctcttgcaagtgaacagaaagagacgcacagtcattacagggggatcgtgcattgtgccatgacaagtgtcccatgcttggggatagtaacccaggctaaatcgctgtcctcggtccacatcccccaccccagctttcatgcctacctggaaggggccctcatcttcagtcgctttctctctcccaggccacagtggctgccttcacagccagcgagggccacgcacatcccagggtagtggagctacccaagacggatgagggcctaggcttcaacatcatgggtggcaaagagcaaaactcgcccatctacatctcccgggtcatcccagggggtgtggctgaccgccatggaggcctcaagcgtggggatcaactgttgtcggtgaacggtgtggtgagtggagggctgaggcaggactgggggacacagtctgtctaacgtagcatagcccctgcttttgacattcactcaacacacactgagtgttgtctgtatggctagccctgtgctgggcaatgttacagactctgagagatgttggcctcagctccctacactcaaccttctctctctggggagggcagtaggccccggctgaaatagtcctaatccagagacataataatgaggaagtgcaaagtattgtgacagcccagatgtggcaccaggccagcatagatacaggaaggttttgcagagtaaggaacatttgggttgggtgttaaaggatgagtaggagttctccaggcaaacaaggtacagggtgttcctgctgagggtactgtagataaggatactgacttggcatacctctgagctgaaaagaaagggcttagttctgatggaggtctggggcatgcaggtaattaaaatcactgtggttaggctgggtgcggtggctcacacctgtaatcccagcactttgggaggctgaggcacgtggatcacttgaggtcaggagttcaagaccagcctggccaacatggtgaaatcccatctctactaaaaatacaaaaattagccaggtgtggtggcaggcacctgtaatcccagctacttgggagggtgaggcaggagaatcgcttgaacctgggaggcagaggttgcagtgagctgagatagcaccactgcactccagcgtgggtgacagagtgagactccctctcaaaaaaaaaaaaaaaaaacaaaactcactgtggttagagttgagggaagcataactggagagatggctggggtcagccatacaggacctgagtgccagcctgagaagctgggactttgtcccatgggtgctggggagctatgggaggggtgagccagggataaactcagcttgcaggtgcagaaggaccactctgggactctatgggagatgaactgaggggagagattagaagccaggccagggaggaggctggggtaagagtccagagaaaagaggacaaggcctgagctggcccagggctgtggggacaaaaaagagggagtcaaggcgggcggacattagtgggctgtgggcagggaggccacaaagatgggtctggacgtttggccagggactgagggaacacggggctgtccctgacatgggaatcctgggaggttttggaggaggacactgaaccaggagttaatgactcccacgaggaggacatgaggcattgacatctcagggctggcaccaggctcactagcagtgggtcccatctcccagtgggggctggacgagggcagcgggccccaggctcagctgtctgtgttgggccctgcagagcgttgagggtgagcagcatgagaaggcggtggagctgctgaaggcggcccagggctcggtgaagctggttgtccgttacacaccgcgagtgctggaggagatggaggcccggttcgagaagatgcgctctgcccgccggcgccaacagcatcagagctactcgtgagcccctgggtcaccacacccctggggcctccacgggctccctttaaccccaggctcccaaaccaggccagtgcttcctggatcttccagccctggcccctcctctgggatcctgacccttgacccttggcccaggctctcaccccaggctagtttggccaaatcccctggggagcccttagcttccttccatcccaagatacggaacctactgtggctgggatccctcagcccacttacctgggcccttgcctctgcaaccccagtcctgcccctcttgtctacccggagcctccctgatcccgggtcccttgtccaccccccttgcaggtccttggagtctcgaggttgaaaccacagatctggacgttcacgtgcactctcttcctgtacagtatttattgttcctggcactttatttaaagatatttgaccctcactgagtgtctgtgtgtctgtcctgcatccctgggttggtgtcttgagatgtggagggaatgcgaggagctgaggtcaggccaagccgttgagaagccttttccagagtctgagaacagaggttaagacctctccctaggtctgaaggcggagacaggccggcttccaagagactagtccgagggcggagggcggaggcagggacccagtctgggtctgagtgctggggcagaactgaggacaacgctgcctacccttaagagcgtctgagggcgaaggccaagtcccttcctccagagtcctgaaacgcagccggagccagtgggcggcctctgtgtgggcggggcggagcgaaccattagcctcgtccgccgggggaaccctgcaggccgcactactgtctgcgtgggagtcgcgggtgggggtgccgcgtgcagttcccgaggcgggcgcaggggtgcagaatgaggtgccctcgcccaccgggcgctcactccaccttccaaacacagcgcgtctttccggaagcagcccccgccttgaaatccaacctttagcctcatcccgctgcccgcccagccctcgtgtcccgtgcggcgcgagggctagtgcgcgccactgccgggagccggggtcgcgactcgcgttccacgccgcgcgctactcgctccaggtgacatcatccccctgccgggctccgcctcccgccccagccgcctcacgccgcgtgcctattggtcgacgcgccttatgccccgcctctcgctctccgcccgcgcgacccctcccggccggtgtggaggcggggtctagtcgccggccggcgccgacgctctctcccattggccgctcttcgccgtctgtcagtctcctgttaaaggggccacgaccgcccgggagccgtggggggggagggggagggaggaggaatttttttggggggaaggtgggatttggggggcgctggtgggcacccctggatctggcggctgcggcctcgcggggggaggctgatcggtgacaggggcagggggctattttgggggtagaaggcagtgagagcgtgagggggaggggggtccccagcgcccaagccggagccagagacgcggagcccgcgcgagcgtcggagacagggctccagggctccgaagcgacagagccgggccccggccgctgccaggggccccgcccggcccccccactccaccccacgtccctcctgcagcccagctccgcccgcagccgccgcggaccaggcaggtaagagcccggcccggccctcctggcagcgcccaccctggggaccccttggcgagcctcccccgcctccccgagatcccggattcccttcctcatcccaggggacccccgagcccagatttcacaccccaaccccggggactcaggcgtgcccctcccggcgcccagagtccccgaccgaaccctagaatcccgggcgcaccgccgcctcgcgcctcctccagggcccaggagcttggatttcccggtccggccccgggacccctcctagagcctagatcccccttcctgaccctgtcctgggagctccagacacccgccgcggcggtgccagactccccagacgcgtccgcatcgtccccgcttcgcgcactccgtctcccgtcgccagcctcgggcttgcacagccggctgcgtcccacggtccaggcaggctcggcggccgccctggacacaggcccgctctggagctgtccatggtcagcgcgctcggcagcctcgcctccccccacctcctgccgccgccaccagggagggggcgcaggcggcgcggggatccccccgccgcgcctttgacccgggaatacccgggccctccccgaccagggcgccccagcctctgggttctgccggccaggctcgtggccccgtcctcggcaccccaggttcctgggactccagctgctccctgaggatccagggcttctgaattttcctattctggtcgccgtggggaccatggcacccggggatgcagctcccaccccgttcgggaagcctgtccgtgtctacacctctgctggccccaggtggtagccctcaccccgtcagcacctaggaatcctgttccccagcgtttgctctgcttagaaccccgctgtgccctgcagacacacagacttagcctcctggcacccagcatctgctccccgagggactcaggcgccatgactcctttcctttgggggacccggaatg

SEQ ID NO: 8221 - DNA, 6000 bp, Homo sapiens
gcgagactccatctcaaaaaacaaaacaaaacaaaaccctctgctctttgaaaaacatttttaatataatgagaaaagctgcagcctgggagaaactatttgcaagagacctatctcatgaaggactgctatccaagatttacaaagggctcttaaaactcagttaacaggaaaacaatctgattaaaaaataggaaaaggggccaggcatggtggcttacacctgtaatcccagcactttgggaggccaagacgggcaggaatttgagaccagcctggccaatatggtgaaaccctgtactaaaaatacaaaaattagccagcatgatggcacgtgcctgtagtcccagctactcgggaggctgaggcagaagaattgcttgaacccgggaggcggaggttggagtgagccgagatggtgccactgcactccaacctgggtgacagagtgagactcggtctcaaaaaaaaaaaaaaaaaaaaaaaaaaaaaaaaaaaaaaggattgtttctgggtgtgtctgtgagggtgttgccagggaggctgacacttgagtgagtggacggggagagggagacccactctcagtgtgggtgggcaccatccagtcagcgcagaaggtgggaggggctggcttgctgagtcttctggctttcatctttctcctgtgctggatacttcctgtctttggagattagactccaggttctttggcctttggactcttgaacttccaccagtggtttgtcggggactcttaggccttccgccacagactgaaggctgcgccgttggcttccctacttttgaggcttttggactttgagacgtgactggcttcttccttcctcagcttgcagatggactatagtgggactttgcctgatgatcctgtcagccagttctccctaatatactccctttcaatatatacatatatcctgttagttctggccctctggagaaccctaatacagatggcaaataaacacaggaaaagatgttcaccgtatgtcattagggaaccgtccattaaaacaagacaccactggccgggcgcgggggctcacacctgtaatcccagcactttggaaggccaaggcaggtggatcacgaggtcaagagatcgagatcatcctggccaacatggtgaaaccccgtttctactaaaaatacaaaaattagctgggcgtggtggcgcacgcctgtagtcccagctactcgggaggctgaggcaggagaatcgcttgaacccaggaggcggaggttgcagtgagccgagaccatgccactgcactctagcctggaagacagagtgagactctgtctcaaaaaaacaaaaaaaaaacaagacaccactacatacctattagaatgccaaatccaaaatgctggcaccaccaaatgctggcagaaatgtggagcaacagaaacccttcttcattggtgctggcaatgcagaatggtacagctactttggaggacagtgtggtggtctctcataatcctaaacatactcttagaatatgaaccagcaacactgctccccagtatttacacagatgggttgaaaacttctgcccacaaagaaatctgcacgtgcacgtttatggcagctttctttatcactgccaaaaacttggaaggaaccaagatatccttcaataaatgtcttactacattctggttgttgtaacaaaataccatacactgcgtagctgaggcaggaggatcacttgagcctgggaggttgaagctgctgtgggctgagacagagatcacatcattgcactccagcctgggtgacagaatgagaaaccctgtctcaaaaaaaaaaaaaaagtacagttttggtttttgctgtgactgggctcctggagtgagagctctggatcccagctgcaagatgaggaatctggagccgagagaagggaaacgagttttccaagtcatacggctggttaagtaaaagagccgggattatgacttaggtttcctgccccccaagattattattttttgaaacagagtttcgctctgtctcccaggctggagtgcaatggcatgatctgggctcactgcaacctccacccccagggttctagcgattctcctgcctcagcctcatgagtaactgggattacaggcatgcgccaccatgcccggctaatttttctgtatttttagtagagacggggtttcgccatgttggccaggctggtcttgaactcctgacctcaggtgatccacacgcctcggcctcccaaagtgctaggatcacacgcatgagccaccgcgcctggcctacccaagattattaaaataagttttcagaagcaaccccctactggccaggcgcagtggctcatgcctgtaatcccggcactttgggaggcagaggcgggcgggtcacctgaggtccggaattccagatactgtgaaaccccgtcttcactaaaaatacaaaaattagctgggtgtggtggtgcacgcctgtaaagagaattgcttgaacctgggaggcaaaggttgcagtgagctgagatcgtgctactgcactccagcctgggcgacagagccgtctcaaaaaataataataataatagattttttaagaaaagcaatcccctagtgacttcttagagcacatcatcagacagttggggtaaaattctgaagtggattaagggaggggtgctggtttgcctggatggctacatgaacatagccctggaaccaaccaaatatgtaactggacaacagaaaaataagtacagggtgcattaatcagaggcaacaatgttttgtacttaagtacacagaagacacgatgtgaagacaccaagagaacagtacttttcatggttagacacatttcttaggtattttttctactttgggattcttttgtgatataatttgtcctgtttacataatttttttccctgacatgtaagataaatgtatctaattgtgggcttacttgtaaagagttttcacatttaagttccagtcatttcattttatcgctgtgtctgtgtacagaatgctaaagaataagacataaaaaataaaagtacagttataaacacctcttttaaaaggcagagactgttcgcttgggcaaaaaaaagcaagatccaactacatgctatctacaagaaacccaccctaaatacaacaggtaaaaggaagctaaatggaacgtgggtcctggcttgtaccctggcatgtaaagaaaacattggaggaaaaggtggtgaaatcccagtaaagtctgggttttagttacagtaatgcatcatgtcagtatctacaacaaaccacttttgttggtgcttgtgatgacagcatcagaagaaactgagcataaaacatggtggactgcgtatgatctttgcaacttttcttttttttttttttgagacaagaatttcactcttgttgcccaggctggagtgcaatggtgtaacctcggctcactgcaaccttggcctcctgggttcaagcgattctcctgcctcagcctcccgagtagccgggattacaggtgcacgcgccaccacgcccagctaatttctgtatttttagtagagacgggacttcaccatgttggccaggctgatcttgaactcctgaccccaggtgatccacccatctcggcctcccaaagtgttgggattacaggcgtgagccagcgcgcccggtctttgcaacgttttgaataaatccaaaattattccagaacaaaaagcttagtaccaaaaagaaaacaaaaacaaaaacaaaacaaacccccccccccccacagagtaaaataacggaaaaagatctactatgctagcactaacaaaataatacgtagttatgaaaatggtatgtatttttcaagctagacgttcataatggtagaacatgaggaggaaaactgcctcttaaatcccaccacttactgtgacgcagtgaccggtccctgcagcggactggatagttgtatcagagtcctggacggaaacagatggcactcaaaaggtggcgcgcagttcagagaaatgcctatgtacggatttggtccaatgcctcagcctgacctcagggaccttcgggggtctgctccgcgcccacccttacacatctgtgaccccacacacttccaccccagcgccactgccaacagctacacccatccccctccaaccgcgtcagcttccagcctcggtccatctgaactcgccgtgccccctcccctgcgcccttccagattcatttgctagggaagcccgctcttccgggtggagctgttcctcatcccctttctttatcattctctccccagggcttccacatcaccgtgctgtggacaatcccggaactcctgtcacgccagtttacatttaggaacagtaatggctcccactgactcagtcaaaacaaggctgcggccgggcacggtggctcacgcccgtaatcccagcactttgggaagccgagacggagggatcacgaggtcaggagttcgagaacagcctggccgacatggtgaaaccccgtctttactaaaaacacaaaaattagccgggcatagtggcgcgcgcctgtaatcccagctactccggaggctgaggcagaattgtttgaacccaggaggcggaggttgcagtgagcagagatcacgccactgtactctatcgtgggcgacgacagagcaagagcaagactccgtctccgagaacaacaacaacagcaacaagaaaacaacaataaaaaaaataaggctgcgtgggaggcagaaagagctaatgcggccacgcttgtcccctcggggccaccgtccccacccagacttccggtctgccttaaaatgttcatgcgtaagtgcgtgggcaggaaggcgggctcaagcgcagctcgtggcgttcattggctgtgcagggccgagggaggcggtgcaaggccgccgcgtgacgtcaggacgccgcggtcaggacgtcgaagccaaagaagaccagagccagccgggtggcacagcggtgtcgtggccgtgttgctgatcgcctgggtggttgttggcgtgtccctgcagcgaaggatcctggttggtaaggggagcggcgggcgagcaggcgggcggggatagcatctccttttggtcttgcgccccgcgagccccgaggccttctcggccgtcgcagcagcagacgccgcgcgcgagcgtcgacagggtgtggcggcgcaggggcagccactgcgcctgcgcaccgggcctggggccgcgcgttcgggcactagcgcgcgtgcgccgtcgtcttctactttccgttcctctcccttggagttctcggggccccggggcgcccctcactcgccgttgaccgggtgttgccccgggcgacgggcggctcctgcgcgtctttctggggcgtggtgcgcaggcgcggcctgggcagtggctccgtggctagtcgtggggatccgagcggcctcctccacccggcgtcctcctttgccttcgcccagcctgcgggacggccaggtgctcccgggacctcaggcctcgcgtctgatgcctgtctctgttcttgagacccgtctgggagtcctctgtccagcccccaactcctgaccttacctctaatctcccttctgccctggggctcctcttcctgtgtccccgccacgatccctcgtctccacccacgccctgtgtcctgtttaagttaagcctttgcgtttctagggcttttccccagctccagactcccgttcctatcccgtcaactcgtgagaattccggttctcctgcgggattaattatcctacttatcagttactctctctcgggagtttaggctcctgaatccttgctccggagacactccacttttcttccaattctctctgtaccccactcttaattcgttgaacatgttttgggtcttctttggcattcccaaagctttatgtccagacacccaaccaaggtgatcccttttctctccc

SEQ ID NO: 8222 - DNA, 6000 bp, Homo sapiens
tgctggcacctggcagaccacatcctgtgcggttttcagttttgctctgttcctgaccctggtatagcagaagctttttcacatctatgacacccgctatgtcttggtaaaccctggaagggaaaggaggacaaggttaaaatactgttccgaggacctggtctctccacagcgcaggctggaggtggcagcccgtggaaagccaagttcatccaccatcggagcccaggccaggctgccaaggctaatattcaggacaaagccaggcacaggtcgggaatcctatgaagatgatcatcgtcctgaggtcttccttccagggttgcatccgggccagaagatggaaagagaaatgggtgagtccctgctaccacaccaccctcaggttgcttttttggctgaacaagaagggtcctcccaggcaggaagggtggggcacagaaacgtgagccaatgtggatgacttggggagggctttgcagttgaatctcctgaaaacagcaagaagtacagacctccgggcattctagactcagattctgtagacgcttccctttggccgagccaagccagggttgctcaggaactggggtccttgagattggattagattggacggaacgacacaggattgcaacgtgcagaactgtgaggaccggggttttgcttgagttccccagtctgtccacgaggtccaagcttgagatcattacggcgaccacatctcaggaggaagataggtcagcaatgcagtgatggtgctggaatagttttgaaatatttgaactattctaatgcaaactcttcttttaatgacatttcacgttgcatcttatgtcattttatttatgtagatgttgtctttccacttgacatttaattggtgtttaatttaagttgcaaatattgtgtatgtatctgagtctagtgtgagaatcattactctatgcctgtgcatcccacatcaagtaacttttttttcttttttttttttaagatggagtctcgctctgttgtccaggctggagtgcagtggcatgatctcggctcactgcaagctccgtctcctgggttcaagccattctcctgcctcagcctcctgagtagctgagattataggtgcccgccaccaagcccgggtaatttttgtatttttagtagatagggggtttcatcatgttggccaggctggtcttgaactcctgacctcgtgatccgcccaccttggcctcccgaagtgctgggattacaggtgtgagccactgagccccgtccaagtaatgtttttgaatgagtaagctgtgctgtgctgaatctgtagcatgccttggacatagaccttctccagctgggattgaagtcttagaggaatgcaaaggtggaggggccctttgagaatatggaacgacgacagctctgtatcaccccttttatggaaaaacccagaataactgcccatgtgttctgtgacctttgatgttgattctgtcagcaggaggaatcatctgagtagtgaggaaaatcttggatatgttggtggtttcacagctgtcagaattcactgaatggcacagattcaaagaaggcagtttgtctgccaaggattccttgataaagctgattaaaaatcgctaatgaagacctaaagtgaaaagaggcagggaggagaatctaatacatagaaaccattctacacatgaaagaagagtcagaagcaggaaggtcattctcaggagccgctgtgttttggcctcgtgttcaatgctaagtttcaaaacaaatgtagtattccttgcaaccacgagaagttggtgagtgatttgaaatcattcttatgatgaggcggaagcttttggaatctgttctgtacccctgcactttatccttgtcctcatgatttacaaaaccatgaaaataaagctcagttaattcatcatcatcaaggtgagcaccaggttcagtattcagcttgaggctggggactccatctttctttaacttttgactgaatagccttcacttagtttttatatctcttaggcattaaaaaaattaaaaaaatatatatatatattttgagacggagtctagctctgtcgcccaggctggagtgcagtggcatgatctcggctcactgcaacctccgcctcccgggttcccaccattctctcgcctcagcctcccgagtagctgggactacaggcgcccgccaccacgcccggctaaatttttttgtatttttagtagggacggggtttcaccgtgttagccaggatggtctcgatctccttgcctcgtgatccgcccacctcagcctcccaaagtgctgggattacaggcgtgaaccacctcgcctggcctaaaaaagtctttaatatattatattaagcagttttaattggtttattgttattttttggatggattgctgtcttatggacttagtctaacatattcacagaaagttggattagattggaagaacatacctgggactgcattgcgcagaactctttgagggccagggtttagcttgagttcccctgtccgtccatgagatcccagcttgagatcattacagccaccatgtctcgggaggaggactagtctgcaatgcagtgattatgatggaatgtttcaatgtttttgaaatgtttggactattctgatgcaaaaaactttctttttatttttgagacagagtctcactgtgtcgcctagggtggttttttttttcttttttgaaaccctctgttattaagagataaatatgattcccaggaacattgctctgttctgctttattattattggtcatatctggtcatacgccctgaaaaccctgaaaatgggattgctaaaatcgccttaatctaaactccatttccctcccacttgctccctgggcttggagcacaaccactcaaacagaactggcttttggtcagtaaggaagaagtgagcaacggctgcggtgtagaccctcgtcaatgcctgcgacggttacacctggagacaagctccccagtgtcctcaggagcagcggagatgagaatccatgatagggtgggctctgtccccctcagctccgtgatgccgaaatgcactgctggtcctggtcctgctcctcattccacacccggctgagtgcccatctgaccccagacctcaacgcgaggttctaagcactgtctcctgacccttcaaccccttcgggattttgcatgtgctgttggaccacctcactcccacctggagccaaatgacactgtaggaggaggggaagagaacttatgctagtagagtgtgtgtgtgtgtgtgtgtgtgtgtgtgaatgtgtgtgtgtattatacataatatatataattacaacattgttaatggggccgggcgcggtggctcacacctgtaatcacagcactttgggaggctgagatgggcagatcacatgaggtcaggagttcaagaccagcctggccaacatggtgaaaccccgtctctactaaaatacaaaaattagccgggcatggtggcgtgcgcctgtagtcccggctactcagcaggctgaggcaagagaattgcttgagcctgggaggcggaggttgcagtgagccaagattgcaccactgcactccagcctgggcaacagagtacgactccatctccacacacacatacacacacacacacacacacacaaattgttaattgtatatgtataattataatagtttatatatattaacaattatatataaacttgcatatatatagtatttgctgtattattatatataaacaattatatatgtaatgactgtataaaatagataaacaattttaactaataatattatattaattatattattattagatgtaataattataattatttatatataatatttattattatgtatcattgttagaacacttaacgtgagctctgtcctcttaacaaatttcaagtgaacaagacgttattgctgacgatgggtcgtatgtggtgcagcagatctctaggcctgtttgttaataactccccatttccccctcctcccagcccccgtaaccaccattccctgctgtgatgttgtgactctggtgactttgcagatctcctgtaagtgacatcatgcagtacttggtctctgcctctgcgtcgcttggcgtgatgtcctcaggtttcgtccgtgttgtcgcccatggcagaattttcttccttgtttaaggctgaatagtattcccctgtgtgtgcaccacattttctatatcaattcttctatcaatggacatttagatgattttcacgtcttagctattgcgaatagtgctgcagtgatcaggggagttcagacggctctttgcatactgaatttgtttcttttaaatatagacccagaagtggcattgttggaccatacggtagctctatgtttagttttttgaggaacctccccactgttctctatagtgagtgcacaatttttcagcctcccaaagtgctgggatcacaggcgtgagccaccgcgcccggcgcactgtaggatcttttttaatgcattatataccttgctgagattttagcagagatcacaatattaaaaacttggggaaggatttctatgactctcattttaaatacaaggacatgtcgacttctagttttgtaacatcttgcccaagagcggtggtcgttaatgtgtggagttgggatgacatccaagtcagttggttgcacgacctttattctgtcttgtcccatagatttagaaagaggctgacacatcgggtaactagtttaaggtcatctgatcatgcgggtaagcgacatttttcagaaaccaaggccctccctctcatctcactagtgggaagggtggaaagaacagaacagaaagctctccctcttgtgtgaggcagttgctgtggaaaccccacgggcaggaggcccccggccagcacatcctgtctgcttgtgtctgctgcagagttctgggaccggggccatgtctccacacctcactgctctcctgggcctaggtgagtcctggagggagcgggaaggactggaaagggggtcgggaggtctggaaagttccctgctcaagcctgactctagtccagaagattctggggaggaaagtgtcctcctccccccaagactgccctactgctctccctggggcctaagtctgatcagagacaaccttgtcctaaaaacaggggcccgggtgtggggatgaggtcagctttaagaagggctggggggccaggcgcggtgctcacacctgtaatcctagcactttgggaggctgaggcaggtggatcacctgaggtcaggagtttgagaccagcctggccaacgtggtgaaactccatctctactaatacaaaaattagccgggcatggtggcgggcacctgtaatcccagctactcgggaggctgaggcaggagaattgcttgaacccgggaggtggaggttgcagtgagctaagatcgcgccactgcactctagcgtgggcgacaagaacaaaactccgtctccaacaacaccaaaaagaagggctgggggagcaggagcctttttggaagaggagactttgggatttatcttgaaaccattttgcagcaagaaggattacatggagacagtgatgtcgaggagggttggcttggtcgttatgaaatgctgaatgccccccagctccgtcaagcccccttttgacagcagccctgtaaggagactgggcagtgggcatttttctcactggggcttctcttccagtgctctgcctggcccagaccatccacacgcaggagggtaagtcatgccttcgtcccgtcttcccagtcccctctgtcaccccaaaggcagtgctgggtgggagtgatgttgattcttagagggcctggagagatccctttaaatataccctagattgcaaactattccaaatgtaaaatgcataaccctcacccctttctctccttc

SEQ ID NO: 8223 - DNA, 6000 bp, Homo sapiens
aatcgccatacttccaaaaacaaattgcagagtcaatgctatccatttcaaaatgcaatgtcatttttcacgaaattataaaaatttattctaaaatgtatttggcaccaaaaaaagagcctgaatacacataggaatcctaagcacaaagaacaaagcccaggcatcacattacccaacttcaaactatactacaatgctatagtaacccaaacagcatgatactactacaaaaacagacacatagaccaatgagacagaatagagaacccagaaatgaggctacatacctacaatcatctttgaaaaaattgacaaaaacaagcaatgtggaaagtaccctttcttcaataaatagttctgggataactgactactcatatgcaaaataatagaactggacccctaactctcactatatacaaaaattaacccaagatagtttaaagatttaaatgtaaaacctcaaaatattaaaattctagaagaaaacctaggaaatatccttctcaagatagactttggcaaagaatttatggctaactccccaaaaccaattgtgacaaagacagaaattgggacctaactcaactgaagagcttctgcacagcaaacgaaagtatcaacagagtaaacagataacctacagactgggagaaaatatttgcaaactatgcatctgacaaagttctaatatccagaatctataaggaatgtaaacaaatcaacaagcagaaaaccaaaaaacctcaattaagtatgacatgaacagacacttctcaaaagaagatgtacacatggccaaaaaacatatgaacaaatgcttattatcagtaatcatcagagaaatgcaaattaaaaccacagtgagataccatctcacaacaatcagagaagcagaagcaattactaaaaagttttttgttttttttaataacagatgctgacaagattgtggagaaaagggaacacttatacactcttggtgggaatgttaactagttcagccaatgtgataagcagtttggagacttctcaaataacttaaaatagaactactattcaatcaagcaatcccactactgggtatataccaaaaggaaggtaattaactatgtcaaaaagacacatgcactagtatattcattgctgtgcaattcagaatagcaaagatttgcagtcaacctaagtgctcaccaacagtggattagttaaagaaaatgtgctacatatacacatggaacattacatggccataaaaaataatgaaatcatgtcctttgcagcaacatgaatgtagcaggaggtcaatctcctaagtgaactaacccaggaacagaaaaccaaataccacatgttatcacttataactgagaaccaaacattgaatacacatgaacataaagatggaaacaacagataccgaggactacagatggggggaggagtagggaggtataggctgaagaaacacctgttggattctatgctcattgcctgggtgatggcattgttggaaccacaaacctcagagtcacacaatatgcctatgtaacaaacctgcatgcatacctttaatctacagtaaaggttgaagttatttaaaaataggaagaagaattaccctatacctaaagctaagatttttccctttgaatattcgtttcttcatcactgtagataagcagggaaagaaaaattattatactatactagccttttatgtgaccatgaggatttggggtaggtaggtggacagcttagataattcaccaggatattgatacaggctccatggctggaaataaccaaggatgagtgctgtgttttgagtggtctcccccagaaacgtttgttgaaatcctaacccctggtatgtatgaatgtgaattcatattatataaaaaggaataaatagcctgagcacagtggctcacacctgtaatcccagcactttgggaggccaaagcaggtggatcatttgaggtcaggagttctggccaatatggcaaaacttcatctctacaaaaaaaaaatacaaaaaaaaaaattggctgggtatggtggcgcatgcctgtagtcccagctactcaggaggctgaggcaggaattgctgaaacctggaaggcagaggttgcagtgagccaagatcatgccactgcactccagcctgggtgagacggcaagatattctgtcaaaaataaataaataaaaaacagaagaagaaatacaagaatgacagcaaactttgtattcaaaactatgaaagtaagaaacaggtggaccaacatttttaaagtgctacaagaaaatatttcaaactagaatctttcaacctgaaaaggaaaacattttcctgcaataaaggtgccattaaaaatgtctcacaatttattacatgaagcattgttctacaataaatgttaagctcttgaagcaaagattaatgataccatttagtaacttgaaattcaaaaaagtggaagtatcccaagaggcaaatacgtgtgcaattattaaatgtttcatatcaacacccaaccttatgctgtctacataagctgcacttcaaatactaatccacaagatgtaaatattgaaagaatgacattaccttgtcatgataatgcccagtgcaaaatatgcttctagtcagttgtatacatagaataggtaaatgtttgtaataaaaagtattcctcaatagaagtttcttaactcaaagaatgaaatatttcaccatgcacatacaaagaagagatatatggagatatgaagaggagtacttcataatgacaaagaggcaaattcataaataagacataatcatcctaaatgcctacacacctaaagctggaacctcaaaacacattaaattaaaggcataattcaaaacataatcaatcacatccaaattgcagctagagatagcaacattcacctcacttccagaacaagtacacagaaaattattaagcatatgaaagacttgaaaaacatttgtgtaggcggcgggtgcataaggttgggtgttgatatgaaacatttaataatttcaataatcctagcactttgggaggccaaaatgggaggatcacttgaggccaggagtttgagaccagcctgggcaccatagtgagaccccgtctctattttttttaaataaagaaaaacatttgaatgatttttttcttaactgacatttagaaagcatccacctcaaatcttcctaatccacaaacttgtctagcacccctggaacattcaccaaaataaatttttaaatgctgaatcataggtaatatgatagatgaaacagttgaattaaattataaatgtacaacaaggaaatgctggggaaattatcaaatattttaaaattaataaacacacatagcaataaacaatgagtggaagaaaaacatttcaaagaaaggtggaaaatattttgtatcaattaaaaatgaaaacacatctcggcaaatgactggggatacagatagaacagcgttaagggacaataagcctcaaatgtctgtgttagaaaagaaggaagagctgagtaaataggtaactttcacttgcagaaatactacacatcagcaaattaattccaaagtaacgtcgaggaaaaacataaaatggcaagcaaatatatacgtgcatatgtacatacattcataaatgacaaacaggacagaaaaatcagtgacatcaattttgttccttagaagaaacaggaaaattgaccccaaaaaactttccaggccacatttggtcatgatggaaatattttggcacttcctggttaagctcaacaccaacttgcacccaaaaccaataatttcatttctaggtaaatatgtctaattaattcagcatatgtatgcaagggatcacacagaaacacgattatcaaggcccgagttataaaagagaaaatccggaaacaacacaaatgtccatgataaaaagaatggataattacatgttgataaagttatgcatggactattaaactgcaatccaaaagaataaaatagagctataaaattcaatatgtatatggtgtcatagaaacacaaatgtgagaaaaagaaagaaaaatacaaaatttatattttttaaaatttgaaacaactatatatgtgagtgcttagggtgtgtgtgtgtgtgtgtgtgtgtgtgtataaccatatgtatataaatgcacacatacgcacacatatagaatgtcccggccaggcatggtggctcacacctgtaatctcagcactttgggaggctgaagtagacagatcacttgaggttaggagttcaagaccagcctggccaacatggagaaacctcctctctactaaaagtacaaaaattaggtgggcgtggtggtgggtgcctgtaaatccagctacttaggaggctgaggcacgagaattgcgtgaacctgggaggtggaggctgcaatgagccgaggtctcaccactgcattccaaactgggtgacgaagtgagattgcgtctcaaaaaaaaaaaaagttctaaaagttgtgacttgggtgtggcagattgtgacatactgccagctgctagaaatgctggggcaggaggattgcttgaactctgaagtcaaagaacagcctggggaaaatagcacatgaagaagagtttgaatctcagataaaaacaacaaaaatacatcaaaagtctttaatgtaagccaagcattcagtcatctcctgtatgagagattggatctgagacgtgttttgagttggttatagtgaaggatgcaaggtgtcaattctagttggaacaatttccaggaagccatgttctgctcttgaccaaacagccactgggcctcatgcaaggtagaaatagcctgcatacgtcatcctcccatgatgtggtcagcatgtaaactgcatgagcccctcacaacatcctgtgtgctgctgaactgagctggggcgcagccgcctgtctgcaccggcagcaccatgtcgctcatggtcgtcagcatggcgtgtgttggtgagtcctggaagggaatcgagggagggagcggtggggtggagatctgggcctggagtggagatatgggcctggagtggagatatgggcctggagtggagatataggcctggagtggagatatgggcctggggtggagatatgggcctggagtggagatatgggcctggaactgtagatatgggcctgaagtagagatatgggcctggagtagagatatgggcctggaactgtagatatgggcctggagtggagatattggcttggagtgcagatatggacctggaattgagatacgggcctggaggtggagatatgggcctagagtggagatatgggcctggaggtggagatatgggcctggaactgtagatatgggcctggagtagagatatgggcctggagtggagatgttggcttggagtgcagatatgggcctggaatggagacacgggcctggaggtggagatacaggcctggaggtggagatatgggcctggagtgtagatatgggcctggagtagagatataggacagaggtggagatataggcctggagtggagatatgggcctggagtagagatataggacggaggtggagatatgggcctggagtggagatatgggcctggaggtgatgtacagatggatcatccatcatgatctttctttccagggttcttcttgctggaggggccctggccacatgtgggtgagtccttcccccaaaccttaggttgtcatctccccacataagatgatgttcctgaaacgggaggcaggcgacacagggggttgactgatgggctgaccatgggaagccatgtgggaatctctcatgaactaggaaaaggaagccaggggaagcttcgccacagttctgtcctagccctccccggcctttctttcccttggctgagtctgtggggacccagggggagactgaagtgctcaaaggagtggtg

SEQ ID NO: 8224 - DNA, 6000 bp, Homo sapiens
cccgggttcaagtgattctcctgcctcagcctcacaagtagttgggattacaggcgtgtaccaccacacccagctaatttttatattttcagtagagacagggttttgccatgttggccaggatggtctcaatctcctgacctcatgatccacccgccttggcctcccaaagtgctgggatgacaggcgtgagccctgctttctagagttgcagggcgttaagtgtggtgaattccagccgtggcagtggagtttctggccccttctcgactatgagcgtcccaccaacccaggtgctgtgtcctttcgcctgtttcagatcattgagaagcagccaggccacattcggagcagggttttcagggaggtggagatgctgtaccagtgccagggacacaggtaggtgagccacccttgccaccgcactggcctgagctgtctttcagtggatgaagggcctgagtgccacatcacccccagcaagcgtctgtagggcacccagtttcccaggccctgcattcccctccctgaagcaggctggctgacagccccaggcgggcagtgtgaagctggcctattgccccagtcccagcttccggtggacaggccagcaccaagagggtgggcccctcctaggccgggcagcaggtacccaggggcctcaggaagcctcagctcctctcctgcccccacccccaccccaggaacgtcctagagctgattgagttcttcgaggaggaggaccgcttctacctggtgtttgagaagatgcggggaggtacctgggggctccaggctgtgaggagggagggagctgggaggtattacgggatgggggcctagtgccacctgcaggagggggcttgtggggtgagtgtcctgcccaaatggtggctcaggggtgaggcctttgtgctggaggaagccagtgtgggggcgtccccgccaaagtggaggtgggtgctggccttgaggggactttgaggtgacctgcgtgttccccctgtcctgccctgccctgccctgcccaggctccatcctgagccacatccacaagcgccggcacttcaacgagctggaggccagcgtggtggtgcaggacgtggccagcgccttggactttctgcataacaaaggtaggtggtgaccccgcccggagtctcctagggccgcctgccaaggactcctggaagacctccagaccctcaccccgtcgtggttctgtggcttctcccccaggcatcgcccacagggacctaaagccggaaaacatcctctgtgagcaccccaaccaggtaggccagttccggcagggtggccccgcgggaggggtggaccgcgtgggaccccaggctcacggaccttttggcccctcccaggtctcccccgtgaagatctgtgacttcgacctgggcagcggcatcaaactcaacggggactgctcccctatctccaccccggagctgctcactccggtgagggcccgcggggagggctgggggctcggccgcctgctctgcggttgcataacctcgcggagcctgggccatccagcagctccaggccgcggagctcgggcttccgcctagcaacagccgctgattggttgggcggggtgtcgcggcggggcctcgagcaggcgccccaacgcgtcggtgtttggccgggtggggcggggccgcggcgggggaggggcgagctctgcacctgctgattgggcgggggcgcgttcccggcagccgctgattggtcgggcccggcggggcggggtccgagccggctggcgcaggtgacccgcagttacccgggctcggttcccacgtaatgctgggaaaccccggctgacgcgcccctcccccgcccgcagtgcggctcggcggagtacatggccccggaggtagtggaggccttcagcgaggaggctagcatctacgacaagcgctgcgacctgtggagcctgggcgtcatcttgtatatcctactcagcggctacccgcccttcgtgggccgctgtggcagcgactgcggctgggaccgcggcgaggcctgccctgcctgccaggtgcggcggcccgcgcaccctcctctcctgggcaccctcctcccccgggcctgccctgaacaccccctaaccccaggggacctgccctgcgcaccctctaagtccaggggacctgccccctgaccaccccctaaccctcggggacctgccctgtgtgctccccagacccccggggacctactctgtactccccctaacccctggggacctgcccggtgtgccctactccctgatgccatccacagggcagtgccgccctgtctgccagtttcccgaaggcttttcaggtttgcctgcccaagggaaaccccagacagggttcagagagctgagaggtggagtgaggcccctggtttggggggatcaggctcaggctccctgcccgcggcttaaggctcagcatctgtggcctgtggtccctggaaccaggtccctcagagctgcttttttgtaaatccagctccacttgggtggagctgactctcctggtccggctcccagccccctctgccccaggcgtgcgtggtctagggcctggtctagggcctggttggggtccggttggagccacgtgtcagtgcacagtatccaggcccttgggcaggtctaagctcccctgtgttctatgtccccagaacatgctgtttgagagcatccaggagggcaagtacgagttccccgacaaggactgggcccacatctcctgcgctgccaaagacctcatctccaagctgctggtccgtgacgccaagcagaggctgagtgccgcccaagtcctgcagcacccctgggttcagggggtgagtaccagccgcacgggcggcaggaggggtatgggggcgctgcagggtggcctcagagcgagcatgggaagccctgagggtgtagcctggacaccctgagatgcactgaggcttgagagcacaggctctgccctgggatgaggggtgcagccgaaatccccaccgcccgcctgtgcacggtgcccgctggccagccaggcggctcccaggagcagctactcagagaaccttcctggagggtggtggggacccacagcctgcagcaggctggagcgaagcgggcagcgagcccagctcacatagaccccagcctagcctgccgtcagtctcaagcccaggctgtgcctccacccttccctgtgtggcctccagtcgaggaggagtcgggtgtttctcctgccagaggtcatctgagctgagctgccaccccagggagtgaggatttactaaaaatagaagctggggtcactctgtgtccccaggcgaggggctgggggcctccaatctccttgcagaagcatccagagacccatgggttaagaggggggcggaggtgggtttgggctgggaacagccgggagagatggggcttggggctctgcccccaccctcactgggtcctgtaacaccaggcctcagcctggcccagcctcgggttccctgggcagggggacatggagcctcaccatagggacctcggggtgggcgcttggctcccggggcacccaggtgcactcctggtctccggtggggtcctggtgatgggatgggcatggcatcccttggccagacaccccacccagcgccccaggcggccccagctgctctccagccctgcccccgcccactctcgttgcagtgcgccccggagaacaccttgcccactcccatggtcctgcagaggtaaggcccgcaggggtgctcgggacccctgagtccagggggcggggtttccaggttaagacatttgtgaaagacccggagaactgctttggggtcggggaggcaggcaagcctggtgactcagtgaagctcccggtggggccctggtgctcagaggagccccagggtgggggctgggaggggggcatgaagccccttcccccagggccttcacagaccccaggggtcccctgaggggtgcctcttggtgaccacctacccccaccccgtttcccaggaacagctgtgccaaagacctcacgtccttcgcggctgaggccattgccatgaaccggcagctggcccagcacgacgaggacctggctgaggaggaggccgcggggcagggccagcccgtcctggtccgagctacctcacgctgcctgcagctgtctccaccctcccagtccaagctggcgcagcggcggcaaagggccagtctgtcctcggccccagtggtcctggtgggagaccacgcctgaccctcccatctcccctctgtacataggtcacccgtcccccaatcaaatctaaaggttttttaagctatcgccagccggtgtccagcgggctgcccctcctctgcctggattcccaggcactaagctcagctgaggggggtgttttatagaaggtttttgcttttgggttttttttttcctgtttccacccctccccgttattttttcctttggatggttaaaagcattgcaggcacccgggaaggtgagcagagggtaggtgggtgggcttgtcccctccccggtcccccgccctgctcacctctactatgaaggtgcccccaggtcacctgtgctgcccgccatctgcccacgtggcttgcagtgactcaggagagcaggcccacagcgtttgccatcttgcagagctggggaggggcacaggaccctgccctcgtgttccctcccagcccgcagtatttcagggacaggctcttcccctctatccctcaccctgagagcacccctggtggcttggttggggaagggaggggctgcctgtctctggaggtgtcaggcaggcaggtggcaggcagctcacccacccaccccatgggatcccccagcccttcacccgcgcctgccttgtccccatgatagttgacaatcggggcttcctgcaaggcccgtctgtctgtccaggactcctggtggccagattcggcctccgaccttgaccttaaactgcagctgaccccaggggctcgccgctgcccctcccctccacaccaaggcctgagacagcaggagccccgcctggcccgaagccgtttccaccgcagcaggcagaggggctggacaggcactgtcagccaatgtggggggtcctgaagacacccccttggggcacccgagtgccccttctcagggctcagtctgaccgtagccacgtcctgcctcgcgccgcccctcgggcctgacctggaagctccgtcagctccgtccttgtccttagagctgagcccagaccccggggtctggccgaatcctcacccccagggcagtgtttttggtctgccaccttcaggaaaacggctgcggcctcggcctcccttcgggcacccaggaatgcgggggtctgctcagtccccccaccctccatgctccaacccccgggggctgcggagcctgctgccccctccccgcgggtggggacgttctatgcaatacagggttccactttagaagtgcgcgcggctagggtcaccgcccgcccttcccggcgcagcccccgagctccacagctggggcagcccctctggcttctaaatccgcggtcgggattcttcctcctgtttagttttttagtttttccttaaaaaaaaacaacacatcgatggactttgcttccctgttcttgaagaatacttgaatgtcggggggcctgggggtgggggcctcggagaccgtctgcctggccctgctgcccctcctgaatctcgtatgatggtcacagtccggtggccgtgggggtgctctgccttccctggtccccactgcccatatctgtggactgccccttccaaagacccctggggggggtggggcattccgcccacccctttcccccatcacttctcgcctgtcagtgattccatgtttcgtaacgggggattctctgcctttttgtatcaaagaacaagcaaatggacccccgcccgctgcaggcgcc

SEQ ID NO: 8225 - DNA, 6000 bp, Homo sapiens
tacagacctgtgtggcttggttgattatttatagtgtgggccaccattctgggctgccttctatgcagaaaaaaaacctattttctaaaaacgatgatttcacaatgactctctccttcacaggcctaggtccctgtgggtggcccagccctcacctcaccgtgctcaaggtatctgtgtccagttctgcttcccctgacagtgtgggggcttcgaaaatggggctgtttggtcactgggcgggcacactgataccggaaggcgcctgcctaaataaacactggcaggtggcctcccaggagagggggtgtctggtccccacggcagtgggggtggggtggcaggggtgctagcggcaggactggcttcaggggcagtctaggaacgcagtctctcagggccctgcaggaaaaacaagggtgttgcggttggttgaaggcttggctgttactaagtagtattaatctctgtttctttgtttcttttttttttgagacagagtttcgctcttgtcgcccaggctggagtgcagtggcacaatcttggctcaccgcaacctccacctcccaggttcaagcaattctcctgcctcagcctcccaagtggctaggattacaggcgtgagccaccatgccaggctaattttgtatttttagtagagacggagtttctccatgttggtcaggctggtctcaagctcctcacctcaggtgatccgcctgcctcggcctcccaaagcgctgagattacaggtgtgagccaccacacccggccaccaagtagtagtaatcttaaaaatccaaaatcctaatcctttctagcctcatcttttttttttttttttttttgagacagagtctcactctgtcacccaggctggagtacagtggcgcgatcttggctcactgcaaccaccacctcccagcttccagcgattctcctgcctcagcctccaagtagctggaattagaggcgcccgccaaaacaccccggtaatttttgtatttgtagtagtgacgaggtttcaccatgttggccaggctggtctcgaactcctgagcttgtgatccactggcctcggcttcccaaagtgctgggactacaggcatgagccactgctcccggcttacaaaaaatgttaaaattagctgggcatggtggtgcactcctgtagtcccagctactcaggatgctgaggtcggaggatcacttgagcccaggagtgggaggctgcagtgagctatgattgcaccactgcactctagcctatgcaacagaggactgtgtctgaaaaaatttttttaggccgggtgtggtggctcgcgcctgtaatcccaggactttgggaggccgaggcaggcagatcacgaggtcaggagatcgagaccatcctggctaacacagtgaaactccgtctctactaaaaatacaaaaaattagccgggcgtggtggtgggcgcctgtagccccagctactcgggaggctgaggcaggagaatggcataaacccgggaggtggagcttgcagtgagccgagatggcaccactgcactccagcctgggccacacagtgagactccacctcaaaaaaaaaatttttttttaataaaaatattaaaacactgctttaaagattattaatcttgatcactgaaggctatcacccttacctgccaaggtaaggagcctggggttccaagtctattttacagatgggaacacccaaggcccaaatcaattgcattcattcaagggagcaggctgcctagtggatgacgatgatgaagagactgtgtttcgcacctgccaaagggggaccttaatgtcatagccttatttcagtagcctctttgggacctgttctctgcgtggcagagagagggatcctttaataaccgccaccaggtcccatccctcctcttcccacggctctccaggattcccacctcactcagagcaaaagcccaagtccagggccaggcgcagtggctcacacctgtaatccctgcactctgggaggtggaggcgggaggatcacctgatgtcaggatttcaagaccagtctggccaatatggtgaaacctgtctctactaaatatacaaaaattagccaggcgtggtgatgcgcacctgtaatcccagctactcaggaggcagaggcaggagaatcacttgaatccgggtggcagaggctgcagtcagccaacatcacatcactgcactccagcctgggcaacagagtgagactccatctcaaaaacaaacaaacagctgatcacggtggctcacgcctgtaatcccagcactttgggaggccgaggcgggcagatcatctgaggtcgggagttcaagaccagcctgaccaacatggagaaaccccgtctctactaaaactccaaaattagcggggcgtggtggcacgtgcctgtaatccagctactcgggaggctgaggcaggaatcacttgaacccaggatgcggtgagctgagattgtgccattgtactccagcctgggcaacaagagcgaaactccatctcaaaaaacaaaccaaccaaccaccaggtcccgtccctcctcctcccacagccttccagggctcctacctcactcagagcaaaatcccaagtcctccccaagacccacaagtccttgctggactggcctgcttcaccagctacagagttagcagggcccagtgcaaaagaaaactcaaaggccccttgttcaaaaatgattagaaatctcaaaatgcagcagtaaatattaacccaagcacaagccctgctgtggggtgggggggccctggacaaaagcacgaagcccccggccctgcctccctccggccttcctgacctccccccgggcactctgctgccaggcacagtcctgccccagggcctttgcacctgttggtcctgcctctgactacctctgtaccccatccccctgttctccctccttcttcaggtcgctttaggggtggaggaagccgtctctgatcctccctcccacctctttaactttgcaccttcctaccctgccattctcccggctggtttttctgcagaactgtccccaccatctgacctgccaggaattcagcttgtgaatttgtctctgtctgtctccaggcaccaccaccagggcagggacccacccccgccccgccccaccccagggccctggagcagcggggcctggcacacagtaggcgttctataaatgtgtcacaagaatggcttccctcaggaaggcggcattaccgctgcctttctgcagaaaaggaaactaaggctcagcaagaaccaccgcccagccagagccaaggtcacagagcacgtccgtggcacgcgtccaggtcgtgccacagcagggccggcggcttcgacgcgggcagccgggtcccttttctttgacagatggggaaaccgaggcccggccggctgccgggtaggagagggtggcgggggccgctgcccggggcgggggcgggccgggcccaaggtcaccgcggcgggcgggccacggggaggcgggccggcgtggggatccgcaggcctccccgggcgcgcgcgtcccccccctcggcggcgcgcacggggcacgggcggcggcaggtggagccgaagcctccgcagcagccgagccgcggccactgccggcgtcgccgccattagacaatagcggtggggccggggagcggggaggcgggcggcggggaggggcggggaggggcgccgggcgcgcaggaagcggggcccggggcgcgccggggccgggcgcgcggggagggggcgcaggaagcgggcgaggccgggcgcgggaggcggcggcggccccgggagctgccgatcggcgccgggacaaaggcgcggccgcccggcgcccccagcagcccgagccggggcgcacagccggggcgcagcccgcgccccccgccgcgattgacatgatgtttccacaaagcaggcattcggtaagcggggcccgtccggccggcgcccccaccccggatccgggccctacgcccccgacccccggctcccggccccgcgccccccaacccccaggcccggtgcctccggcccggcgccccccccaactccccggccctgtcttccctctccagctcccagcccggcgcgacccccctcccctcctgccgccggcccccggacaccccccctccagttcccgatccaccccagcttccgggccccgagcccccccgccgcagctcccggcttggcgccccccccccccaacccgccgggacagtcagggcctcggacggccttggcctcgggcctggggcgctccggaagccccgcgaggcacctctagcccggggatcctttgggggcctgtggtggggggggtgatccgaggcgcacccctcccggaagagcgtgtccccgaggaagggcgctgggaatctggggttgggcccccccggaagatttcgagcaccgagagagagacccctcccccaagaggactttgcagggaggaatcgctgccccccaacttggggagggggctccctagggcgcgtttctacccccctcggatgtgcactccctcccggcgctttggagggcggtagagggcgcaccctgccccccatctagggcgggccttaaaacgcacccccactgcctgggggtggcgggggacggggcggctccgggcgcacccacccgctcggcttcccccgggagaggcggggggcaggaagcgcgggtggggtcgcgccaggggccgtaaacacgggcccaggaagtggggcaggagggggggcgccgcagctgcgcggccgctccctcctagccggcccttgaggggggtccagcccacgcctgggcctgacccgggccgccccatccctacagggctcctcgcacctaccccagcaactcaaattcaccacctcggactcctgcgaccgcatcaaagacgaatttcagctactgcaagctcagtaccacaggtgagctgggggactgggggtccctgcgtcccgagaatgtgagtccccccatttcttctgcgcagatggcaaggctgaggcctggagattgggaaaataatatatgctagactctgacctaatcacttgacaaatactgaattcatttattttaaacagccccattttgtagaggagaaaaccgaggcacaaaaatagttaaataatttgcccaaagattcagctgtgtggcttcagagcccctccctcctccccaatacccccaagtcccccattggataaaagaccttccaacaattggagttacggcacggactcgccatccctcaacccccaaaacagaaacattctgcagcctggtcatctctctctttgcccagttttggagaaagggttcccagcacccgtcagattctccaaggtgctgcttctttcagaaatctggcgtttctgaagagcttgccacgctgcggtatctaaggggaaggaactatttagtcctcttacacttaaagaaacttaagcccaggccaggcgtggtggctcatgcctgtaatcccagcactttgggaggccgaggaaggtggatcacttgaggtcaggagttcgagaccagcctggccaacatggtgaaaccccgtctctaccaaaaatacatagttagctgggtgtggtggcgggcgcctgtaatcccagctactcgggtggctgaggcaggaaacttgcttgaacccgtgaggcggaggttgcagtgagcagagatggagccactgctctccagcctgggtaacagggagactctgtctcaaaaaaaaaaaaaaaaaaaaaaaagaaagaaaaaaagaaacttaagcccagagatgttatgatgttatttcctcgggggtgtccatagcattgaggaagtggcaaggctgaggtttgcaccaggtctctctcctggtttaaggatataggttctcgcctgccctgctctggaggggcacgccgggcctgggaatctggaga
